United States Patent Application Publication US 2024/0066114 A1 - sequence listing, part 16

SEQ ID NO: 20563 - RNA, 1100 nt, Artificial Sequence
  SARS-CoV-2__MT810985.1__ORF3a protein mRNA gc
aggagagucccgcagucggcguccagcggcucugcuuguucgugugugugucguugcaggccuuauucaagcuuaccauggaccuguucaugcgcaucuucaccaucggcaccgugacgcucaagcagggggagaucaaggacgccacgccccuggacuucguccgggccaccgcgaccaucccgauccaggccagccugcccuucggcuggcucaucguggggguggcccugcuggccgucuuccaguccgccagcaagaucaucacccucaagaagcgcuggcagcuggcgcuguccaagggcgugcacuucgugugcaaccuccugcugcuguucgucaccguguacagccaccuccugcucguggccgccgggcuggaggcccccuuccuguaccucuacgcgcuggucuacuuccugcaguccaucaacuucgugcggaucaucaugcgccucuggcugugcuggaagugccggagcaagaacccccugcucuacgacgccaacuacuuccugugcuggcacaccaacugcuacgacuacugcaucccguacaacuccgugaccagcuccaucgucaucacgagcggcgacggcaccaccucccccaucagcgagcacgacuaccagaucgggggcuacaccgagaagugggaguccggggugaaggacugcgugguccugcacagcuacuucacguccgacuacuaccagcucuacagcacccagcuguccaccgacaccggcguggagcacgugacguucuucaucuacaacaagaucgucgacgagcccgaggagcacgugcagauccacaccaucgacgggagcuccggcguggucaaccccgugauggagccgaucuacgacgagcccaccaccacgaccagcgugccccugugaggacuagucccuguucccagagcccacuuuuuuuucuuuuuuugaaauaaaauagccugucuuucagaucucaaaggcucuuuucagagccaccaaaaaaaaaaaaaaaaaaaaaaaaaaaaaaaaaaaaaaaaaaaaaaaaaaaaaaaaaaaaaaaaaaaaaaaaaaaaaaaaaaaaaaaaaaaaaaaaaaaaa

SEQ ID NO: 20564 - RNA, 1100 nt, Artificial Sequence
  SARS-CoV-2__MT811010.1__ORF3a protein mRNA gc
aggagagucccgcagucggcguccagcggcucugcuuguucgugugugugucguugcaggccuuauucaagcuuaccauggaccuguucaugcgcaucuucaccaucggcaccgugacgcucaagcagggggagaucaaggacgccacccccagcgacuucguccgggccaccgcgaccaucccgauccaggccucccugcuguucggcuggcucaucguggggguggcccugcuggccgucuuccagagcgccuccaagaucaucacgcucaagaagcgcuggcagcuggcgcugagcaagggcgugcacuucgugugcaaccuccugcugcuguucgucaccguguacucccaccuccugcucguggccgccgggcuggaggcccccuuccuguaccucuacgcgcuggucuacuuccugcagagcaucaacuucgugcggaucaucaugcgccucuggcugugcuggaagugccgguccaagaacccccugcucuacgacgccaacuacuuccugugcuggcacaccaacugcuacgacuacugcauccccuacaacagcgugaccuccagcaucgucaucacguccggcgacggcaccaccagcccgaucuccgagcacgacuaccagaucgggggcuacaccgagaagugggagagcggggugaaggacugcgugguccugcacuccuacuucacgagcgacuacuaccagcucuacuccacccagcugagcaccgacaccggcguggagcacgugacguucuucaucuacaacaagaucgucgacgagcccgaggagcacgugcagauccacaccaucgacggguccagcggcguggucaaccccgugauggagcccaucuacgacgagccgaccaccacgaccagcgugccccugugaggacuagucccuguucccagagcccacuuuuuuuucuuuuuuugaaauaaaauagccugucuuucagaucucaaaggcucuuuucagagccaccaaaaaaaaaaaaaaaaaaaaaaaaaaaaaaaaaaaaaaaaaaaaaaaaaaaaaaaaaaaaaaaaaaaaaaaaaaaaaaaaaaaaaaaaaaaaaaaaaaaaa

SEQ ID NO: 20565 - RNA, 1100 nt, Artificial Sequence
  SARS-CoV-2__MT811252.1__ORF3a protein mRNA gc
aggagagucccgcagucggcguccagcggcucugcuuguucgugugugugucguugcaggccuuauucaagcuuaccauggaccuguucaugcgcaucuucaccaucggcaccgugacgcucaagcagggggagaucaaggacgccacccccagcgacuucguccgggccaccgcgaccaucccgauccaggccucccugcccuucggcuggcugaucguggggguggcccuccuggccgucuuccagagcgccuccaagaucaucacgcugaagaagcgcuggcagcucgcgcugagcaagggcgugcacuucgugugcaaccugcuccugcuguucgucaccguguacucccaccuccugcugguggccgccgggcucgaggcccccuuccuguaccuguacgcgcucgucuacuuccugcagagcaucaacuucgugcggaucaucaugcgccuguggcucugcuggaagugccgguccaagaacccccugcuguacgacgccaacuacuuccucugcuggcacaccaacugcuacgacuacugcaucccguacaacagcgugaccuccagcaucgucaucacguccggcgacggcaccaccagccccaucuccgagcacgacuaccagaucgggggcuacaccgagaagugggagagcggggugaaggacugcgugguccugcacuccuacuucacgagcgacuacuaccagcuguacuccacccagcucagcaccgacaccggcguggagcacgugacguucuucaucuacaacaagaucgucgacgagcccgaggagcacgugcagauccacaccaucgacggguccagcggcguggucaaccccgugauggagccgaucuacgacgagcccaagaccaccacgagcgugccccugugaggacuagucccuguucccagagcccacuuuuuuuucuuuuuuugaaauaaaauagccugucuuucagaucucaaaggcucuuuucagagccaccaaaaaaaaaaaaaaaaaaaaaaaaaaaaaaaaaaaaaaaaaaaaaaaaaaaaaaaaaaaaaaaaaaaaaaaaaaaaaaaaaaaaaaaaaaaaaaaaaaaaa

SEQ ID NO: 20566 - RNA, 1100 nt, Artificial Sequence
  SARS-CoV-2__MT811259.1__ORF3a protein mRNA gc
aggagagucccgcagucggcguccagcggcucugcuuguucgugugugugucguugcaggccuuauucaagcuuaccauggaccuguucaugcgcaucuucaccaucggcaccgugacgcucaagcagggggagaucaaggacgccacccccagcgacuucguccgggccaccgcgaccaucccgauccaggccucccugcccuucggcuggcugaucguggggguggcccuccuggccgucuuccacagcgccuccaagaucaucacgcugaagaagcgcuggcagcucgcgcugagcaagggcgugcacuucgugugcaaccugcuccugcuguucgucaccguguacucccaccuccugcugguggccgccgggcucgaggcccccuuccuguaccuguacgcgcucgucuacuuccugcagagcaucaacuucgugcggaucaucaugcgccuguggcucugcuggaagugccgguccaagaacccccugcuguacgacgccaacuacuuccucugcuggcacaccaacugcuacgacuacugcaucccguacaacagcgugaccuucuccaucgucaucacgagcggcgacggcaccaccucccccaucagcgagcacgacuaccagaucgggggcuacaccgagaagugggaguccggggugaaggacugcgugguccugcacagcuacuucacguccgacuacuaccagcuguacagcacccagcucuccaccgacaccggcguggagcacgugacguucuucaucuacaacaagaucgucgacgagcccgaggagcacgugcagauccacaccaucgacgggagcuccggcguggucaaccccgugauggagccgaucuacgacgagcccaccaccacgaccagcgugccccugugaggacuagucccuguucccagagcccacuuuuuuuucuuuuuuugaaauaaaauagccugucuuucagaucucaaaggcucuuuucagagccaccaaaaaaaaaaaaaaaaaaaaaaaaaaaaaaaaaaaaaaaaaaaaaaaaaaaaaaaaaaaaaaaaaaaaaaaaaaaaaaaaaaaaaaaaaaaaaaaaaaaaa

SEQ ID NO: 20567 - RNA, 1100 nt, Artificial Sequence
  SARS-CoV-2__MT811301.1__ORF3a protein mRNA gc
aggagagucccgcagucggcguccagcggcucugcuuguucgugugugugucguugcaggccuuauucaagcuuaccauggaccuguucaugcgcaucuucaccaucggcaccgugacgcucaagcagggggagaucaaggacgccacccccagcgacuucguccgggccaccgcgaccaucccgauccaggccucccugcccuucggcuggcugaucguggggguggcccuccuggccgucuuccagagcgccuccaagaucaucacgcugaagaagcgcuggcagcucgcgcugagcaagggcgugcacuucgugugcaaccugcuccugcuguucgucaccguguacucccaccuccugcugguggccgccgggcucgaggcccccuuccuguaccuguacgcgcucgucuacuuccugcagagcaucaacuucgugcggaucaucaugcgccuguggcucugcuggaagugccgguccaagaacccccugcuguacgacgccaacuacuucuucugcuggcacaccaacugcuacgacuacugcaucccguacaacagcgugaccuccagcaucgucaucacguccggcgacggcaccaccagccccaucuccgagcacgacuaccagaucgggggcuacaccgagaagugggagagcggggugaaggacugcgugguccuccacuccuacuucacgagcgacuacuaccagcuguacuccacccagcugagcaccgacaccggcguggagcacgugacguucuucaucuacaacaagaucgucgacgagcccgaggagcacgugcagauccacaccaucgacggguccagcggcguggucaaccccgugauggagccgaucuacgacgagcccaccaccacgaccagcgugccccucugaggacuagucccuguucccagagcccacuuuuuuuucuuuuuuugaaauaaaauagccugucuuucagaucucaaaggcucuuuucagagccaccaaaaaaaaaaaaaaaaaaaaaaaaaaaaaaaaaaaaaaaaaaaaaaaaaaaaaaaaaaaaaaaaaaaaaaaaaaaaaaaaaaaaaaaaaaaaaaaaaaaaa

SEQ ID NO: 20568 - RNA, 1100 nt, Artificial Sequence
  SARS-CoV-2__MT811420.1__ORF3a protein mRNA gc
aggagagucccgcagucggcguccagcggcucugcuuguucgugugugugucguugcaggccuuauucaagcuuaccauggaccuguucaugcgcaucuucaccaucggcaccgugacgcucaagcagggggagaucaaggacgccacccccagcgacuucguccgggccaccgcgaccaucccgauccaggccucccugcccuucggcuggcugaucguggggguggcccuccuggccgucuuccagagcgccuccaagaucaucacgcugaagaagcgcuggcagcucgcgcugagcaagggcgugcacuucgugugcaaccugcuccugcuguucgucaccguguacucccaccuccugcugguggccgccgggcucgaggcccccuuccuguaccuguacgcgcucgucuacuuccugcagagcaucaacuucgugcggaucaucaugcgccuguggcucugcugcaagugccgguccaagaacccccugcuguacgacgccaacuacuuccucugcuggcacaccaacugcuacgacuacugcaucccguacaacagcgugaccuccagcaucgucaucacguccggcgacggcaccaccagccccaucuccgagcacgacuaccagaucgggggcuacaccgagaagugggagagcggggugaaggacugcgugguccugcacuccuacuucacgagcgacuacuaccagcuguacuccacccagcucagcaccgacaccggcguggagcacgugacguucuucaucuacaacaagaucgucgacgagcccgaggagcacgugcagauccacaccaucgacggguccagcggcguggucaaccccgugauggagccgaucuacgacgagcccaccaccacgaccagcgugccccugugaggacuagucccuguucccagagcccacuuuuuuuucuuuuuuugaaauaaaauagccugucuuucagaucucaaaggcucuuuucagagccaccaaaaaaaaaaaaaaaaaaaaaaaaaaaaaaaaaaaaaaaaaaaaaaaaaaaaaaaaaaaaaaaaaaaaaaaaaaaaaaaaaaaaaaaaaaaaaaaaaaaaa

SEQ ID NO: 20569 - RNA, 1100 nt, Artificial Sequence
  SARS-CoV-2__MT811464.1__ORF3a protein mRNA gc
aggagagucccgcagucggcguccagcggcucugcuuguucgugugugugucguugcaggccuuauucaagcuuaccauggaccuguucaugcgcaucuucaccaucggcaccgugacgcucaagcagggggagaucaaggacgccacccccagcgacuucguccgggccaccgcgaccaucccgauccaggccucccugcccuucggcuggcugaucguggggguggcccuccuggccgucuuccagagcgccuccaagaucaucacgcugaagaagcgcuggcagcucgcgcugagcaagggcgugcacuucgugugcaaccugcuccugcuguucgucaccguguacucccaccuccugcugguggccgccgggcucgaggcccccuuccuguaccuguacgcgcucgucuacuuccugcagagcaucaacuucgugcggaucaucaugcgccuguggcucugcuggaagugccgguccaagaacccccugcuguacgacgccaacuacuuccucugcuggcacaccaacugcuacgacuacugcaucccgcacaacagcgugaccuccagcaucgucaucacguccggcgacggcaccaccagccccaucuccgagcacgacuaccagaucgggggcuacaccgagaagugggagagcggggugaaggacugcgugguccugcacuccuacuucacgagcgacuacuaccagcuguacuccacccagcucagcaccgacaccggcguggagcacgugacguucuucaucuacaacaagaucgucgacgagcccgaggagcacgugcagauccacaccaucgacggguccagcggcguggucaaccccgugauggagccgaucuacgacgagcccaccaccacgaccagcgugccccugugaggacuagucccuguucccagagcccacuuuuuuuucuuuuuuugaaauaaaauagccugucuuucagaucucaaaggcucuuuucagagccaccaaaaaaaaaaaaaaaaaaaaaaaaaaaaaaaaaaaaaaaaaaaaaaaaaaaaaaaaaaaaaaaaaaaaaaaaaaaaaaaaaaaaaaaaaaaaaaaaaaaaa

SEQ ID NO: 20570 - RNA, 1100 nt, Artificial Sequence
  SARS-CoV-2__MT811495.1__ORF3a protein mRNA gc
aggagagucccgcagucggcguccagcggcucugcuuguucgugugugugucguugcaggccuuauucaagcuuaccauggaccuguucaugcgcaucuucaccaucggcaccgugacgcucaagcagggggagaucaaggacgccacccccagcgacuucguccgggccaccgcgaccaucccgauccaggccucccugcccuucggcuggcugaucguggggguggcccuccuggccgucuuccacagcgccuccaagaucaucacgcugaagaagcgcuggcagcucgcgcugagcaagggcgugcacuucgugugcaaccugcuccugcuguucgucaccguguacucccaccuccugcugguggccgccgggcucgaggcccccuuccuguaccuguacgcgcucgucuacuuccugcagagcaucaacuucgugcggaucaucaugcgccuguggcucugcuggaagugccgguccaagaacccccugcuguacgacgccuacuacuuccucugcuggcacaccaacugcuacgacuacugcaucccguacaacagcgugaccuccagcaucgucaucacguccggcgacggcaccaccagccccaucuccgagcacgacuaccagaucgggggcuacaccgagaagugggagagcggggugaaggacugcgugguccugcacuccuacuucacgagcgacuacuaccagcuguacuccacccagcucagcaccgacaccggcguggagcacgugacguucuucaucuacaacaagaucgucgacgagcccgaggagcacgugcagauccacaccaucgacggguccagcggcguggucaaccccgugauggagccgaucuacgacgagcccaccaccacgaccagcgugccccugugaggacuagucccuguucccagagcccacuuuuuuuucuuuuuuugaaauaaaauagccugucuuucagaucucaaaggcucuuuucagagccaccaaaaaaaaaaaaaaaaaaaaaaaaaaaaaaaaaaaaaaaaaaaaaaaaaaaaaaaaaaaaaaaaaaaaaaaaaaaaaaaaaaaaaaaaaaaaaaaaaaaaa

SEQ ID NO: 20571 - RNA, 1100 nt, Artificial Sequence
  SARS-CoV-2__MT811505.1__ORF3a protein mRNA gc
aggagagucccgcagucggcguccagcggcucugcuuguucgugugugugucguugcaggccuuauucaagcuuaccauggaccuguucaugcgcaucuucaccaucggcaccgugacgcucaagcagggggagaucaaggacgccacccccagcgacuucguccgggccaccgcgaccaucccgauccaggccucccugcccuucggcuggcugaucguggggguggcccuccuggccgucuuccagagcgccuccaagaucaucacgcugaagaagcgcuggcagcucgcgcugagcaagggcgugcacuucgugugcaaccugcuccugcuguucgucaccguguacucccaccuccugcugguggccgccgggcucgaggcccccuuccuguaccuguacgcgcuccuguacuuccugcagagcaucaacuucguccggaucaucaugcgccucuggcugugcuggaagugccgguccaagaacccccugcucuacgacgccaacuacuuccugugcuggcacaccaacugcuacgacuacugcaucccguacaacagcgugaccuccagcaucgugaucacguccggcgacggcaccaccagccccaucuccgagcacgacuaccagaucgggggcuacaccgagaagugggagagcggggucaaggacugcguggugcugcacuccuacuucacgagcgacuacuaccagcucuacuccacccagcugagcaccgacaccggcgucgagcacgugacguucuucaucuacaacaagaucguggacgagcccgaggagcacguccagauccacaccaucgacggguccagcggcguggugaaccccgucauggagccgaucuacgacgagcccaccaccacgaccagcgugccccugugaggacuagucccuguucccagagcccacuuuuuuuucuuuuuuugaaauaaaauagccugucuuucagaucucaaaggcucuuuucagagccaccaaaaaaaaaaaaaaaaaaaaaaaaaaaaaaaaaaaaaaaaaaaaaaaaaaaaaaaaaaaaaaaaaaaaaaaaaaaaaaaaaaaaaaaaaaaaaaaaaaaaa

SEQ ID NO: 20572 - RNA, 1100 nt, Artificial Sequence
  SARS-CoV-2__MT811513.1__ORF3a protein mRNA gc
aggagagucccgcagucggcguccagcggcucugcuuguucgugugugugucguugcaggccuuauucaagcuuaccauggaccuguucaugcgcaucuucaccaucggcaccgugacgcucaagcagggggagaucaaggacgccacccccagcgacuucguccgggccaccgcgaccaucccgauccaggccucccugcccuucggcuggcugaucguggggguggcccuccuggccgucuuccagagcgccuccaagaucaucacgcugaagaagcgcuggcagcucgcgcugagcaagggcgugcacuucgugugcaaccugcuccugcuguucgucaccguguacucccaccuccugcugguggccgccgggcucgaggcccccuuccuguaccuguacgcgcucgucuacuuccugcagagcaucaacuucgugcggaucaucaugcgccuguggcucugcuggaagugccgguccaagaacccccugcuguacgacgccaacuacuuccucugcuggcacaccaacugcuacgacuacugcaucccguacaacagcgugaccuccagcaucgucaucacguccggcgacggcaccaccagccccaucuccgagcacgacuaccagaucgggggcuacaccgagaagugggagagcggggugaaggacugcgugguccugcacuccuacuucacgagcgacuacuaccagcuguacuccacccagcucagcaccgacaccggcguggagcacgugacguucuucaucuacaacaagaucgucgacgagcccgaggagcacgugcagauccacaccaucgacggguccagcggcguggucaacccccugauggagccgaucuacgacgagcccaccaccacgaccagcgugccccugugaggacuagucccuguucccagagcccacuuuuuuuucuuuuuuugaaauaaaauagccugucuuucagaucucaaaggcucuuuucagagccaccaaaaaaaaaaaaaaaaaaaaaaaaaaaaaaaaaaaaaaaaaaaaaaaaaaaaaaaaaaaaaaaaaaaaaaaaaaaaaaaaaaaaaaaaaaaaaaaaaaaaa

SEQ ID NO: 20573 - RNA, 1100 nt, Artificial Sequence
  SARS-CoV-2__MT811520.1__ORF3a protein mRNA gc
aggagagucccgcagucggcguccagcggcucugcuuguucgugugugugucguugcaggccuuauucaagcuuaccauggaccuguucaugcgcaucuucaccaucggcaccgugacgcucaagcagggggagaucaaggacgccacccccagcgacuucguccgggccaccgcgaccaucccgauccaggccucccugcccuucggcuggcugaucguggggguggcccuccuggccgucuuccagagcgccuccaagaucaucacgcugaagaagcgcuggcagcucgcgcugagcaagggcgugcacuucgugugcaaccugcuccugcuguucgucaccguguacucccaccuccugcugguggccgccuuccucgaggcccccuuccuguaccuguacgcgcucgucuacuuccugcagagcaucaacuucgugcggaucaucaugcgccuguggcucugcuggaagugccgguccaagaacccccugcuguacgacgccaacuacuuccucugcuggcacaccaacugcuacgacuacugcaucccguacaacagcgugaccuccagcaucgucaucacguccggggacggcaccaccagccccaucuccgagcacgacuaccagaucggcggguacaccgagaagugggagagcggcgugaaggacugcgugguccugcacuccuacuucacgagcgacuacuaccagcuguacuccacccagcucagcaccgacaccgggguggagcacgugacguucuucaucuacaacaagaucgucgacgagcccgaggagcacgugcagauccacaccaucgacggcuccagcgggguggucaaccccgugauggagccgaucuacgacgagcccaccaccacgaccagcgugccccugugaggacuagucccuguucccagagcccacuuuuuuuucuuuuuuugaaauaaaauagccugucuuucagaucucaaaggcucuuuucagagccaccaaaaaaaaaaaaaaaaaaaaaaaaaaaaaaaaaaaaaaaaaaaaaaaaaaaaaaaaaaaaaaaaaaaaaaaaaaaaaaaaaaaaaaaaaaaaaaaaaaaaa

SEQ ID NO: 20574 - RNA, 1100 nt, Artificial Sequence
  SARS-CoV-2__MT811526.1__ORF3a protein mRNA gc
aggagagucccgcagucggcguccagcggcucugcuuguucgugugugugucguugcaggccuuauucaagcuuaccauggaccuguucaugcgcaucuucaccaucggcaccgugacgcucaagcagggggagaucaaggacgccacccccagcgacuucguccgggccaccgcgaccaucccgauccaggccucccugcccuucggcuggcugaucguggggguggcccuccuggccgucuuccagagcgccuccaagaucaucacgcugaagaagcgcuggcagcucgcgcugagcaagggcgugcacuucgugugcaaccugcuccugcuguucgucaccguguacucccaccuccugcugguggccgccgggcucgaggcccccuuccuguaccuguacgcgcucgucuacuuccugcagagcauccacuucgugcggaucaucaugcgccuguggcucugcuggaagugccgguccaagaacccccugcuguacgacgccaacuacuuccucugcuggcacaccaacugcuacgacuacugcaucccguacaacagcgugaccuccagcaucgucaucacguccggcgacggcaccaccagccccaucuccgagcacgacuaccagaucgggggcuacaccgagaagugggagagcggggugaaggacugcgugguccugcacuccuacuucacgagcgacuacuaccagcuguacuccacccagcucagcaccgacaccggcguggagcacgugacguucuucaucuacaacaagaucgucgacgagcccgaggagcacgugcagauccacaccaucgacggguccagcggcguggucaaccccgugauggagccgaucuacgacgagcccaccaccacgaccagcgugccccugugaggacuagucccuguucccagagcccacuuuuuuuucuuuuuuugaaauaaaauagccugucuuucagaucucaaaggcucuuuucagagccaccaaaaaaaaaaaaaaaaaaaaaaaaaaaaaaaaaaaaaaaaaaaaaaaaaaaaaaaaaaaaaaaaaaaaaaaaaaaaaaaaaaaaaaaaaaaaaaaaaaaaa

SEQ ID NO: 20575 - RNA, 1100 nt, Artificial Sequence
  SARS-CoV-2__MT811535.1__ORF3a protein mRNA gc
aggagagucccgcagucggcguccagcggcucugcuuguucgugugugugucguugcaggccuuauucaagcuuaccauggaccuguucaugcgcaucuucaccaucggcaccgugacgcucaagcagggggagaucaaggacgccacccccagcgacuucguccgggccaccgcgaccaucccgauccaggccucccugcccuucggcuggcugaucguggggguggcccuccuggccgucuuccagagcgccuccaagaucaucacgcugaagaagcgcuggcagcucgcgcugagcaagggcgugcacuucgugugcaaccugcuccugcuguucgucaccguguacucccaccuccugcugguggccgccgggcucgaggcccccuuccuguaccuguacgcgcucgucuacuuccugcagagcaucaacuucgugcggaucaucaugcgccuguggcucugcuggaagugccgguccaagaacccccugcuguacgacgccaacuacuuccucugcuggcacaccaacugcuacgacuacugcaucccguacaacagcgugaccuccagcaucgucaucacguccggcgacggcaccaccagccccaucuccgagcacgacuaccagaucgggggcuacaccgagaagugggagagcggggugaaggacugcgugguccugcacuccuacuucacgagcgacuacuaccagcuguacuccacccaguucagcaccgacaccggcguggagcacgugacguucuucaucuacaacaagaucgucgacgagcccgaggagcacgugcagauccacaccaucgacggguccagcggcguggucaaccccgugauggagccgaucuacgacgagcccaccaccacgaccagcgugccccucugaggacuagucccuguucccagagcccacuuuuuuuucuuuuuuugaaauaaaauagccugucuuucagaucucaaaggcucuuuucagagccaccaaaaaaaaaaaaaaaaaaaaaaaaaaaaaaaaaaaaaaaaaaaaaaaaaaaaaaaaaaaaaaaaaaaaaaaaaaaaaaaaaaaaaaaaaaaaaaaaaaaaa

SEQ ID NO: 20576 - RNA, 1100 nt, Artificial Sequence
  SARS-CoV-2__MT811544.1__ORF3a protein mRNA gc
aggagagucccgcagucggcguccagcggcucugcuuguucgugugugugucguugcaggccuuauucaagcuuaccauggaccuguucaugcgcaucuucaccaucggcaccgugacgcucaagcagggggagaucaaggacgccacccccagcgacuucguccgggccaccgcgaccacgccgauccaggccucccugcccuucggcuggcugaucguggggguggcccuccuggccgucuuccacagcgccuccaagaucaucacccugaagaagcgcuggcagcucgcgcugagcaagggcgugcacuucgugugcaaccugcuccugcuguucgucaccguguacucccaccuccugcugguggccgccgggcucgaggcccccuuccuguaccuguacgcgcucgucuacuuccugcagagcaucaacuucgugcggaucaucaugcgccuguggcucugcuggaagugccgguccaagaacccccugcuguacgacgccaacuacuuccucugcuggcacaccaacugcuacgacuacugcaucccguacaacagcgugacguccagcaucgucaucaccuccggcgacggcaccaccagccccaucuccgagcacgacuaccagaucgggggcuacacggagaagugggagagcggggugaaggacugcgugguccugcacuccuacuucaccagcgacuacuaccagcuguacuccacccagcucagcaccgacacgggcguggagcacgugaccuucuucaucuacaacaagaucgucgacgagcccgaggagcacgugcagauccacaccaucgacggguccagcggcguggucaaccccgugauggagccgaucuacgacgagcccaccacgaccaccagcgugccccugugaggacuagucccuguucccagagcccacuuuuuuuucuuuuuuugaaauaaaauagccugucuuucagaucucaaaggcucuuuucagagccaccaaaaaaaaaaaaaaaaaaaaaaaaaaaaaaaaaaaaaaaaaaaaaaaaaaaaaaaaaaaaaaaaaaaaaaaaaaaaaaaaaaaaaaaaaaaaaaaaaaaaa

SEQ ID NO: 20577 - RNA, 1100 nt, Artificial Sequence
  SARS-CoV-2__MT811711.1__ORF3a protein mRNA gc
aggagagucccgcagucggcguccagcggcucugcuuguucgugugugugucguugcaggccuuauucaagcuuaccauggaccuguucaugcgcaucuucaccaucggcaccgugacgcucaagcagggggagaucaaggacgccacccccagcgacuucguccgggccaccgcgaccaucccgauccaggccucccugcccuucggcuggcugaucguggggguggcccuccuggccgucuuccacagcgccuccaagaucaucacgcugaagaagcgcuggcagcucgcgcugagcaagggcgugcacuucgugugcaaccugcuccugcuguucgucaccguguacucccaccuccugcugguggccgccgggcucgaggcccccuuccuguaccuguacgcgcucgucuacuuccugcagagcaucaacuucgugcggaucaucaugcgccuguggcucugcuggaagugccgguccaagaacccccugcuguacgacgccaacuacuuccucugcuggcacaccaacugcuacgacuacugcaucccguacaacagcgugaccuccagcaucgucaucacguccggcgacggcaccaccagccccaucuccgagcacgacuaccagaucgggggcuacaccgagaagugggagagcggggugaaggacugcgugguccugcacuccuacuucacgagcgacuacuaccagcuguacuccacccagcucagcaccgacaccggcguggagcacgugacguucuucaucuacaacaagaucgucgacgagcccgaggagcacgugcagauccacaccaucgacggguccagcggcguggucaaccccgugauggagccgaucuacgacgagcccaccaccacgaccagccugccccugugaggacuagucccuguucccagagcccacuuuuuuuucuuuuuuugaaauaaaauagccugucuuucagaucucaaaggcucuuuucagagccaccaaaaaaaaaaaaaaaaaaaaaaaaaaaaaaaaaaaaaaaaaaaaaaaaaaaaaaaaaaaaaaaaaaaaaaaaaaaaaaaaaaaaaaaaaaaaaaaaaaaaa

SEQ ID NO: 20578 - RNA, 1100 nt, Artificial Sequence
  SARS-CoV-2__MT811727.1__ORF3a protein mRNA gc
aggagagucccgcagucggcguccagcggcucugcuuguucgugugugugucguugcaggccuuauucaagcuuaccauggaccuguucaugcgcaucuucaccaucggcaccgugacgcucaagcagggggagaucaaggacgccacccccagcgacuucguccgggccaccgcgaccaucccgauccaggccucccugcccuucggcuggcugaucguggggguggcccuccuggccgucuuccacagcgccuccaagaucaucacgcugaagaagcgcuggcagcucgcgcugagcaagggcgugcacuucgugugcaaccugcuccugcuguucgucaccguguacucccaccuccugcugguggccgccgggcucgaggcccccuuccuguaccuguacgcgcucgucuacuuccugcagagcaucaacuucgugcggaucaucaugcgccuguggcucugcuggaagugccgguccaagaacccccugcuguacgacgccaacuacuuccucugcuggcacaccaacugcuacgacuacugcgugccguacaacagcgucaccuccagcaucgugaucacguccggcgacggcaccaccagccccaucuccgagcacgacuaccagaucgggggcuacaccgagaagugggagagcggggugaaggacugcgucgugcugcacuccuacuucacgagcgacuacuaccagcuguacuccacccagcucagcaccgacaccggcguggagcacgucacguucuucaucuacaacaagaucguggacgagcccgaggagcacgugcagauccacaccaucgacggguccagcggcgucgugaaccccgugauggagccgaucuacgacgagcccaccaccacgaccagcgucccccugugaggacuagucccuguucccagagcccacuuuuuuuucuuuuuuugaaauaaaauagccugucuuucagaucucaaaggcucuuuucagagccaccaaaaaaaaaaaaaaaaaaaaaaaaaaaaaaaaaaaaaaaaaaaaaaaaaaaaaaaaaaaaaaaaaaaaaaaaaaaaaaaaaaaaaaaaaaaaaaaaaaaaa

SEQ ID NO: 20579 - RNA, 1100 nt, Artificial Sequence
  SARS-CoV-2__MT806773.1__ORF3a protein mRNA gc
aggagagucccgcagucggcguccagcggcucugcuuguucgugugugugucguugcaggccuuauucaagcuuaccauggaccuguucaugcgcaucuucaccaucggcaccgugacgcucaagcagggggagaucaaggacgccacccccagcgacuucguccgggccaccgcgaccaucccgauccaggccucccugcccuucggcuggcugaucguggggguggcccuccuggccgucuuccacagcgccuccaagaucaucacgcugaagaagcgcuggcagcucgcgcugagcaagggcgugcacuucgugugcaaccugcuccugcuguucgucaccguguacucccaccuccugcugguggccgccgggcucgaggcccccuuccuguaccuguacgcgcucgucuacuuccugcagagcaucaacuucgugcggaucaucaugcgccuguggcucugccugaagugccgguccaagaacccccugcucuacgacgccaacuacuuccugugcuggcacaccaacugcuacgacuacugcaucccguacaacagcgugaccuccagcaucgucaucacguccggcgacggcaccaccagccccaucuccgagcacgacuaccagaucgggggcuacaccgagaagugggagagcggggugaaggacugcgugguccugcacuccuacuucacgagcgacuacuaccagcucuacuccacccagcugagcaccgacaccggcguggagcacgugacguucuucaucuacaacaagaucgucgacgagcccgaggagcacgugcagauccacaccaucgacggguccagcggcguggucaaccccgugauggagccgaucuacgacgagcccaccaccacgaccagcgugccccugugaggacuagucccuguucccagagcccacuuuuuuuucuuuuuuugaaauaaaauagccugucuuucagaucucaaaggcucuuuucagagccaccaaaaaaaaaaaaaaaaaaaaaaaaaaaaaaaaaaaaaaaaaaaaaaaaaaaaaaaaaaaaaaaaaaaaaaaaaaaaaaaaaaaaaaaaaaaaaaaaaaaaa

SEQ ID NO: 20580 - RNA, 1100 nt, Artificial Sequence
  SARS-CoV-2__MT806884.1__ORF3a protein mRNA gc
aggagagucccgcagucggcguccagcggcucugcuuguucgugugugugucguugcaggccuuauucaagcuuaccauggaccuguucaugaccaucuucaccaucggcacggugacccucaagcagggggagaucaaggacgccacccccagcgacuucguccgcgccaccgcgacgaucccgauccaggccucccugcccuucggcuggcugaucguggggguggcccuccuggccgucuuccacagcgccuccaagaucaucacccugaagaagcgguggcagcucgcgcugagcaagggcgugcacuucgugugcaaccugcuccugcuguucgucaccguguacucccaccuccugcugguggccgccgggcucgaggcccccuuccuguaccuguacgcgcucgucuacuuccugcagagcaucaacuucgugcgcaucaucaugcggcugugccucugcuggaagugccgcuccaagaacccccugcuguacgacgccaacuacuuccucugcuggcacaccaacugcuacgacuacugcaucccguacaacagcgugacguccagcaucgucaucaccuccggcgacggcaccaccagccccaucuccgagcacgacuaccagaucgggggcuacacggagaagugggagagcggggugaaggacugcgugguccugcacuccuacuucaccagcgacuacuaccagcuguacuccacccagcucagcaccgacacgggcguggagcacgugaccuucuucaucuacaacaagaucgucgacgagcccgaggagcacgugcagauccacaccaucgacggguccagcggcguggucaaccccgugauggagccgaucuacgacgagcccaccacgaccaccagcgugccccugugaggacuagucccuguucccagagcccacuuuuuuuucuuuuuuugaaauaaaauagccugucuuucagaucucaaaggcucuuuucagagccaccaaaaaaaaaaaaaaaaaaaaaaaaaaaaaaaaaaaaaaaaaaaaaaaaaaaaaaaaaaaaaaaaaaaaaaaaaaaaaaaaaaaaaaaaaaaaaaaaaaaaa

SEQ ID NO: 20581 - RNA, 1100 nt, Artificial Sequence
  SARS-CoV-2__MT800021.1__ORF3a protein mRNA gc
aggagagucccgcagucggcguccagcggcucugcuuguucgugugugugucguugcaggccuuauucaagcuuaccauggaccuguucaugcgcaucuucaccaucggcaccgugacgcucaagcagggggagaucaaggacgccacccccagcgacuucguccgggccaccgcgaccaucccgauccaggccucccugcccuucggcuggcugaucguggggguggcccuccuggccgucuuccagagcgccuccaagaucaucacgcugaagaagaucuggcagcucgcgcugagcaagggcgugcacuucgugugcaaccugcuccugcuguucgucaccguguacucccaccuccugcugguggccgccgggcucgaggcccccuuccuguaccuguacgcgcucgucuacuuccugcagagcaucaacuucgugcgcaucaucaugcggcuguggcucugcuggaagugccgcuccaagaacccccugcuguacgacgccaacuacuuccucugcuggcacaccaacugcuacgacuacugcaucccguacaacagcgugaccuccagcaucgucaucacguccggcgacggcaccaccagccccaucuccgagcacgacuaccagaucgggggcuacaccgagaagugggagagcggggugaaggacugcgugguccugcacuccuacuucacgagcgacuacuaccagcuguacuccacccagcucagcaccgacaccggcguggagcacgugacguucuucaucuacaacaagaucgucgacgagcccgaggagcacgugcagauccacaccaucgacggguccagcggcguggucaaccccgugauggagccgaucuacgacgagcccaccaccacgaccagcgugccccugugaggacuagucccuguucccagagcccacuuuuuuuucuuuuuuugaaauaaaauagccugucuuucagaucucaaaggcucuuuucagagccaccaaaaaaaaaaaaaaaaaaaaaaaaaaaaaaaaaaaaaaaaaaaaaaaaaaaaaaaaaaaaaaaaaaaaaaaaaaaaaaaaaaaaaaaaaaaaaaaaaaaaa

SEQ ID NO: 20582 - RNA, 1091 nt, Artificial Sequence
  SARS-CoV-2__MT800029.1__ORF3a protein mRNA gc
aggagagucccgcagucggcguccagcggcucugcuuguucgugugugugucguugcaggccuuauucaagcuuaccauggaccuguucaugcgcaucuucaccaucggcaccgugacgcucaagcagaaggacgccacccccagcgacuucguccgggccaccgcgaccaucccgauccaggccucccugcccuucggguggcugaucgugggcguggcccuccuggccgucuuccagagcgccuccaagaucaucacgcugaagaagcgcuggcagcucgcgcugagcaagggggugcacuucgugugcaaccugcuccugcuguucgucaccguguacucccaccuccugcugguggccgccggccucgaggcccccuuccuguaccuguacgcgcucgucuacuuccugcagagcaucaacuucgugcggaucaucaugcgccuguggcucugcuggaagugccgguccaagaacccccugcuguacgacgccaacuacuuccucugcuggcacaccaacugcuacgacuacugcaucccguacaacagcgugaccuccagcaucgucaucacguccggggacggcaccaccagccccaucuccgagcacgacuaccagaucggcggguacaccgagaagugggagagcggcgugaaggacugcgugguccugcacuccuacuucacgagcgacuacuaccagcuguacuccacccagcucagcaccgacaccgggguggagcacgugacguucuucaucuacaacaagaucgucgacgagcccgaggagcacgugcagauccacaccaucgacggcuccagcgggguggucaaccccgugauggagccgaucuacgacgagcccaccaccacgaccagcgugccccugugaggacuagucccuguucccagagcccacuuuuuuuucuuuuuuugaaauaaaauagccugucuuucagaucucaaaggcucuuuucagagccaccaaaaaaaaaaaaaaaaaaaaaaaaaaaaaaaaaaaaaaaaaaaaaaaaaaaaaaaaaaaaaaaaaaaaaaaaaaaaaaaaaaaaaaaaaaaaaaaaaaaaa

SEQ ID NO: 20583 - RNA, 1097 nt, Artificial Sequence
  SARS-CoV-2__MT800036.1__ORF3a protein mRNA gc
aggagagucccgcagucggcguccagcggcucugcuuguucgugugugugucguugcaggccuuauucaagcuuaccauggaccuguucaugcgcaucuucaccaucggcaccgugacgcucaagcagggggagaucaaggacgccacccccagcgacuucguccgggccaccgcgaccaucccgauccaggccucccugcccuucggcuggcugaucguggggguggcccuccuggccgucuuccacagcgccuccaagaucaucacgcugaagaagcgcuggcagcucgcgcugagcaagggcgugcacuucgugugcaaccugcuccugcuguucgucaccguguacucccaccuccugcugguggccgccgggcucgaggcccccuuccuguaccuguacgcgcucgucuacuuccugcagagcaucaacuucgugcggaucaucaugcgccuguggcucugcuggaagugccgguccaagaacccccugcuguacgacgccaacuacuuccucugcuggcacaccaacugcuacgacuacugcaucccguacaacagcgugaccuccagcaucgucaucacguccggcgacggcaccaccagccccaucuccgagcacgacuaccagaucgggggcuacaccgagaagugggagagcggggugaaggacugcgugguccugcacuccuacuucacgagcgacuacuaccagcuguacuccacccagcucagcaccgacaccggcguggagcacgugacguucuucaucuacaacaagaucgucgacgagcccgaggagcacgugcagauccacaccaucgacggguccagcggcguggaccccgucauggagccgaucuacgacgagcccaccaccacgaccagcgugccccugugaggacuagucccuguucccagagcccacuuuuuuuucuuuuuuugaaauaaaauagccugucuuucagaucucaaaggcucuuuucagagccaccaaaaaaaaaaaaaaaaaaaaaaaaaaaaaaaaaaaaaaaaaaaaaaaaaaaaaaaaaaaaaaaaaaaaaaaaaaaaaaaaaaaaaaaaaaaaaaaaaaaaa

SEQ ID NO: 20584 - RNA, 1100 nt, Artificial Sequence
  SARS-CoV-2__MT800050.1__ORF3a protein mRNA gc
aggagagucccgcagucggcguccagcggcucugcuuguucgugugugugucguugcaggccuuauucaagcuuaccauggaccuguucaugcgcaucuucaccaucggcaccgugacgcucaagcagggggagauccaggacgccacccccagcgacuucguccgggccaccgcgaccaucccgauccaggccucccugcccuucggcuggcugaucguggggguggcccuccuggccgucuuccagagcgccuccaagaucaucacgcugaagaagcgcuggcagcucgcgcugagcaagggcgugcacuucgugugcaaccugcuccugcuguucgucaccguguacucccaccuccugcugguggccgccgggcucgaggcccccuuccuguaccuguacgcgcucgucuacuuccugcagagcaucaacuucgugcggaucaucaugcgccuguggcucugcuggaagugccgguccaagaacccccugcuguacgacgccaacuacuuccucugcuggcacaccaacugcuacgacuacugcaucccguacaacagcgugaccuccagcaucgucaucacguccggcgacggcaccaccagccccaucuccgagcacgacuaccagaucgggggcuacaccgagaagugggagagcggggugaaggacugcgugguccugcacuccuacuucacgagcgacuacuaccagcuguacuccacccagcucagcaccgacaccggcguggagcacgugacguucuucaucuacaacaagaucgucgacgagcccgaggagcacgugcagauccacaccaucgacggguccagcggcguggucaaccccgugauggagccgaucuacgacgagcccaccaccacgaccagcgugccccugugaggacuagucccuguucccagagcccacuuuuuuuucuuuuuuugaaauaaaauagccugucuuucagaucucaaaggcucuuuucagagccaccaaaaaaaaaaaaaaaaaaaaaaaaaaaaaaaaaaaaaaaaaaaaaaaaaaaaaaaaaaaaaaaaaaaaaaaaaaaaaaaaaaaaaaaaaaaaaaaaaaaaa

SEQ ID NO: 20585 - RNA, 1100 nt, Artificial Sequence
  SARS-CoV-2__MT801003.1__ORF3a protein mRNA gc
aggagagucccgcagucggcguccagcggcucugcuuguucgugugugugucguugcaggccuuauucaagcuuaccauggaccuguucaugcgcaucuucaccaucggcaccgugacgcucaagcagggggagaucaaggacgccacccccagcgacuucguccgggccaccgcgaccaucccgauccaggccucccugcccuucggcuggcugaucguggggguggcccuccuggccgucuuccacagcgccuccaagaucaucacgcugaagaagcgcuggcagcucgcguucagcaagggcgugcacuucgugugcaaccugcugcuccuguucgucaccguguacucccaccuccugcugguggccgccgggcuggaggcccccuuccucuaccuguacgcgcuggucuacuuccuccagagcaucaacuucgugcggaucaucaugcgccuguggcugugcuggaagugccgguccaagaacccccuccuguacgacgccaacuacuuccugugcuggcacaccaacugcuacgacuacugcaucccguacaacagcgugaccuccagcaucgucaucacguccggcgacggcaccaccagccccaucuccgagcacgacuaccagaucgggggcuacaccgagaagugggagagcggggugaaggacugcgugguccuccacuccuacuucacgagcgacuacuaccagcuguacuccacccagcugagcaccgacaccggcguggagcacgugacguucuucaucuacaacaagaucgucgacgagcccgaggagcacgugcagauccacaccaucgacggguccagcggcguggucaaccccgugauggagccgaucuacgacgagcccaccaccacgaccagcgugccccucugaggacuagucccuguucccagagcccacuuuuuuuucuuuuuuugaaauaaaauagccugucuuucagaucucaaaggcucuuuucagagccaccaaaaaaaaaaaaaaaaaaaaaaaaaaaaaaaaaaaaaaaaaaaaaaaaaaaaaaaaaaaaaaaaaaaaaaaaaaaaaaaaaaaaaaaaaaaaaaaaaaaaa

SEQ ID NO: 20586 - RNA, 1100 nt, Artificial Sequence
  SARS-CoV-2__MT252720.1__ORF3a protein mRNA gc
aggagagucccgcagucggcguccagcggcucugcuuguucgugugugugucguugcaggccuuauucaagcuuaccauggaccuguucaugcgcaucuucaccaucggcaccgugacgcucaagcagggggagaucaaggacgccacccccagcgacuucguccgggccaccgcgaccaucccgauccaggccucccugcccuucggcuggcugaucguggggguggcccuccuggccgucuuccagagcgccuccaagaucaucacgcugaagaagcgcuggcagcucgcgcugagcaagggcgugcacuucgugugcaaccugcuccugcuguucgucaccguguacucccaccuccugcugguggccgccgggcucgaggcccccuuccuguaccuguacgcgcucgucuacuuccugcagagcaucaacuucgugcggaucaucaugcgccuguggcucugcuggaagugccgguccaagaacccccugcuguacgacgccaacuacuuccucugcuggcacaccaacugcuacgacuacugcaucccguacaacagcgugaccuccagcaucgucaucacguccggcgacggcaccaccagccccaucuccgagcacgacuaccagaucgggggcuacaccgagaagugggagagcggggugaaggacugcgugguccugcacuccuacuucacgagcgacuacuaccagcuguacuccacccagcucagcaccgacaccggcguggagcacgugacguucuucaucuacaacaagaucgucgacgagcccgaggagcacgugcagauccacaccaucgacugcuccagcgggguggucaaccccgugauggagccgaucuacgacgagcccaccaccacgaccagcgugccccugugaggacuagucccuguucccagagcccacuuuuuuuucuuuuuuugaaauaaaauagccugucuuucagaucucaaaggcucuuuucagagccaccaaaaaaaaaaaaaaaaaaaaaaaaaaaaaaaaaaaaaaaaaaaaaaaaaaaaaaaaaaaaaaaaaaaaaaaaaaaaaaaaaaaaaaaaaaaaaaaaaaaaa

SEQ ID NO: 20587 - RNA, 1100 nt, Artificial Sequence
  SARS-CoV-2__MT252817.1__ORF3a protein mRNA gc
aggagagucccgcagucggcguccagcggcucugcuuguucgugugugugucguugcaggccuuauucaagcuuaccauggaccuguucaugcgcaucuucaccaucggcaccgugacgcucaagcagggggagaucaaggacgccacccccagcgacuucguccgggccaccgcgaccaucccgauccaggccucccugcccuucggcuggcugaucguggggguggcccuccuggccgucuuccagagcgccuccaagaucaucacgcugaagaagcgcuggcagcucgcgcugagcaagggcgugcacuucgugugcaaccugcuccugcuguucgucaccguguacucccaccuccugcugguggccgccgggcucgaggcccccuuccuguaccuguacgcgcucgucuacuuccugcagagcaucaacuucgugcggaucaucaugcgccuguggcucugcuggaagugccgguccaagaacccccugcuguacgacgccaacuacuuccucugcuggcacaccaacugcuacgacuacugcaucccguacaacagcgugaccuccagcaucgucaucacguccggcgacggcaccaccagccccaucuccgagcacgacuaccagaucgggggcuacaccgagaagugggagagcggggugaaggacugcgugguccugcacuccuacuucacgagcgacuacuaccagcuguacuccacccagcucagcaccgacaccggcguggagcacgugacguucuucaucuacaacaagaucgucgacgagcccgaggagcacgugcagauccacaccaucgacggguccagccgcguggucaaccccgugauggagccgaucuacgacgagcccaccaccacgaccagcgugccccugugaggacuagucccuguucccagagcccacuuuuuuuucuuuuuuugaaauaaaauagccugucuuucagaucucaaaggcucuuuucagagccaccaaaaaaaaaaaaaaaaaaaaaaaaaaaaaaaaaaaaaaaaaaaaaaaaaaaaaaaaaaaaaaaaaaaaaaaaaaaaaaaaaaaaaaaaaaaaaaaaaaaaa

SEQ ID NO: 20588 - RNA, 1100 nt, Artificial Sequence
  SARS-CoV-2__MT795875.1__ORF3a protein mRNA gc
aggagagucccgcagucggcguccagcggcucugcuuguucgugugugugucguugcaggccuuauucaagcuuaccauggaccuguucaugcgcaucuucaccaucggcaccgugacgcucaagcagggggagaucaaggacgccacccccagcgacuucguccgggccaccgcgaccaucccgauccaggccucccugcccuucggcuggcugaucguggggguggcccuccuggccgucuuccagagcgccuccaagaucaucacgcugaagaagcgcuggcagcucgcgcugagcaagggcgugcacuucgugugcaaccugcuccugcuguucgucaccguguacucccaccuccugcugguggccgccgggcucgaggcccccuuccuguaccuguacgcgcucgucuacuuccugcagagcaucaacuucgugcggaucaucaugcgccuguggcucugcuggaagugccgguccaagaacccccugcuguacgacgccaacuacuuccucugcuggcacaccaacugcuacgacuacugcaucccguacaacagcgugaccuccagcaucgucaucacguccugcgacggcaccaccagccccaucuccgagcacgacuaccagaucggcggguacaccgagaagugggagagcggcgugaaggacugcgugguccugcacuccuacuucacgagcgacuacuaccagcuguacuccacccagcucagcaccgacaccgggguggagcacgugacguucuucaucuacaacaagaucgucgacgagcccgaggagcacgugcagauccacaccaucgacggcuccagcgggguggucaaccccgugauggagccgaucuacgacgagcccaccaccacgaccagcgugccccugugaggacuagucccuguucccagagcccacuuuuuuuucuuuuuuugaaauaaaauagccugucuuucagaucucaaaggcucuuuucagagccaccaaaaaaaaaaaaaaaaaaaaaaaaaaaaaaaaaaaaaaaaaaaaaaaaaaaaaaaaaaaaaaaaaaaaaaaaaaaaaaaaaaaaaaaaaaaaaaaaaaaaa

SEQ ID NO: 20589 - RNA, 1100 nt, Artificial Sequence
  SARS-CoV-2__MT795884.1__ORF3a protein mRNA gc
aggagagucccgcagucggcguccagcggcucugcuuguucgugugugugucguugcaggccuuauucaagcuuaccauggaccuguucaugcgcaucuucaccaucggcaccgugacgcucaagcagggggagaucaaggacgccacccccagcgacuucguccgggccaccgcgaccaucccgauccaggccucccugcccuucggcuggcugaucguggggguggcccuccacgccgucuuccacagcgccuccaagaucaucacgcugaagaagcgcuggcagcuggcgcucagcaagggcgugcacuucgugugcaaccugcugcuccuguucgucaccguguacucccaccuccugcugguggccgccgggcuggaggcccccuuccucuaccuguacgcgcuggucuacuuccuccagagcaucaacuucgugcggaucaucaugcgccuguggcugugcuggaagugccgguccaagaacccccuccuguacgacgccaacuacuuccugugcuggcacaccaacugcuacgacuacugcaucccguacaacagcgugaccuccagcaucgucaucacguccggcgacggcaccaccagccccaucuccgagcacgacuaccagaucgggggcuacaccgagaagugggagagcggggugaaggacugcgugguccuccacuccuacuucacgagcgacuacuaccagcuguacuccacccagcugagcaccgacaccggcguggagcacgugacguucuucaucuacaacaagaucgucgacgagcccgaggagcacgugcagauccacaccaucgacggguccagcggcguggucaaccccgugauggagccgaucuacgacgagcccaccaccacgaccagcgugccccucugaggacuagucccuguucccagagcccacuuuuuuuucuuuuuuugaaauaaaauagccugucuuucagaucucaaaggcucuuuucagagccaccaaaaaaaaaaaaaaaaaaaaaaaaaaaaaaaaaaaaaaaaaaaaaaaaaaaaaaaaaaaaaaaaaaaaaaaaaaaaaaaaaaaaaaaaaaaaaaaaaaaaa

SEQ ID NO: 20590 - RNA, 1100 nt, Artificial Sequence
  SARS-CoV-2__MT797760.1__ORF3a protein mRNA gc
aggagagucccgcagucggcguccagcggcucugcuuguucgugugugugucguugcaggccuuauucaagcuuaccauggaccuguucaugcgcaucuucaccaucggcaccgugacgcucaagcagggggagaucaaggacgccacccccagcgacuucguccgggccaccgcgaccaucccgauccaggccucccugcccuucggcugguucaucguggggguggcccugcucgccgucuuccacagcgccuccaagaucaucacgcugaagaagcgcuggcagcuggcgcucagcaagggcgugcacuucgugugcaaccugcugcuccuguucgucaccguguacucccaccuccugcugguggccgccgggcuggaggcccccuuccucuaccuguacgcgcuggucuacuuccuccagagcaucaacuucgugcggaucaucaugcgccuguggcugugcuggaagugccgguccaagaacccccuccuguacgacgccaacuacuuccugugcuggcacaccaacugcuacgacuacugcaucccguacaacagcgugaccuccagcaucgucaucacguccggcgacggcaccaccagccccaucuccgagcacgacuaccagaucgggggcuacaccgagaagugggagagcggggugaaggacugcgugguccuccacuccuacuucacgagcgacuacuaccagcuguacuccacccagcugagcaccgacaccggcguggagcacgugacguucuucaucuacaacaagaucgucgacgagcccgaggagcacgugcagauccacaccaucgacggguccagcggcguggucaaccccgugauggagccgaucuacgacgagcccaccaccacgaccagcgugccccucugaggacuagucccuguucccagagcccacuuuuuuuucuuuuuuugaaauaaaauagccugucuuucagaucucaaaggcucuuuucagagccaccaaaaaaaaaaaaaaaaaaaaaaaaaaaaaaaaaaaaaaaaaaaaaaaaaaaaaaaaaaaaaaaaaaaaaaaaaaaaaaaaaaaaaaaaaaaaaaaaaaaaa

SEQ ID NO: 20591 - RNA, 1100 nt, Artificial Sequence
  SARS-CoV-2__MT791915.1__ORF3a protein mRNA gc
aggagagucccgcagucggcguccagcggcucugcuuguucgugugugugucguugcaggccuuauucaagcuuaccauggaccuguucaugcgcaucuucaccaucggcaccgugacgcucaagcagggggagaucaaggacagcacccccuccgacuucguccgggccaccgccaccaucccgauccaggcgagccugcccuucggcuggcugaucguggggguggcccuccuggccgucuuccaguccgccagcaagaucaucacgcugaagaagcgcuggcagcucgcccuguccaagggcgugcacuucgugugcaaccugcuccugcuguucgucaccguguacagccaccuccugcugguggcggccgggcucgaggcccccuuccuguaccuguacgcccucgucuacuuccugcaguccaucaacuucgugcggaucaucaugcgccuguggcucugcuggaagugccggagcaagaacccccugcuguacgacgcgaacuacuuccucugcuggcacaccaacugcuacgacuacugcaucccguacaacuccgugaccagcuccaucgucaucacgagcggcgacggcaccaccucccccaucagcgagcacgacuaccagaucgggggcuacaccgagaagugggaguccggggugaaggacugcgugguccugcacagcuacuucacguccgacuacuaccagcuguacagcacccagcucuccaccgacaccggcguggagcacgugacguucuucaucuacaacaagaucgucgacgagcccgaggagcacgugcagauccacaccaucgacgugagcagcggggucgugaaccccgugauggagccgaucuacgacgagcccaccaccacgaccuccgucccccugugaggacuagucccuguucccagagcccacuuuuuuuucuuuuuuugaaauaaaauagccugucuuucagaucucaaaggcucuuuucagagccaccaaaaaaaaaaaaaaaaaaaaaaaaaaaaaaaaaaaaaaaaaaaaaaaaaaaaaaaaaaaaaaaaaaaaaaaaaaaaaaaaaaaaaaaaaaaaaaaaaaaaa

SEQ ID NO: 20592 - RNA, 1100 nt, Artificial Sequence
  SARS-CoV-2__MT791954.1__ORF3a protein mRNA gc
aggagagucccgcagucggcguccagcggcucugcuuguucgugugugugucguugcaggccuuauucaagcuuaccauggaccuguucaugcgcaucuucaccaucggcaccgugacgcucaagcagggggagaucaaggacgccacccccagcgacuucguccgggccaccgcgaccaucccgauccaggccucccugcccuucggcuggcugaucguggggguggcccuccuggccgucuucuacagcgccuccaagaucaucacgcugaagaagcgcuggcagcucgcgcugagcaagggcgugcacuucgugugcaaccugcuccugcuguucgucaccguguacucccaccuccugcugguggccgccgggcucgaggcccccuuccuguaccuguacgcgcucgucuacuuccugcagagcaucaacuucgugcggaucaucaugcgccuguggcucugcuggaagugccgguccaagaacccccugcuguacgacgccaacuacuuccucugcuggcacaccaacugcuacgacuacugcaucccguacaacagcgugaccuccagcaucgucaucacguccggcgacggcaccaccagccccaucuccgagcacgacuaccagaucgggggcuacaccgagaagugggagagcggggugaaggacugcgugguccugcacuccuacuucacgagcgacuacuaccagcuguacuccacccagcucagcaccgacaccggcguggagcacgugacguucuucaucuacaacaagaucgucgacgagcccgaggagcacgugcagauccacaccaucgacggguccagcggcguggucaaccccgugauggagccgaucuacgacgagcccaccaccacgaccagcgugccccugugaggacuagucccuguucccagagcccacuuuuuuuucuuuuuuugaaauaaaauagccugucuuucagaucucaaaggcucuuuucagagccaccaaaaaaaaaaaaaaaaaaaaaaaaaaaaaaaaaaaaaaaaaaaaaaaaaaaaaaaaaaaaaaaaaaaaaaaaaaaaaaaaaaaaaaaaaaaaaaaaaaaaa

SEQ ID NO: 20593 - RNA, 1100 nt, Artificial Sequence
  SARS-CoV-2__MT786802.1__ORF3a protein mRNA gc
aggagagucccgcagucggcguccagcggcucugcuuguucgugugugugucguugcaggccuuauucaagcuuaccauggaccuguucaugcgcaucuucaccaucggcaccgugacgcucaagcagggggagaucaaggacgccacccccagcgacuucguccgggccaccgcgaccaucccgauccaggccucccugcccuucggcuggcugaucguggggguggcccuccuggccgucuuccacagcgccuccaagaucaucacgcugaagaagcgcuggcagcucgcgcugagcaagggcgugcacuucgugugcaaccugcuccugcuguucgucaccguguacucccaccuccugcugguggccgccgggcucgaggcccccuuccuguaccuguacgcgcucgucuacuuccugcagagcaucaacuucgugcggaucaucaugcgccuguggcucugcuggaagugccgguccaagaacccccugcuguacgacgccaacuacuuccucugcuggcacaccaacugcuacuacuacugcaucccguacaacagcgugaccuccagcaucgucaucacguccggcgacggcaccaccagccccaucuccgagcacgacuaccagaucgggggcuacaccgagaagugggagagcggggugaaggacugcgugguccugcacuccuacuucacgagcgacuacuaccagcuguacuccacccagcucagcaccgacaccggcguggagcacgugacguucuucaucuacaacaagaucgucgacgagcccgaggagcacgugcagauccacaccaucgacggguccagcggcguggucaaccccgugauggagccgaucuacgacgagcccaccaccacgaccagcgugccccugugaggacuagucccuguucccagagcccacuuuuuuuucuuuuuuugaaauaaaauagccugucuuucagaucucaaaggcucuuuucagagccaccaaaaaaaaaaaaaaaaaaaaaaaaaaaaaaaaaaaaaaaaaaaaaaaaaaaaaaaaaaaaaaaaaaaaaaaaaaaaaaaaaaaaaaaaaaaaaaaaaaaaa

SEQ ID NO: 20594 - RNA, 1100 nt, Artificial Sequence
  SARS-CoV-2__MT786838.1__ORF3a protein mRNA gc
aggagagucccgcagucggcguccagcggcucugcuuguucgugugugugucguugcaggccuuauucaagcuuaccauggaccuguucaugcgcaccuucaccaucggcacggugacccucaagcagggggagaucaaggacgccacccccagcgacuucguccgggccaccgcgacgaucccgauccaggccucccugcccuucggcuggcugaucguggggguggcccuccuggccgucuuccacagcgccuccaagaucaucacccugaagaagcgcuggcagcucgcgcugagcaagggcgugcacuucgugugcaaccugcuccugcuguucgucaccguguacucccaccuccugcugguggccgccgggcucgaggcccccuuccuguaccuguacgcgcucgucuacuuccugcagagcaucaacuucgugcggaucaucaugcgccuguggcucugcuggaagugccgguccaagaacccccugcuguacgacgccaacuacuuccucugcuggcacaccaacugcuacgacuacugcaucccguacaacagcgugacguccagcaucgucaucaccuccggcgacggcaccaccagccccaucuccgagcacgacuaccagaucgggggcuacacggagaagugggagagcggggugaaggacugcgugguccugcacuccuacuucaccagcgacuacuaccagcuguacuccacccagcucagcaccgacacgggcguggagcacgugaccuucuucaucuacaacaagaucgucgacgagcccgaggagcacgugcagauccacaccaucgacggguccagcggcguggucaaccccgugauggagccgaucuacgacgagcccaccacgaccaccagcgugccccugugaggacuagucccuguucccagagcccacuuuuuuuucuuuuuuugaaauaaaauagccugucuuucagaucucaaaggcucuuuucagagccaccaaaaaaaaaaaaaaaaaaaaaaaaaaaaaaaaaaaaaaaaaaaaaaaaaaaaaaaaaaaaaaaaaaaaaaaaaaaaaaaaaaaaaaaaaaaaaaaaaaaaa

SEQ ID NO: 20595 - RNA, 1100 nt, Artificial Sequence
  SARS-CoV-2__MT786846.1__ORF3a protein mRNA gc
aggagagucccgcagucggcguccagcggcucugcuuguucgugugugugucguugcaggccuuauucaagcuuaccauggaccuguucaugcgcaucuucaccaucggcaccgugacgcucaagcagggggagaucaaggacgccacccccagcgacuucguccgggccaccgcgaccaucccgauccaggccucccugcccuucggcuggcugaucguggggguggcccuccuggccgucuuccagagcgccuccaagaucaucacgcugaagaagcgcuggcagcucgcgcugagcaagggcgugcacuucgugugcaaccugcuccugcuguucgucaccguguacucccaccuccugcugguggccgccgggcucgaggcccccuuccuguaccuguacgcgcucgucuacuuccugcagagcaucaacuucgugcggaucaucaugcgccuguggcucugcuggaagugccgguccaagaacccccugcuguacgacgccuacuacuuccucugcuggcacaccaacugcuacgacuacugcaucccguacaacagcgugaccuccagcaucgucaucacguccggcgacggcaccaccagccccaucuccgagcacgacuaccagaucgggggcuacaccgagaagugggagagcggggugaaggacugcgugguccugcacuccuacuucacgagcgacuacuaccagcuguacuccacccagcucagcaccgacaccggcguggagcacgugacguucuucaucuacaacaagaucgucgacgagcccgaggagcacgugcagauccacaccaucgacggguccagcggcguggucaaccccgugauggagccgaucuacgacgagcccaccaccacgaccagcgugccccugugaggacuagucccuguucccagagcccacuuuuuuuucuuuuuuugaaauaaaauagccugucuuucagaucucaaaggcucuuuucagagccaccaaaaaaaaaaaaaaaaaaaaaaaaaaaaaaaaaaaaaaaaaaaaaaaaaaaaaaaaaaaaaaaaaaaaaaaaaaaaaaaaaaaaaaaaaaaaaaaaaaaaa

SEQ ID NO: 20596 - RNA, 1100 nt, Artificial Sequence
  SARS-CoV-2__MT789712.1__ORF3a protein mRNA gc
aggagagucccgcagucggcguccagcggcucugcuuguucgugugugugucguugcaggccuuauucaagcuuaccauggaccuguucaugcgcaucuucaccaucggcaccgugacgcucaagcagggggagaucaaggacgccacccccagcgacuucguccgggccaccgcgaccaucccgauccaggccucccugcccuucggcuggcugaucguggggguggcccuccuggccgucuuccagagcgccuccaagaucaucacgcugaagaagcgcuggcagcucgcgcugagcaagggcgugcacuucgugugcaaccugcuccugcuguucgucaccguguacucccaccuccuguucguggccgccgggcuggaggcccccuuccucuaccuguacgcgcuggucuacuuccuccagagcaucaacuucgugcggaucaucaugcgccuguggcugugcuggaagugccgguccaagaacccccuccuguacgacgccaacuacuuccugugcuggcacaccaacugcuacgacuacugcaucccguacaacagcgugaccuccagcaucgucaucacguccggcgacggcaccaccagccccaucuccgagcacgacuaccagaucgggggcuacaccgagaagugggagagcggggugaaggacugcgugguccuccacuccuacuucacgagcgacuacuaccagcuguacuccacccagcugagcaccgacaccggcguggagcacgugacguucuucaucuacaacaagaucgucgacgagcccgaggagcacgugcagauccacaccaucgacggguccagcggcguggucaaccccgugauggagccgaucuacgacgagcccaccaccacgaccagcgugccccucugaggacuagucccuguucccagagcccacuuuuuuuucuuuuuuugaaauaaaauagccugucuuucagaucucaaaggcucuuuucagagccaccaaaaaaaaaaaaaaaaaaaaaaaaaaaaaaaaaaaaaaaaaaaaaaaaaaaaaaaaaaaaaaaaaaaaaaaaaaaaaaaaaaaaaaaaaaaaaaaaaaaaa

SEQ ID NO: 20597 - RNA, 1100 nt, Artificial Sequence
  SARS-CoV-2__MT782364.1__ORF3a protein mRNA gc
aggagagucccgcagucggcguccagcggcucugcuuguucgugugugugucguugcaggccuuauucaagcuuaccauggaccuguucaugcgcaucuucaccaucggcaccgugacgcucaagcagugcgagaucaaggacgccacccccagcgacuucguccgggccaccgcgaccaucccgauccaggccucccugcccuucggguggcugaucgugggcguggcccuccuggccgucuuccacagcgccuccaagaucaucacgcugaagaagcgcuggcagcucgcgcugagcaagggggugcacuucgugugcaaccugcuccugcuguucgucaccguguacucccaccuccugcugguggccgccggccucgaggcccccuuccuguaccuguacgcgcucgucuacuuccugcagagcaucaacuucgugcggaucaucaugcgccuguggcucugcuggaagugccgguccaagaacccccugcuguacgacgccaacuacuuccucugcuggcacaccaacugcuacgacuacugcaucccguacaacagcgugaccuccagcaucgucaucacguccggggacggcaccaccagccccaucuccgagcacgacuaccagaucggcggguacaccgagaagugggagagcggcgugaaggacugcgugguccugcacuccuacuucacgagcgacuacuaccagcuguacuccacccagcucagcaccgacaccgggguggagcacgugacguucuucaucuacaacaagaucgucgacgagcccgaggagcacgugcagauccacaccaucgacggcuccagcgggguggucaaccccgugauggagccgaucuacgacgagcccaccaccacgaccagcgugccccugugaggacuagucccuguucccagagcccacuuuuuuuucuuuuuuugaaauaaaauagccugucuuucagaucucaaaggcucuuuucagagccaccaaaaaaaaaaaaaaaaaaaaaaaaaaaaaaaaaaaaaaaaaaaaaaaaaaaaaaaaaaaaaaaaaaaaaaaaaaaaaaaaaaaaaaaaaaaaaaaaaaaaa

SEQ ID NO: 20598 - RNA, 1100 nt, Artificial Sequence
  SARS-CoV-2__MT776411.1__ORF3a protein mRNA gc
aggagagucccgcagucggcguccagcggcucugcuuguucgugugugugucguugcaggccuuauucaagcuuaccauggaccuguucaugcgcaucuucaccaucggcaccgugacgcucaagcagggggagaucaaggacgccacccccagcgacuucguccgggccaccgcgaccaucccgauccaggccucccugcccuucggcuggcugaucguggggguggcccuccuggccgucuuccagagcgccuccaagaucaucacgcugaagaagcgcuggcagcucgcgcugagcaagggcgugcacuucgugugcaaccugcuccugcuguucgucaccguguacucccaccuccugcugguggccgccgggcucgaggcccccuuccuguaccuguacgcgcucgucuacuuccugcagagcaucaacuucgugcggaucaucaugcgccuguggcucugcuggaagugccgguccaagaacccccugcuguacgacgccaacuacuuccucugcuggcacaccaacugcuacgacuacugcaucccguacaacagcgugaccuccagcaucgucaucacguccggcgacggcaccaccagccccaucuccgagcacgacuaccagaucgggggcuacaccgagaagugggagagcggggugaaggacugcgugguccugcacuccuacuucacgagcgacuacuaccagcuguacuccacccagagcuccaccgacaccggcguggagcacgugacguucuucaucuacaacaagaucgucgacgagcccgaggagcacgugcagauccacaccaucgacgggagcagcggcguggucaaccccgugauggagccgaucuacgacgagcccaccaccacgaccuccgugccccucugaggacuagucccuguucccagagcccacuuuuuuuucuuuuuuugaaauaaaauagccugucuuucagaucucaaaggcucuuuucagagccaccaaaaaaaaaaaaaaaaaaaaaaaaaaaaaaaaaaaaaaaaaaaaaaaaaaaaaaaaaaaaaaaaaaaaaaaaaaaaaaaaaaaaaaaaaaaaaaaaaaaaa

SEQ ID NO: 20599 - RNA, 1100 nt, Artificial Sequence
  SARS-CoV-2__MT776420.1__ORF3a protein mRNA gc
aggagagucccgcagucggcguccagcggcucugcuuguucgugugugugucguugcaggccuuauucaagcuuaccauggaccuguucaugcgcaucuucaccaucggcaccgugacgcucaagcagggggagaucaaggacgccacccccagcgacuucguccgggccaccgagaccaucccgauccaggcgucccugcccuucggcuggcugaucguggggguggcccuccuggccgucuuccacagcgccuccaagaucaucacgcugaagaagcgcuggcagcucgcccugagcaagggcgugcacuucgugugcaaccugcuccugcuguucgucaccguguacucccaccuccugcugguggcggccgggcucgaggcccccuuccuguaccuguacgcccucgucuacuuccugcagagcaucaacuucgugcggaucaucaugcgccuguggcucugcuggaagugccgguccaagaacccccugcuguacgacgcgaacuacuuccucugcuggcacaccaacugcuacgacuacugcaucccguacaacagcgugaccuccagcaucgucaucacguccggcgacggcaccaccagccccaucuccgagcacgacuaccagaucgggggcuacaccgagaagugggagagcggggugaaggacugcgugguccugcacuccuacuucacgagcgacuacuaccagcuguacuccacccagcucagcaccgacaccggcguggagcacgugacguucuucaucuacaacaagaucgucgacgagcccgaggagcacgugcagauccacaccaucgacggguccagcggcguggucaaccccgugauggagccgaucuacgacgagcccaccaccacgaccagcgugccccugugaggacuagucccuguucccagagcccacuuuuuuuucuuuuuuugaaauaaaauagccugucuuucagaucucaaaggcucuuuucagagccaccaaaaaaaaaaaaaaaaaaaaaaaaaaaaaaaaaaaaaaaaaaaaaaaaaaaaaaaaaaaaaaaaaaaaaaaaaaaaaaaaaaaaaaaaaaaaaaaaaaaaa

SEQ ID NO: 20600 - RNA, 1100 nt, Artificial Sequence
  SARS-CoV-2__MT772428.1__ORF3a protein mRNA gc
aggagagucccgcagucggcguccagcggcucugcuuguucgugugugugucguugcaggccuuauucaagcuuaccauggaccuguucaugcgcaucuucaccaucggcaccgugacgcucaagcagggggagaucaaggacgccacccccagcgacuucguccgggccaccgcgaccaucccgauccaggccucccugcccuucggcuggcugaucguggggguggcccuccuggccgucuuccacagcgccuccaagaucaucacgcugaagaagcgcuggcagcucgcgcugagcaagggcgugcacuucgugugcaaccugcuccugcuguuccucaccgucuacucccaccuccugcugguggccgccgggcuggaggcccccuuccuguaccucuacgcgcugguguacuuccugcagagcaucaacuucguccggaucaucaugcgccucuggcugugcuggaagugccgguccaagaacccccugcucuacgacgccaacuacuuccugugcuggcacaccaacugcuacgacuacugcaucccguacaacagcgugaccuccagcaucgugaucacguccggcgacggcaccaccagccccaucuccgagcacgacuaccagaucgggggcuacaccgagaagugggagagcggggucaaggacugcguggugcugcacuccuacuucacgagcgacuacuaccagcucuacuccacccagcugagcaccgacaccggcgucgagcacgugacguucuucaucuacaacaagaucguggacgagcccgaggagcacguccagauccacaccaucgacggguccagcggcguggugaaccccgucauggagccgaucuacgacgagcccaccaccacgaccagcgugccccugugaggacuagucccuguucccagagcccacuuuuuuuucuuuuuuugaaauaaaauagccugucuuucagaucucaaaggcucuuuucagagccaccaaaaaaaaaaaaaaaaaaaaaaaaaaaaaaaaaaaaaaaaaaaaaaaaaaaaaaaaaaaaaaaaaaaaaaaaaaaaaaaaaaaaaaaaaaaaaaaaaaaaa

SEQ ID NO: 20601 - RNA, 1100 nt, Artificial Sequence
  SARS-CoV-2__MT772496.1__ORF3a protein mRNA gc
aggagagucccgcagucggcguccagcggcucugcuuguucgugugugugucguugcaggccuuauucaagcuuaccauggaccuguucaugcgcaucuucaccaucggcaccgugacgcucaagcagggggagaucaaggacgccacccccagcgacuucguccgggccaccgcgaccaucccgauccaggccucccugcccuucggcuggcugaucguggggguggcccuccuggccgucuuccacagcgccuccaagaucaucacgcugaagaagcgcuggcagcucgcgcugagcaagggcgugcacuucgugugcaaccugcuccugcuguucgucaccguguacucccaccuccugcugguggccgccgggcucgaggcccccuuccuguaccuguacgcgcucgucuacuuccugcagagcaucaacuucgugcggaucaucaugcgccuguggcucugcuggaagugccgguccaagaacccccugcuguacgacgccaacuacuuccucugcuggcacaccaacugcuacgacuacugcaucccguacaacagcgugaccuccagcaucgucaucacguccggcgacggcaccaccagccccaucuccgagcacgacuaccagaucgggggcuacaccgagaagugggagagcggggugaaggacugcgugguccugcacuccuacuucacgagcgacuacuaccagcuguacuccacccagcucagcaccgacaccggcguggagcacgugacguucuucaucuacaacaagaucgucgacgagcuggaggagcacgugcagauccacaccaucgacggguccagcggcguggucaaccccgugauggagcccaucuacgacgagccgaccaccacgaccagcgugccccugugaggacuagucccuguucccagagcccacuuuuuuuucuuuuuuugaaauaaaauagccugucuuucagaucucaaaggcucuuuucagagccaccaaaaaaaaaaaaaaaaaaaaaaaaaaaaaaaaaaaaaaaaaaaaaaaaaaaaaaaaaaaaaaaaaaaaaaaaaaaaaaaaaaaaaaaaaaaaaaaaaaaaa

SEQ ID NO: 20602 - RNA, 1100 nt, Artificial Sequence
  SARS-CoV-2__MT772558.1__ORF3a protein mRNA gc
aggagagucccgcagucggcguccagcggcucugcuuguucgugugugugucguugcaggccuuauucaagcuuaccauggaccuguucaugcgcaucuucaccaucggcaccgugacgcucaagcagggggagaucaaggacgccacccccagcgacuucguccgggccaccgcgaccaucccgauccaggccucccugcccuucggcuggcugaucguggggguggcccuccuggccgucuuccagagcgccuccaagaucaucacgcugaagaagcgcuggcagcucgcgcugagcaagggcgugcacuucgugugcaaccugcuccugcuguucgucaccguguacucccaccuccugcugguggccgccgggcucgaggcccccuuccuguaccuguacgcgcucgucuacuuccugcagagcaucaacuucgugcggaucaucaugcgccuguggcucugcuggaagugccgguccaagaacccccugcuguacgacgccaacuacuuccucugcuggcacaccaacugcuacgacuacugcaccccguacaacagcgugacguccagcaucgucaucaccuccggcgacggcaccaccagccccaucuccgagcacgacuaccagaucgggggcuacacggagaagugggagagcggggugaaggacugcgugguccugcacuccuacuucaccagcgacuacuaccagcuguacuccacccagcucagcaccgacacgggcguggagcacgugaccuucuucaucuacaacaagaucgucgacgagcccgaggagcacgugcagauccacaccaucgacggguccagcggcguggucaaccccgugauggagccgaucuacgacgagcccaccacgaccaccagcgugccccugugaggacuagucccuguucccagagcccacuuuuuuuucuuuuuuugaaauaaaauagccugucuuucagaucucaaaggcucuuuucagagccaccaaaaaaaaaaaaaaaaaaaaaaaaaaaaaaaaaaaaaaaaaaaaaaaaaaaaaaaaaaaaaaaaaaaaaaaaaaaaaaaaaaaaaaaaaaaaaaaaaaaaa

SEQ ID NO: 20603 - RNA, 1100 nt, Artificial Sequence
  SARS-CoV-2__MT758203.1__ORF3a protein mRNA gc
aggagagucccgcagucggcguccagcggcucugcuuguucgugugugugucguugcaggccuuauucaagcuuaccauggaccuguucaugcgcaucuucaccaucggcaccgugacgcucaagcagggggagaucaaggacgccacccccagcgacuucguccgggccaccgcgaccaucccgauccaggccucccugcgcuucggcuggcugaucguggggguggcccuccuggccgucuuccacagcgccuccaagaucaucacgcugaagaagcgguggcagcucgcgcugagcaagggcgugcacuucgugugcaaccugcuccugcuguucgucaccguguacucccaccuccugcugguggccgccgggcucgaggcccccuuccuguaccuguacgcgcucgucuacuuccugcagagcaucaacuucgugcgcaucaucaugcggcuguggcucugcuggaagugccgcuccaagaacccccugcuguacgacgccaacuacuuccucugcuggcacaccaacugcuacgacuacugcauccccuacaacagcgugaccuccagcaucgucaucacguccggcgacggcaccaccagcccgaucuccgagcacgacuaccagaucgggggcuacaccgagaagugggagagcggggugaaggacugcgugguccugcacuccuacuucacgagcgacuacuaccagcuguacuccacccagcucagcaccgacaccggcguggagcacgugacguucuucaucuacaacaagaucgucgacgagcccgaggagcacgugcagauccacaccaucgacggguccagcggcguggucaaccccgugauggagcccaucuacgacgagccgaccaccacgaccagcgugccccugugaggacuagucccuguucccagagcccacuuuuuuuucuuuuuuugaaauaaaauagccugucuuucagaucucaaaggcucuuuucagagccaccaaaaaaaaaaaaaaaaaaaaaaaaaaaaaaaaaaaaaaaaaaaaaaaaaaaaaaaaaaaaaaaaaaaaaaaaaaaaaaaaaaaaaaaaaaaaaaaaaaaaa

SEQ ID NO: 20604 - RNA, 1100 nt, Artificial Sequence
  SARS-CoV-2__MT759820.1__ORF3a protein mRNA gc
aggagagucccgcagucggcguccagcggcucugcuuguucgugugugugucguugcaggccuuauucaagcuuaccauggaccuguucaugcgcaucuucaccaucggcaccgugacgcucaagcagggggagaucaaggacagcacccccuccgacuucguccgggccaccgccaccaucccgauccaggcgagccugcccuucggcuggcugaucguggggguggcccuccuggccgucuuccaguccgccagcaagaucaucacgcugaagaagcgcuggcagcucgcccuguccaagggcgugcacuucgugugcaaccugcuccugcuguucgucaccguguacagccaccuccugcugguggcggccgggcucgaggcccccuuccuguaccuguacgcccucgucuacuuccugcaguccaucaacuucgugcggaucaucaugcgccuguggcucugcuggaagugccggagcaagaacccccugcuguacgacgcgaacuacuuccucugcuggcacaccaacugcuacgacuacugcaucccguacaacuccgugaccagcuccaucgucaucacgagcggcgacggcaccaccucccccaucagcgagcacgacuaccagaucgggggcuacaccgagaagugggaguccggggugaaggacugcgugguccugcacagcuacuucacguccgacuacuaccagcuguacagcacccagcucuccaccgacaccggcguggagcacgugacguucuucaucuacaacaagaucgucgacgagcccgaggagcacgugcagauccacaccaucgacgggagcagcggcguggucaaccccgugauggagccgaucuacgacgagcccaccaccacgaccuccgugccccugugaggacuagucccuguucccagagcccacuuuuuuuucuuuuuuugaaauaaaauagccugucuuucagaucucaaaggcucuuuucagagccaccaaaaaaaaaaaaaaaaaaaaaaaaaaaaaaaaaaaaaaaaaaaaaaaaaaaaaaaaaaaaaaaaaaaaaaaaaaaaaaaaaaaaaaaaaaaaaaaaaaaaa

SEQ ID NO: 20605 - RNA, 1100 nt, Artificial Sequence
  SARS-CoV-2__MT762396.1__ORF3a protein mRNA gc
aggagagucccgcagucggcguccagcggcucugcuuguucgugugugugucguugcaggccuuauucaagcuuaccauggaccuguucaugcgcaucuucaccaucggcaccgugacgcucaagcagggggagaucaaggacgccacccccagcgacuucguccgggccaccgcgaccaucccgaucgaggccucccugcccuucggcuggcugaucguggggguggcccuccuggccgucuuccagagcgccuccaagaucaucacgcugaagaagcgcuggcagcucgcgcugagcaagggcgugcacuucgugugcaaccugcuccugcuguucgucaccguguacucccaccuccugcugguggccgccgggcucgaggcccccuuccuguaccuguacgcgcucgucuacuuccugcagagcaucaacuucgugcggaucaucaugcgccuguggcucugcuggaagugccgguccaagaacccccugcuguacgacgccaacuacuuccucugcuggcacaccaacugcuacgacuacugcaucccguacaacagcgugaccuccagcaucgucaucacguccggcgacggcaccaccagccccaucuccgagcacgacuaccagaucgggggcuacaccgagaagugggagagcggggugaaggacugcgugguccugcacuccuacuucacgagcgacuacuaccagcuguacuccacccagcucagcaccgacaccggcguggagcacgugacguucuucaucuacaacaagaucgucgacgagcccgaggagcacgugcagauccacaccaucgacggguccagcggcguggucaaccccgugauggagccgaucuacgacgagcccaccaccacgaccagcgugccccugugaggacuagucccuguucccagagcccacuuuuuuuucuuuuuuugaaauaaaauagccugucuuucagaucucaaaggcucuuuucagagccaccaaaaaaaaaaaaaaaaaaaaaaaaaaaaaaaaaaaaaaaaaaaaaaaaaaaaaaaaaaaaaaaaaaaaaaaaaaaaaaaaaaaaaaaaaaaaaaaaaaaaa

SEQ ID NO: 20606 - RNA, 1100 nt, Artificial Sequence
  SARS-CoV-2__MT762397.1__ORF3a protein mRNA gc
aggagagucccgcagucggcguccagcggcucugcuuguucgugugugugucguugcaggccuuauucaagcuuaccauggaccuguucaugcgcaucuucaccaucggcaccgugacgcucaagcagggggagaucaaggacgccacccccagcgacuucguccgggccaccgcgaccaucccgauccaggccucccugcccuucggccugcucaucguggggguggcccugcuggccgucuuccagagcgccuccaagaucaucauccucaagaagcgcuggcagcuggcgcugagcaagggcgugcacuucgugugcaaccuccugcugcuguucgucacgguguacucccaccuccugcucguggccgccgggcuggaggcccccuuccuguaccucuacgcgcuggucuacuuccugcagagcaucaacuucgugcggaucaucaugcgccucuggcugugcuggaagugccgguccaagaacccccugcucuacgacgccaacuacuuccugugcuggcacaccaacugcuacgacuacugcaucccguacaacagcgugaccuccagcaucgucaucaccuccggcgacggcacgaccagccccaucuccgagcacgacuaccagaucgggggcuacaccgagaagugggagagcggggugaaggacugcgugguccugcacuccuacuucaccagcgacuacuaccagcucuacuccacgcagcugagcaccgacaccggcguggagcacgugaccuucuucaucuacaacaagaucgucgacgagcccgaggagcacgugcagauccacacgaucgacggguccagcggcguggucaaccccgugauggagccgaucuacgacgagcccaccaccaccacgagcgugccccugugaggacuagucccuguucccagagcccacuuuuuuuucuuuuuuugaaauaaaauagccugucuuucagaucucaaaggcucuuuucagagccaccaaaaaaaaaaaaaaaaaaaaaaaaaaaaaaaaaaaaaaaaaaaaaaaaaaaaaaaaaaaaaaaaaaaaaaaaaaaaaaaaaaaaaaaaaaaaaaaaaaaaa

SEQ ID NO: 20607 - RNA, 1100 nt, Artificial Sequence
  SARS-CoV-2__MT762398.1__ORF3a protein mRNA gc
aggagagucccgcagucggcguccagcggcucugcuuguucgugugugugucguugcaggccuuauucaagcuuaccauggaccuguucaugcgcaucuucaccaucggcaccgugacgcucaagcagggggagaucaaggacgccacccccagcgacuucguccgggccaccgcgaccaucccgauccaggccucccugcccuucggcuggcugaucguggggguggcccuccuggccgucuuccacagcgccuccaagaucaucacgcugaagaagcgcuggcagcucgcgcugagcaagggcgugcacuucgugugcaaccugcuccugcuguucgucaccguguacucccaccuccugcugguggccgccgggcucgagagccccuuccuguaccuguacgcccucgucuacuuccugcaguccaucaacuucgugcggaucaucaugcgccuguggcucugcuggaagugccggagcaagaacccccugcuguacgacgcgaacuacuuccucugcuggcacaccaacugcuacgacuacugcaucccguacaacuccgugaccagcuccaucgucaucacgagcggcgacggcaccaccucccccaucagcgagcacgacuaccagaucgggggcuacaccgagaagugggaguccggggugaaggacugcgugguccugcacagcuacuucacguccgacuacuaccagcuguacagcacccagcucuccaccgacaccggcguggagcacgugacguucuucaucuacaacaagaucgucgacgagcccgaggagcacgugcagauccacaccaucgacgggagcagcggcguggucaaccccgugauggagccgaucuacgacgagcccaccaccacgaccuccgugccccugugaggacuagucccuguucccagagcccacuuuuuuuucuuuuuuugaaauaaaauagccugucuuucagaucucaaaggcucuuuucagagccaccaaaaaaaaaaaaaaaaaaaaaaaaaaaaaaaaaaaaaaaaaaaaaaaaaaaaaaaaaaaaaaaaaaaaaaaaaaaaaaaaaaaaaaaaaaaaaaaaaaaaa

SEQ ID NO: 20608 - RNA, 1100 nt, Artificial Sequence
  SARS-CoV-2__MT755838.1__ORF3a protein mRNA gc
aggagagucccgcagucggcguccagcggcucugcuuguucgugugugugucguugcaggccuuauucaagcuuaccauggaccuguucaugcgcaucuucaccaucggcaccgugacgcucaagcagggggagaucaaggacgccacccccagcgacuucguccgggccaccgcgaccaucccgauccaggccucccugcccuucggcuggcugaucguggggguggcccuccuggccgucuuccagagcgccuccaagaucaucacgcugaagaagcgcuggcagcucgcgcugagcaagggcgugcacuucgugugcaaccugcuccugcuguucgucaccguguacucccaccuccugcugguggccgccgggcucgaggcccccuuccuguaccuguacgcgcucgucuacuuccugcagagcaucaacuucgugcggaucaucaugcgccuguggcucugcuggaagugccgguccaagaacccccugcuguacgacgccaacuacuuccucugcuggcacaccaacugcuacgacuacugcaucccguacaacagcgugaccuccagcaucgucaucacguccggcgacggcaccaccagccccaucuccgagcacgacuaccagaucgggugcuacaccgagaagugggagagcggcgugaaggacugcgugguccugcacuccuacuucacgagcgacuacuaccagcuguacuccacccagcucagcaccgacaccgggguggagcacgugacguucuucaucuacaacaagaucgucgacgagcccgaggagcacgugcagauccacaccaucgacggcuccagcgggguggucaaccccgugauggagccgaucuacgacgagcccaccaccacgaccagcgugccccugugaggacuagucccuguucccagagcccacuuuuuuuucuuuuuuugaaauaaaauagccugucuuucagaucucaaaggcucuuuucagagccaccaaaaaaaaaaaaaaaaaaaaaaaaaaaaaaaaaaaaaaaaaaaaaaaaaaaaaaaaaaaaaaaaaaaaaaaaaaaaaaaaaaaaaaaaaaaaaaaaaaaaa

SEQ ID NO: 20609 - RNA, 1097 nt, Artificial Sequence
  SARS-CoV-2__MT755858.1__ORF3a protein mRNA gc
aggagagucccgcagucggcguccagcggcucugcuuguucgugugugugucguugcaggccuuauucaagcuuaccauggaccuguucaugcgcaucuucaccaucggcaccgugacgcucaagcagggggagaucaaggacgccacccccagcgacuucguccgggccaccgcgaccaucccgauccaggccucccugcccuucggcuggcugaucguggggguggcccuccuggccgucuuccagagcgccuccaagaucaucacgcugaagaagcgcuggcagcucgcgcugagcaagggcgugcacuucgugugcaaccugcuccugcuguucgucaccguguacucccaccuccugcugguggccgccgggcucgaggcccccuuccuguaccuguacgcgcucgucuacuuccugcagagcaucaacuucgugcggaucaucaugcgccuguggcucugcuggaagugccgguccaagaacccccugcuguacgacgccaacuacuuccucugcuggcacaccaacugcuacgacuacugcaucccguacaacagcgugaccuccagcaucgucaucacguccggcgacggcaccaccagccccaucuccgagcacgacuaccagaucgggggcuacaccgagaagugggagagcggggugaaggacugcgugguccugcacuccuacuucacgagcgacuacuaccagcuguacuccacccagcucagcaccgacaccggcguggagcacgugacguucuucaucuacaacaagaucgucgacgagcccgaggagcacgugcagauccacaccaucgacggguccagcggcgugaaccccgucauggagccgaucuacgacgagcccaccaccacgaccagcgugccccugugaggacuagucccuguucccagagcccacuuuuuuuucuuuuuuugaaauaaaauagccugucuuucagaucucaaaggcucuuuucagagccaccaaaaaaaaaaaaaaaaaaaaaaaaaaaaaaaaaaaaaaaaaaaaaaaaaaaaaaaaaaaaaaaaaaaaaaaaaaaaaaaaaaaaaaaaaaaaaaaaaaaaa

SEQ ID NO: 20610 - RNA, 1100 nt, Artificial Sequence
  SARS-CoV-2__MT755886.1__ORF3a protein mRNA gc
aggagagucccgcagucggcguccagcggcucugcuuguucgugugugugucguugcaggccuuauucaagcuuaccauggaccuguucaugcgcaucuucaccaucggcaccgugacgcucaagcagggggagaucaaggacgccacccccagcgacuucguccgggccaccgcgaccaucccgauccaggccucccugcccuucggcuggcugaucgugggggugagccuccuggccgucuuccacuccgccagcaagaucaucacgcugaagaagcgcuggcagcucgcccuguccaagggcgugcacuucgugugcaaccugcuccugcuguucgucaccguguacagccaccuccugcugguggcggccgggcucgaggcccccuuccuguaccuguacgcccucgucuacuuccugcaguccaucaacuucgugcggaucaucaugcgccuguggcucugcuggaagugccggagcaagaacccccugcuguacgacgcgaacuacuuccucugcuggcacaccaacugcuacgacuacugcaucccguacaacuccgugaccagcuccaucgucaucacgagcggcgacggcaccaccucccccaucagcgagcacgacuaccagaucgggggcuacaccgagaagugggaguccggggugaaggacugcgugguccugcacagcuacuucacguccgacuacuaccagcuguacagcacccagcucuccaccgacaccggcguggagcacgugacguucuucaucuacaacaagaucgucgacgagcccgaggagcacgugcagauccacaccaucgacgggagcagcggcguggucaaccccgugauggagccgaucuacgacgagcccaccaccacgaccuccgugccccugugaggacuagucccuguucccagagcccacuuuuuuuucuuuuuuugaaauaaaauagccugucuuucagaucucaaaggcucuuuucagagccaccaaaaaaaaaaaaaaaaaaaaaaaaaaaaaaaaaaaaaaaaaaaaaaaaaaaaaaaaaaaaaaaaaaaaaaaaaaaaaaaaaaaaaaaaaaaaaaaaaaaaa

SEQ ID NO: 20611 - RNA, 1100 nt, Artificial Sequence
  SARS-CoV-2__MT755897.1__ORF3a protein mRNA gc
aggagagucccgcagucggcguccagcggcucugcuuguucgugugugugucguugcaggccuuauucaagcuuaccauggaccuguucaugcgcaucuucaccaucggcaccgugacgcucaagcagggggagaucaaggacgccacccccagcgacuucguccgggccaccgcgaccaucccgauccaggccucccugcccuucggcuggcugaucguggggguggcccuccuggccgucuuccacagcgccuccaagaucaucacgcugaagaagcgcuggcagcucgcgcugagcaagggcgugcacuucgugugcaaccugcuccugcuguucgucaccguguacucccaccuccugcugguggccagcgggcucgaggcccccuuccuguaccuguacgcccucgucuacuuccugcaguccaucaacuucgugcggaucaucaugcgccuguggcucugcuggaagugccggagcaagaacccccugcuguacgacgcgaacuacuuccucugcuggcacaccaacugcuacgacuacugcaucccguacaacuccgugaccagcuccaucgucaucacgagcggcgacggcaccaccucccccaucagcgagcacgacuaccagaucgggggcuacaccgagaagugggaguccggggugaaggacugcgugguccugcacagcuacuucacguccgacuacuaccagcuguacagcacccagcucuccaccgacaccggcguggagcacgugacguucuucaucuacaacaagaucgucgacgagcccgaggagcacgugcagauccacaccaucgacgggagcagcggcguggucaaccccgugauggagccgaucuacgacgagcccaccaccacgaccuccgugccccugugaggacuagucccuguucccagagcccacuuuuuuuucuuuuuuugaaauaaaauagccugucuuucagaucucaaaggcucuuuucagagccaccaaaaaaaaaaaaaaaaaaaaaaaaaaaaaaaaaaaaaaaaaaaaaaaaaaaaaaaaaaaaaaaaaaaaaaaaaaaaaaaaaaaaaaaaaaaaaaaaaaaaa

SEQ ID NO: 20612 - RNA, 1100 nt, Artificial Sequence
  SARS-CoV-2__MT755899.1__ORF3a protein mRNA gc
aggagagucccgcagucggcguccagcggcucugcuuguucgugugugugucguugcaggccuuauucaagcuuaccauggaccuguucaugcgcaucuucaccaucggcaccgugacgcucaagcagggggagaucaaggacgccacccccagcgacuucguccgggccaccgcgaccaucccgauccaggccucccugcccuucggcuggcugaucguggggguggcccuccuggccgucuuccacagcgccuccaagaucaucacgcugaagaagcgcuggcagcucgcgcugagcaagggcgugcacuucgugugcaaccugcuccugcuguucgucaccguguacucccaccuccugcugguggccgccgggcucgaggcccccuuccuguaccuguacgcgcucgucuacuuccugcagagcaucaacuucgugcggaucaucaugcgccuguggcucugcuggaagugccgguccaagaacccccugcuguacgacgccaacuacuuccucugcuggcacaccaacugcuacgacuacugcaucccguacaacagcgugaccuccagcaucgucaucacguccggcgacggcaccaccagccccaucuccgagcacgacuaccagaucgggggcuacaccgagaagugggagagcggggugaaggacugcgugguccugcacuccuacuucacgagcgacuacuaccagcuguaccccacccagcucuccaccgacaccggcguggagcacgugacguucuucaucuacaacaagaucgucgacgagcccgaggagcacgugcagauccacaccaucgacgggagcuccggcguggucaacccggugauggagcccaucuacgacgagcccaccaccacgaccagcgugccccugugaggacuagucccuguucccagagcccacuuuuuuuucuuuuuuugaaauaaaauagccugucuuucagaucucaaaggcucuuuucagagccaccaaaaaaaaaaaaaaaaaaaaaaaaaaaaaaaaaaaaaaaaaaaaaaaaaaaaaaaaaaaaaaaaaaaaaaaaaaaaaaaaaaaaaaaaaaaaaaaaaaaaa

SEQ ID NO: 20613 - RNA, 1100 nt, Artificial Sequence
  SARS-CoV-2__MT755901.1__ORF3a protein mRNA gc
aggagagucccgcagucggcguccagcggcucugcuuguucgugugugugucguugcaggccuuauucaagcuuaccauggaccuguucaugcgcaucuucaccaucggcaccgugacgcucaagcagggggagaucaaggacgccacccccagcgacuucguccgggccaccgcgaccaucccgauccaggccucccugcccuucggcuggcugaucguggggguggcccuccuggccgucuuccagagcgccuccaagaucaucacgcugaagaagcgcuggcagcucgcgcugagcaagggcgugcacuucgugugcaaccugcuccugcuguucgucaccguguacucccaccuccugcugguggccgccgggcucgaggcccccuuccuguaccuguacgcgcucgucuacuuccugcagagcaucaacuucgugcggaucaucaugcgccuguggcucugcuggaagugccgguccaagaacccccugcuguacgacgccaacuacuuccucugcuggcacaccaacugcuacgacuacugcaucccguacaacagcgugaccuccagcaucgucaucacguccggcgacggcaccaccagccccaucuccgagcacgacuaccagaucgggggcuacaccgagaaguggcagagcggggugaaggacugcgugguccugcacuccuacuucacgagcgacuacuaccagcuguacuccacccagcucagcaccgacaccggcguggagcacgugacguucuucaucuacaacaagaucgucgacgagcccgaggagcacgugcagauccacaccaucgacggguccagcggcguggucaaccccgugauggagccgaucuacgacgagcccaccaccacgaccagcgugccccugugaggacuagucccuguucccagagcccacuuuuuuuucuuuuuuugaaauaaaauagccugucuuucagaucucaaaggcucuuuucagagccaccaaaaaaaaaaaaaaaaaaaaaaaaaaaaaaaaaaaaaaaaaaaaaaaaaaaaaaaaaaaaaaaaaaaaaaaaaaaaaaaaaaaaaaaaaaaaaaaaaaaaa

SEQ ID NO: 20614 - RNA, 1100 nt, Artificial Sequence
  SARS-CoV-2__MT757016.1__ORF3a protein mRNA gc
aggagagucccgcagucggcguccagcggcucugcuuguucgugugugugucguugcaggccuuauucaagcuuaccauggaccuguucaugcgcaucuucaccaucggcaccgugacgcucaagcagggggagaucaaggacgccacccccagccacuucguccgggccaccgcgaccaucccgauccaggccucccugcccuucggcuggcugaucguggggguggcccuccuggccgucuuccacagcgccuccaagaucaucacgcugaagaagcgcuggcagcucgcgcugagcaagggcgugcacuucgugugcaaccugcuccugcuguucgucaccguguacucccaccuccugcugguggccgccgggcucgaggcccccuuccuguaccuguacgcgcucgucuacuuccugcagagcaucaacuucgugcggaucaucaugcgccuguggcucugcuggaagugccgguccaagaacccccugcuguacgacgccaacuacuuccucugcuggcacaccaacugcuacgacuacugcaucccguacaacagcgugaccuccagcaucgucaucacguccggcgacggcaccaccagccccaucuccgagcacgacuaccagaucgggggcuacaccgagaagugggagagcggggugaaggacugcgugguccugcacuccuacuucacgagcgacuacuaccagcuguacuccacccagcucagcaccgacaccggcuucgagcacgugacguucuucaucuacaacaagaucguggacgagcccgaggagcacguccagauccacaccaucgacggguccagcggcguggugaaccccgucauggagccgaucuacgacgagcccaccaccacgaccagcgugccccugugaggacuagucccuguucccagagcccacuuuuuuuucuuuuuuugaaauaaaauagccugucuuucagaucucaaaggcucuuuucagagccaccaaaaaaaaaaaaaaaaaaaaaaaaaaaaaaaaaaaaaaaaaaaaaaaaaaaaaaaaaaaaaaaaaaaaaaaaaaaaaaaaaaaaaaaaaaaaaaaaaaaaa

SEQ ID NO: 20615 - RNA, 1100 nt, Artificial Sequence
  SARS-CoV-2__MT757040.1__ORF3a protein mRNA gc
aggagagucccgcagucggcguccagcggcucugcuuguucgugugugugucguugcaggccuuauucaagcuuaccauggaccuguucaugcgcaucuucaccaucggcaccgugacgcucaagcagggggagaucaaggacgccacccccagcgacuucguccgggccaccgcgaccaucccgauccaggccucccugcccuucggcuggcugaucguggggguggcccuccuggccgucuuccacagcgccuccaagaucaucacgcugaagaagcgcuggcagcucgcgcugagcaagggcgugcacuucgugugcaaccugcuccugcuguucgucaccguguacucccaccuccugcugguggccgccgggcucgaggcccccuuccuguaccuguacgcgcucgucuacuuccugcagagcaucaacuucgugcggaucaucaugcgccuguggcucugcuggaagugccgguccaagaacccccugcuguacgacgccaacuacuuccucugcuggcacaccaacugcuacgacuacugcaucccguacaacagcgugaccuccagcaucgucaucacguccggcgacggcaccaccagccccaucuccgagcacgacuaccagaucgggggcuacaccgagaagugggagagcggggugaaggacugcgugguccugcacuccuacuucacgagcuacuacuaccagcuguacuccacccagcucagcaccgacaccggcguggagcacgugacguucuucaucuacaacaagaucgucgacgagcccgaggagcacgugcagauccacaccaucgacggguccagcggcguggucaaccccgugauggagccgaucuacgacgagcccaccaccacgaccagcgugccccugugaggacuagucccuguucccagagcccacuuuuuuuucuuuuuuugaaauaaaauagccugucuuucagaucucaaaggcucuuuucagagccaccaaaaaaaaaaaaaaaaaaaaaaaaaaaaaaaaaaaaaaaaaaaaaaaaaaaaaaaaaaaaaaaaaaaaaaaaaaaaaaaaaaaaaaaaaaaaaaaaaaaaa

SEQ ID NO: 20616 - RNA, 1100 nt, Artificial Sequence
  SARS-CoV-2__MT745584.1__ORF3a protein mRNA gc
aggagagucccgcagucggcguccagcggcucugcuuguucgugugugugucguugcaggccuuauucaagcuuaccauggaccuguucaugcgcaucuucaccaucggcaccgugacgcucaagcagggggagaucaaggacgccacccccagcgacuucguccgggccaccgcgaccaucccgauccaggccucccugcccuucggcuggcugaucguggggguggcccuccuggccgucuuccacagcgccuccaagaucaucacgcugaagaagcgcuggcagcucgcgcugagcaagggcgugcacuucgugugcaaccugcuccugcuguucgucaccguguacucccaccuccugcugguggccgccgggcucgaggcccccuuccuguaccuguacgcgcucgucuacuuccugcagagcaucaacuucgugcggaucaucaugcgccuguggcucugcuggaagugccgguccaagaacccccugcuguacgacgccaacuacuuccucugcuggcacaccaacugcuacgacuacugcaucccguacaacagcgugaccuccagcaucgucaucacguccggcgacggcaccaccagccccaucuccgagcacgacuaccagaucgggggcuacaccgagaagugggagagcggggugaaggacugcgugguccugcacuccuacuucacgagcgacuacuaccagcuguacuccacccagcucagcaccgacaccggccuggagcacgugacguucuucaucuacaacaagaucguggacgagcccgaggagcacguccagauccacaccaucgacggguccagcggcguggugaaccccgucauggagccgaucuacgacgagcccaccaccacgaccagcgugccccugugaggacuagucccuguucccagagcccacuuuuuuuucuuuuuuugaaauaaaauagccugucuuucagaucucaaaggcucuuuucagagccaccaaaaaaaaaaaaaaaaaaaaaaaaaaaaaaaaaaaaaaaaaaaaaaaaaaaaaaaaaaaaaaaaaaaaaaaaaaaaaaaaaaaaaaaaaaaaaaaaaaaaa

SEQ ID NO: 20617 - RNA, 1100 nt, Artificial Sequence
  SARS-CoV-2__MT745651.1__ORF3a protein mRNA gc
aggagagucccgcagucggcguccagcggcucugcuuguucgugugugugucguugcaggccuuauucaagcuuaccauggaccuguucaugcgcaucuucaccaucggcaccgugacgcucaagcagggggagaucaaggacagcacccccuccgacuucguccgggccaccgccaccaucccgauccaggcgagccugcccuucggcuggcugaucguggggguggcccuccuggccgucuuccacuccgccagcaagaucaucacgcugaagaagcgcuggcagcucgcccuguccaagggcgugcacuucgugugcaaccugcuccugcuguucgucaccguguacagccaccuccugcugguggcggccgggcucgaggcccccuuccuguaccuguacgcccucgucuacuuccugcaguccaucaacuucgugcggaucaucaugcgccuguggcucugcuggaagugccggagcaagaacccccugcuguacgacgcgaacuacuuccucugcuggcacaccaacugcuacgacuacugcaucccguacaacuccgugaccagcuccaucgucaucacgagcggcgacggcaccaccucccccaucagcgagcacgacuaccagaucgggggcuacaccgagaagugggaguccggggugaaggacugcgugguccugcacagcuacuucacguccgacuacuaccagcuguacagcacccagcucuccaccgacaccggcguggagcacgugacguucuucaucuacaacaagaucgucgacgagcccgaggagcacgugcagauccacaccaucgacgggagcagcggcguggucaaccccgugauggagccgaucuacgacgagcccaccaccacgaccuccgugccccugugaggacuagucccuguucccagagcccacuuuuuuuucuuuuuuugaaauaaaauagccugucuuucagaucucaaaggcucuuuucagagccaccaaaaaaaaaaaaaaaaaaaaaaaaaaaaaaaaaaaaaaaaaaaaaaaaaaaaaaaaaaaaaaaaaaaaaaaaaaaaaaaaaaaaaaaaaaaaaaaaaaaaa

SEQ ID NO: 20618 - RNA, 1100 nt, Artificial Sequence
  SARS-CoV-2__MT745660.1__ORF3a protein mRNA gc
aggagagucccgcagucggcguccagcggcucugcuuguucgugugugugucguugcaggccuuauucaagcuuaccauggaccuguucaugcgcaucuucaccaucggcaccgugacgcucaagcagggggagaucaaggacgccacccccagcgacuucguccgggccaccgcgaccaucccgauccaggccucccugcccuucggcuggcugaucguggggguggcccuccuggccgucuuccagagcgccuccaagaucaucacgcugaagaagcgcuggcagcucgcgcuguucaagggcgugcacuucgugugcaaccugcuccugcuguucgucaccguguacagccaccuccugcugguggccgccgggcucgaggcccccuuccuguaccuguacgcgcucgucuacuuccugcaguccaucaacuucgugcggaucaucaugcgccuguggcucugcuggaagugccggagcaagaacccccugcuguacgacgccaacuacuuccucugcuggcacaccaacugcuacgacuacugcaucccguacaacuccgugaccagcuccaucgucaucacgagcggcgacggcaccaccucccccaucagcgagcacgacuaccagaucgggggcuacaccgagaagugggaguccggggugaaggacugcgugguccugcacagcuacuucacguccgacuacuaccagcuguacagcacccagcucuccaccgacaccggcguggagcacgugacguucuucaucuacaacaagaucgucgacgagcccgaggagcacgugcagauccacaccaucgacgggagcuccggcguggucaaccccgugauggagccgaucuacgacgagcccaccaccacgaccagcgugccccugugaggacuagucccuguucccagagcccacuuuuuuuucuuuuuuugaaauaaaauagccugucuuucagaucucaaaggcucuuuucagagccaccaaaaaaaaaaaaaaaaaaaaaaaaaaaaaaaaaaaaaaaaaaaaaaaaaaaaaaaaaaaaaaaaaaaaaaaaaaaaaaaaaaaaaaaaaaaaaaaaaaaaa

SEQ ID NO: 20619 - RNA, 1100 nt, Artificial Sequence
  SARS-CoV-2__MT745661.1__ORF3a protein mRNA gc
aggagagucccgcagucggcguccagcggcucugcuuguucgugugugugucguugcaggccuuauucaagcuuaccauggaccuguucaugcgcaucuucaccaucggcaccgugacgcucaagcagggggagaucaaggacgccacccccagcgacuucguccgggccaccgcgaccaucccgauccaggccucccugcccuucggcuggcugaucguggggguggcccuccuggccgucuuccacagcgccuccaagaucaucacgcugaagaagcgcuggcagcucgcgcugagcaagggcgugcacuucgugugcaaccugcuccugcuguucgucaccguguacucccaccuccugcugguggccgccgggcucgaggcccccuuccuguaccuguacgcgcucgucuacuuccugcagagcaucaacuucgugcggaucaucaugcgccuguggcucugcuggaagugccgguccaagaacccccugcuguacgacgccaacuacuuccucugcuggcacaccaacugcuacgacuacugcaucccguacaacagcgugaccuccagcaucgucaucacguccggcgacggcaccaccagccccaucuccgagcacgacuaccagaucgggggcuacaccgagaagugggagagcggggugaaggacugcgugguccugcacuccuacuucacgagcgacuacuaccagcuguacuccacccagcucagcaccgacaccggcguggagcacgugacguucuucaucuacaacaagaucgucgacgagcccgaggagcacgugcagauccacaccaucgacggguccagcggcguggucaaccccgugaucgagccgaucuacgacgagcccaccaccacgaccagcgugccccugugaggacuagucccuguucccagagcccacuuuuuuuucuuuuuuugaaauaaaauagccugucuuucagaucucaaaggcucuuuucagagccaccaaaaaaaaaaaaaaaaaaaaaaaaaaaaaaaaaaaaaaaaaaaaaaaaaaaaaaaaaaaaaaaaaaaaaaaaaaaaaaaaaaaaaaaaaaaaaaaaaaaaa

SEQ ID NO: 20620 - RNA, 1100 nt, Artificial Sequence
  SARS-CoV-2__MT745698.1__ORF3a protein mRNA gc
aggagagucccgcagucggcguccagcggcucugcuuguucgugugugugucguugcaggccuuauucaagcuuaccauggaccuguucaugcgcaucuucaccaucggcaccgugacgcucaagcagggggagaucaaggacgccacccccagcgacuucguccgggccaccgcgaccaucccgauccaggccucccugcccuucggcuggcugaucguggggguggcccuccuggccgucuuccagagcgccuccaagaucaucacgcugaagaagcgcuggcagcucgcgcugagcaagggcgugcacuucgugugcaaccugcuccugcuguucgucaccguguacucccaccuccugcugguggccgccgggcucgaggcccccuuccuguaccuguacgcgcucgucuacuuccugcagagcaucaacuucgugcggaucaucaugcgccuguggcucugcuggaagugccgguccaagaacccccugcuguacgacgccaacuacuuccucugcuggcacaccaacugcuacgacuacugcaucccguacaacagcgugaccuccagcaucgucaucacguccggcgacggcaccaccagcuccaucagcgagcacgacuaccagaucgggggcuacaccgagaagugggaguccggggugaaggacugcgugguccugcacagcuacuucacguccgacuacuaccagcuguacagcacccagcucuccaccgacaccggcguggagcacgugacguucuucaucuacaacaagaucgucgacgagcccgaggagcacgugcagauccacaccaucgacgggagcagcggcguggucaaccccgugauggagcccaucuacgacgagccgaccaccacgaccuccgugccccugugaggacuagucccuguucccagagcccacuuuuuuuucuuuuuuugaaauaaaauagccugucuuucagaucucaaaggcucuuuucagagccaccaaaaaaaaaaaaaaaaaaaaaaaaaaaaaaaaaaaaaaaaaaaaaaaaaaaaaaaaaaaaaaaaaaaaaaaaaaaaaaaaaaaaaaaaaaaaaaaaaaaaa

SEQ ID NO: 20621 - RNA, 1100 nt, Artificial Sequence
  SARS-CoV-2__MT745711.1__ORF3a protein mRNA gc
aggagagucccgcagucggcguccagcggcucugcuuguucgugugugugucguugcaggccuuauucaagcuuaccauggaccuguucaugcgcaucuucaccaucggcaccgugacgcucaagcagggggagaucaaggacgccacccccagcgacuucguccgggccaccgcgaccaucccgauccaggccucccugcccuucggcuggcugaucguggggguggcccuccuggccggcuuccacagcgccuccaagaucaucacgcugaagaagcgcuggcagcucgcgcugagcaaggggguccacuucgugugcaaccugcuccugcuguucgugaccgucuacucccaccuccugcugguggccgccggccucgaggcccccuuccuguaccuguacgcgcucguguacuuccugcagagcaucaacuucguccggaucaucaugcgccuguggcucugcuggaagugccgguccaagaacccccugcuguacgacgccaacuacuuccucugcuggcacaccaacugcuacgacuacugcaucccguacaacagcgugaccuccagcaucgugaucacguccggcgacgggaccaccagccccaucuccgagcacgacuaccagaucggcggguacaccgagaagugggagagcggcgucaaggacugcguggugcugcacuccuacuucacgagcgacuacuaccagcuguacuccacccagcucagcaccgacaccggggucgagcacgugacguucuucaucuacaacaagaucguggacgagcccgaggagcacguccagauccacaccaucgacggcuccagcggcguggugaaccccgucauggagccgaucuacgacgagcccaccaccacgaccagcgugccccugugaggacuagucccuguucccagagcccacuuuuuuuucuuuuuuugaaauaaaauagccugucuuucagaucucaaaggcucuuuucagagccaccaaaaaaaaaaaaaaaaaaaaaaaaaaaaaaaaaaaaaaaaaaaaaaaaaaaaaaaaaaaaaaaaaaaaaaaaaaaaaaaaaaaaaaaaaaaaaaaaaaaaa

SEQ ID NO: 20622 - RNA, 1103 nt, Artificial Sequence
  SARS-CoV-2__MT748758.1__ORF3a protein mRNA gc
aggagagucccgcagucggcguccagcggcucugcuuguucgugugugugucguugcaggccuuauucaagcuuaccauggaccuguucaugcgcaucuucaccaucggcaccgugacgcucaagcagggggagaucaaggacgccacccccagcgacuucguccgggccaccgcgaccaucccgauccaggccucccugcccuucggcuggcugaucguggggguggcccuccuggccgucuuccagagcgccuccaagaucaucacgcugaagaagcgcuggcagcucgcgcugagcaagggcgugcacuucgugugcaaccugcuccugcuguucgucaccguguacucccaccuccugcugguggccgccggggaccucgaggcccccuuccuguaccuguacgcgcucgucuacuuccugcagagcaucaacuucgugcggaucaucaugcgccuguggcucugcuggaagugccgguccaagaacccccugcuguacgacgccaacuacuuccucugcuggcacaccaacugcuacgacuacugcaucccguacaacagcgugaccuccagcaucgucaucacguccggcgacggcaccaccagccccaucuccgagcacgacuaccagaucgggggcuacaccgagaagugggagagcggggugaaggacugcgugguccugcacuccuacuucacgagcgacuacuaccagcuguacuccacccagcucagcaccgacaccggcguggagcacgugacguucuucaucuacaacaagaucgucgacgagcccgaggagcacgugcagauccacaccaucgacggguccagcggcguggucaaccccgugauggagccgaucuacgacgagcccaccaccacgaccagcgugccccugugaggacuagucccuguucccagagcccacuuuuuuuucuuuuuuugaaauaaaauagccugucuuucagaucucaaaggcucuuuucagagccaccaaaaaaaaaaaaaaaaaaaaaaaaaaaaaaaaaaaaaaaaaaaaaaaaaaaaaaaaaaaaaaaaaaaaaaaaaaaaaaaaaaaaaaaaaaaaaaaaaaaaa

SEQ ID NO: 20623 - RNA, 1100 nt, Artificial Sequence
  SARS-CoV-2__MT750023.1__ORF3a protein mRNA gc
aggagagucccgcagucggcguccagcggcucugcuuguucgugugugugucguugcaggccuuauucaagcuuaccauggaccuguucaugcgcaucuucaccaucggcaccgugacgcucaagcagggggagaucaaggacgccacgccccuggacuucguccgggccaccgcgaccaucccgauccaggccagccugcccuucggcuggcucaucguggggguggcccugcuggccgucuuccacuccgccagcaagaucaucacccucaagaagcgcuggcagcuggcgcuguccaagggcgugcacuucgugugcaaccuccugcugcuguucgucaccguguacagccaccuccugcucguggccgccgggcuggaggcccccuuccuguaccucuacgcgcuggucuacuuccugcaguccaucaacuucgugcggaucaucaugcgccucuggcugugcuggaagugccggagcaagaacccccugcucuacgacgccaacuacuuccugugcuggcacaccaacugcuacgacuacugcaucccguacaacuccgugaccagcuccaucgucaucacgagcggcgacggcaccaccucccccaucagcgagcacgacuaccagaucgggggcuacaccgagaagugggaguccggggugaaggacugcgugguccugcacagcuacuucacguccgacuacuaccagcucuacagcacccagcuguccaccgacaccggcguggagcacgugacguucuucaucuacaacaagaucgucgacgagcccgaggagcacgugcagauccacaccaucgacgggagcuccggcguggucaaccccgugauggagccgaucuacgacgagcccaccaccacgaccagcgugccccugugaggacuagucccuguucccagagcccacuuuuuuuucuuuuuuugaaauaaaauagccugucuuucagaucucaaaggcucuuuucagagccaccaaaaaaaaaaaaaaaaaaaaaaaaaaaaaaaaaaaaaaaaaaaaaaaaaaaaaaaaaaaaaaaaaaaaaaaaaaaaaaaaaaaaaaaaaaaaaaaaaaaaa

SEQ ID NO: 20624 - RNA, 1100 nt, Artificial Sequence
  SARS-CoV-2__MT750069.1__ORF3a protein mRNA gc
aggagagucccgcagucggcguccagcggcucugcuuguucgugugugugucguugcaggccuuauucaagcuuaccauggaccuguucaugcgcaucuucaccaucggcaccgugacgcucaagcagggggagaucaaggacgccacccccagcgacuucguccgggccaccgcgaccaucccgauccaggccucccugcccuucggcuggcugaucguggggguggcccuccuggccgucuuccagagcgccuccaagaucaucacgcugaagaagcgcuggcagcucgcgcugagcaagggcgugcacuucgugugcaaccugcuccugcuguucgucaccguguacucccaccuccugcugguggccgccgggcucgagagccccuuccuguaccuguacgcccucgucuacuuccugcaguccaucaacuucgugcggaucaucaugcgccuguggcucugccugaagugccggagcaagaacccccugcucuacgacgcgaacuacuuccugugcuggcacaccaacugcuacgacuacugcaucccguacaacuccgugaccagcuccaucgucaucacgagcggcgacggcaccaccucccccaucagcgagcacgacuaccagaucgggggcuacaccgagaagugggaguccggggugaaggacugcgugguccugcacagcuacuucacguccgacuacuaccagcucuacagcacccagcuguccaccgacaccggcguggagcacgugacguucuucaucuacaacaagaucgucgacgagcccgaggagcacgugcagauccacaccaucgacgggagcagcggcguggucaaccccgugauggagccgaucuacgacgagcccaccaccacgaccuccgugccccugugaggacuagucccuguucccagagcccacuuuuuuuucuuuuuuugaaauaaaauagccugucuuucagaucucaaaggcucuuuucagagccaccaaaaaaaaaaaaaaaaaaaaaaaaaaaaaaaaaaaaaaaaaaaaaaaaaaaaaaaaaaaaaaaaaaaaaaaaaaaaaaaaaaaaaaaaaaaaaaaaaaaaa

SEQ ID NO: 20625 - RNA, 1100 nt, Artificial Sequence
  SARS-CoV-2__MT750475.1__ORF3a protein mRNA gc
aggagagucccgcagucggcguccagcggcucugcuuguucgugugugugucguugcaggccuuauucaagcuuaccauggaccuguucaugcgcaucuucaccaucggcaccgugacgcucaagcagggggagaucaaggacgccacccccagcgacuucguccgggccaccgcgaccaucccgauccaggccucccugcccuucggcuggcugaucguggggguggcccuccuggccgucuuccagagcgccuccaagaucaucacgcugaagaagcgcuggcagcucgcgcugagcaagggcgugcacuucgugugcaaccugcuccugcuguucgucaccguguacucccaccuccugcugguggccgccgggcucgaggcccccuuccuguaccuguacgcgcucgucuacuuccugcagagcaucaacuucgugcggaucaucaugcgccuguggcucugcuggaagugccgguccaagaacccccugcuguacgacgccaacuacuuccucugcuggcacaccaacugcuacgacuacugcaucccguacaacagcgugaccuccagcaucgucaucacguccggcgacggcaccaccagccccaucuccgagcacgacuaccagaucgggggcuacaccgagaagugggagagcggggugaaggacugcgugguccugcacuccuacuucacgagcgacuacuaccagcuguacuccacccagcucagcaccgacaccggcguggagcacgugacguucuucaucuacaacaagaucgccgacgagcccgaggagcacguccagauccacaccaucgacggguccagcggcguggugaaccccgucauggagccgaucuacgacgagcccaccaccacgaccagcgugccccugugaggacuagucccuguucccagagcccacuuuuuuuucuuuuuuugaaauaaaauagccugucuuucagaucucaaaggcucuuuucagagccaccaaaaaaaaaaaaaaaaaaaaaaaaaaaaaaaaaaaaaaaaaaaaaaaaaaaaaaaaaaaaaaaaaaaaaaaaaaaaaaaaaaaaaaaaaaaaaaaaaaaaa

SEQ ID NO: 20626 - RNA, 1100 nt, Artificial Sequence
  SARS-CoV-2__MT740384.1__ORF3a protein mRNA gc
aggagagucccgcagucggcguccagcggcucugcuuguucgugugugugucguugcaggccuuauucaagcuuaccauggaccuguucaugcgcaucuucaccaucggcaccgugacgcucaagcagggggagaucaaggacgccacccccagcgacuucguccgggccaccgcgaccaucccgauccaggccucccugcccuucggcuggcugaucguggggguggcccuccuggccgucuuccagagcgccuccaagaucaucacgcugaagaagcgcuggcagcucgcgcugagcaagggcgugcacuucgugugcaaccugcuccugcuguucgucaccguguacucccaccuccugcugguggccgccgggcucgaggcccccuuccuguaccuguacgcgcucgucuacuuccugcagagcaucaacuucgugcggaucaucaugcgccuguggcucugcuggaagugccgguccaagaacccccugcuguacgacgccaacuacuuccucugcuggcacaccaacugcuacgacuacugcaucccguacaacagcgugaccuccagcaucgucaucacguccguggacggcaccaccagccccaucuccgagcacgacuaccagaucggcggguacaccgagaagugggagagcggcgugaaggacugcgucgugcugcacuccuacuucacgagcgacuacuaccagcuguacuccacccagcucagcaccgacaccgggguggagcacgucacguucuucaucuacaacaagaucguggacgagcccgaggagcacgugcagauccacaccaucgacggcuccagcggggucgugaaccccgugauggagccgaucuacgacgagcccaccaccacgaccagcgucccccugugaggacuagucccuguucccagagcccacuuuuuuuucuuuuuuugaaauaaaauagccugucuuucagaucucaaaggcucuuuucagagccaccaaaaaaaaaaaaaaaaaaaaaaaaaaaaaaaaaaaaaaaaaaaaaaaaaaaaaaaaaaaaaaaaaaaaaaaaaaaaaaaaaaaaaaaaaaaaaaaaaaaaa

SEQ ID NO: 20627 - RNA, 1100 nt, Artificial Sequence
  SARS-CoV-2__MT740401.1__ORF3a protein mRNA gc
aggagagucccgcagucggcguccagcggcucugcuuguucgugugugugucguugcaggccuuauucaagcuuaccauggaccuguucaugcgcaucuucaccaucggcaccgugacgcucaagcagggggagaucaaggacgccacccccagcgacuucguccgggccaccgcgaccaucccgauccaggccucccugcccuucggcuggcugaucguggggguggcccuccuggccgucuuccagagcgccuccaagaucaucacgcugaagaagcgcuggcagcucgcgcugagcaagggcgugcacuucgugugcaaccugcuccugcuguucgucaccguguacucccaccuccugcugguggccgccgggcucgaggcccccuuccuguaccuguacgcgcucgucuacuuccugcagagcaucaacuucgugcggaucaucaugcgccuguggcucugcuggaagugccgguccaagaacccccugcuguacgacgccaacuacuuccucugcuggcacaccaacugcuacgacuacugcaucccguacaacagcgugaccuccagcaucgucaucacguccggcgacggcaccaccagccccaucuccgagcacgacuaccagaucgggggcuacaccgagaagugggagagcggggugaaggacugcgugguccugcacuccuacuucacgagcgacuacuaccagcuguacuccacccagcucaacaccgacaccggcguggagcacgugacguucuucaucuacaacaagaucgucgacgagcccgaggagcacgugcagauccacaccaucgacgggagcuccggcguggucaaccccgugauggagccgaucuacgacgagcccaccaccacgaccagcgugccccugugaggacuagucccuguucccagagcccacuuuuuuuucuuuuuuugaaauaaaauagccugucuuucagaucucaaaggcucuuuucagagccaccaaaaaaaaaaaaaaaaaaaaaaaaaaaaaaaaaaaaaaaaaaaaaaaaaaaaaaaaaaaaaaaaaaaaaaaaaaaaaaaaaaaaaaaaaaaaaaaaaaaaa

SEQ ID NO: 20628 - RNA, 1100 nt, Artificial Sequence
  SARS-CoV-2__MT740438.1__ORF3a protein mRNA gc
aggagagucccgcagucggcguccagcggcucugcuuguucgugugugugucguugcaggccuuauucaagcuuaccauggaccuguucaugcgcaucuucaccaucggcaccgugacgcucaagcagggggagaucaaggacgccacccccagcgacuucguccgggccaccgcgaccaucccgauccaggccucccugcccuucggcuggcugaucguggggaucgcccuccuggccguguuccagagcgccuccaagaucaucacgcugaagaagcgcuggcagcucgcgcugagcaagggcguccacuucgugugcaaccugcuccugcuguucgugaccgucuacucccaccuccugcugguggccgccgggcucgaggugcccuuccuguaccuguacgcccucgucuacuuccugcagagcaucaacuucgugcggaucaucaugcgccuguggcucugcuggaagugccgguccaagaacccccugcuguacgacgcgaacuacuuccucugcuggcacaccaacugcuacgacuacugcaucccguacaacagcgugaccuccagcaucgucaucacguccggcgacggcaccaccagccccaucuccgagcacgacuaccagaucgggggcuacaccgagaagugggagagcggggugaaggacugcgugguccugcacuccuacuucacgagcgacuacuaccagcuguacuccacccagcucagcaccgacaccggcguggagcacgugacguucuucaucuacaacaagaucgucgacgagcccgaggagcacgugcagauccacaccaucgacggguccagcggcguggucaaccccgugauggagccgaucuacgacgagcccaccaccacgaccagcgugccccugugaggacuagucccuguucccagagcccacuuuuuuuucuuuuuuugaaauaaaauagccugucuuucagaucucaaaggcucuuuucagagccaccaaaaaaaaaaaaaaaaaaaaaaaaaaaaaaaaaaaaaaaaaaaaaaaaaaaaaaaaaaaaaaaaaaaaaaaaaaaaaaaaaaaaaaaaaaaaaaaaaaaaa

SEQ ID NO: 20629 - RNA, 1100 nt, Artificial Sequence
  SARS-CoV-2__MT740478.1__ORF3a protein mRNA gc
aggagagucccgcagucggcguccagcggcucugcuuguucgugugugugucguugcaggccuuauucaagcuuaccauggaccuguucaugcgcaucuucaccaucggcaccgugacgcucaagcagggggagaucaaggacgccacccccagcgacuucguccgggccaccgcgaccaucccgaucgaggccucccugcccuucggcuggcugaucguggggguggcccuccuggccgucuuccagagcgccuccaagaucaucacgcugaagaagcgcuggcagcucgcgcugagcaagggcguguacuucgugugcaaccugcuccugcuguucgucaccguguacucccaccuccugcugguggccgccgggcucgaggcccccuuccuguaccuguacgcgcucgucuacuuccugcagagcaucaacuucgugcggaucaucaugcgccuguggcucugcuggaagugccgguccaagaacccccugcuguacgacgccaacuacuuccucugcuggcacaccaacugcuacgacuacugcaucccguacaacagcgugaccuccagcaucgucaucacguccggcgacggcaccaccagccccaucuccgagcacgacuaccagaucgggggcuacaccgagaagugggagagcggggugaaggacugcgugguccugcacuccuacuucacgagcgacuacuaccagcuguacuccacccagcucagcaccgacaccggcguggagcacgugacguucuucaucuacaacaagaucgucgacgagcccgaggagcacgugcagauccacaccaucgacggguccagcggcguggucaaccccgugauggagccgaucuacgacgagcccaccaccacgaccagcgugccccugugaggacuagucccuguucccagagcccacuuuuuuuucuuuuuuugaaauaaaauagccugucuuucagaucucaaaggcucuuuucagagccaccaaaaaaaaaaaaaaaaaaaaaaaaaaaaaaaaaaaaaaaaaaaaaaaaaaaaaaaaaaaaaaaaaaaaaaaaaaaaaaaaaaaaaaaaaaaaaaaaaaaaa

SEQ ID NO: 20630 - RNA, 1100 nt, Artificial Sequence
  SARS-CoV-2__MT740485.1__ORF3a protein mRNA gc
aggagagucccgcagucggcguccagcggcucugcuuguucgugugugugucguugcaggccuuauucaagcuuaccauggaccuguucaugcgcaucuucaccaucggcaccgugacgcucaagcagggggagaucaaggacgccacccccagcgacuucguccgggccaccgcgaccaucccgauccaggccucccugcccuucggcuggcugaucguggggguggcccuccugagcgucuuccacuccgccagcaagaucaucacgcugaagaagcgcuggcagcucgcccuguccaagggcgugcacuucgugugcaaccugcuccugcuguucgucaccguguacagccaccuccugcugguggcggccgggcucgaggcccccuuccuguaccuguacgcccucgucuacuuccugcaguccaucaacuucgugcggaucaucaugcgccuguggcucugcuggaagugccggagcaagaacccccugcuguacgacgcgaacuacuuccucugcuggcacaccaacugcuacgacuacugcaucccguacaacuccgugaccagcuccaucgucaucacgagcggcgacggcaccaccucccccaucagcgagcacgacuaccagaucgggggcuacaccgagaagugggaguccggggugaaggacugcgugguccugcacagcuacuucacguccgacuacuaccagcuguacagcacccagcucuccaccgacaccggcguggagcacgugacguucuucaucuacaacaagaucgucgacgagcccgaggagcacgugcagauccacaccaucgacgggagcagcggcguggucaaccccgugauggagccgaucuacgacgagcccaccaccacgaccuccgugccccugugaggacuagucccuguucccagagcccacuuuuuuuucuuuuuuugaaauaaaauagccugucuuucagaucucaaaggcucuuuucagagccaccaaaaaaaaaaaaaaaaaaaaaaaaaaaaaaaaaaaaaaaaaaaaaaaaaaaaaaaaaaaaaaaaaaaaaaaaaaaaaaaaaaaaaaaaaaaaaaaaaaaaa

SEQ ID NO: 20631 - RNA, 1100 nt, Artificial Sequence
  SARS-CoV-2__MT740717.1__ORF3a protein mRNA gc
aggagagucccgcagucggcguccagcggcucugcuuguucgugugugugucguugcaggccuuauucaagcuuaccauggaccuguucaugcgcaucuucaccaucggcaccgugacgcucaagcagggggagaucaaggacgccacccccagcgacuucguccgggccaccgcgaccaucccgauccaggccucccugcccuucggcuggcugaucguggggguggcccuccuggccgucuuccacagcgccuccaagaucaucacgcugaagaagcgcuggcagcucgcgcugagcaagggcgugcacuucgugugcaaccugcuccugcuguucgucaccguguacucccaccuccugcugguggccgccgggcucgaggcccccuuccuguaccuguacgcgcucgucuacuuccugcagagcaucaacuucgugcggaucaucaugcgccuguggcucugcuggaagugccuguccaagaacccccugcucuacgacgccaacuacuuccugugcuggcacaccaacugcuacgacuacugcaucccguacaacagcgugaccuccagcaucgucaucacguccggcgacggcaccaccagccccaucuccgagcacgacuaccagaucgggggcuacaccgagaagugggagagcggggugaaggacugcgugguccugcacuccuacuucacgagcgacuacuaccagcucuacuccacccagcugagcaccgacaccggcguggagcacgugacguucuucaucuacaacaagaucgucgacgagcccgaggagcacgugcagauccacaccaucgacggguccagcggcguggucaaccccgugauggagccgaucuacgacgagcccaccaccacgaccagcgugccccugugaggacuagucccuguucccagagcccacuuuuuuuucuuuuuuugaaauaaaauagccugucuuucagaucucaaaggcucuuuucagagccaccaaaaaaaaaaaaaaaaaaaaaaaaaaaaaaaaaaaaaaaaaaaaaaaaaaaaaaaaaaaaaaaaaaaaaaaaaaaaaaaaaaaaaaaaaaaaaaaaaaaaa

SEQ ID NO: 20632 - RNA, 1100 nt, Artificial Sequence
  SARS-CoV-2__MT740923.1__ORF3a protein mRNA gc
aggagagucccgcagucggcguccagcggcucugcuuguucgugugugugucguugcaggccuuauucaagcuuaccauggaccuguucaugcgcaucuucaccaucggcaccgugacgcucaagcagggggagaucaaggacgccacccccagcgacuucguccgggccaccgcgaccaucccgauccaggccucccugcccuucggcuggcugaucguggggguggcccuccuggccgucuuccagagcgccuccaagaucaucacgcugaagaagcgcuggcagcucgcgcugagcaagggcgugcacuucgugugcaaccugcuccugcuguucgucaccguguacucccaccuccugcugguggccgccgggcucgaggcccccuuccuguaccuguacgcgcucgucuacuuccugcagagcaucaacuucgugcggaucaucaugcgccuguggcucugcuggaagugccgguccaagaacccccugcuguacgacgccaacuacuuccucugcuggcacaucaacugcuacgacuacugcaucccguacaacagcgugaccuccagcaucgucaucaccuccggcgacggcacgaccagccccaucuccgagcacgacuaccagaucgggggcuacaccgagaagugggagagcggggugaaggacugcgugguccugcacuccuacuucaccagcgacuacuaccagcuguacuccacgcagcucagcaccgacaccggcguggagcacgugaccuucuucaucuacaacaagaucgucgacgagcccgaggagcacgugcagauccacacgaucgacggguccagcggcguggucaaccccgugauggagccgaucuacgacgagcccaccaccaccacgagcgugccccugugaggacuagucccuguucccagagcccacuuuuuuuucuuuuuuugaaauaaaauagccugucuuucagaucucaaaggcucuuuucagagccaccaaaaaaaaaaaaaaaaaaaaaaaaaaaaaaaaaaaaaaaaaaaaaaaaaaaaaaaaaaaaaaaaaaaaaaaaaaaaaaaaaaaaaaaaaaaaaaaaaaaaa

SEQ ID NO: 20633 - RNA, 1100 nt, Artificial Sequence
  SARS-CoV-2__MT734046.1__ORF3a protein mRNA gc
aggagagucccgcagucggcguccagcggcucugcuuguucgugugugugucguugcaggccuuauucaagcuuaccauggaccuguucaugcgcaucuucaccaucggcaccgugacgcucaagcagggggagaucaaggacgccacccccagcgacuucguccgggccaccgcgaccaucccgauccaggccucccugcccuucggcuggcugaucguggggguggcccuccuggccgucuuccagagcgccuccaagaucaucacgcugaagaagcgcuggcagcucgcgcugagcaagggcgugcacuucgugugcaaccugcuccugcuguucgucaccguguacucccaccuccugcugguggccagcgggcucgaggcccccuuccuguaccuguacgcccucgucuacuuccugcaguccaucaacuucgugcggaucaucaugcgccuguggcucugcuggaagugccggagcaagaacccccugcuguacgacgcgaacuacuuccucugcuggcacaccaacugcuacgacuacugcaucccguacaacuccgugaccagcuccaucgucaucacgagcggcgacggcaccaccucccccaucagcgagcacgacuaccagaucgggggcuacaccgagaagugggaguccggggugaaggacugcgugguccugcacagcuacuucacguccgacuacuaccagcuguacagcacccagcucuccaccgacaccggcguggagcacgugacguucuucaucuacaacaagaucgucgacgagcccgaggagcacgugcagauccacaccaucgacgggagcagcggcguggucaaccccgugauggagccgaucuacgacgagcccaccaccacgaccuccgugccccugugaggacuagucccuguucccagagcccacuuuuuuuucuuuuuuugaaauaaaauagccugucuuucagaucucaaaggcucuuuucagagccaccaaaaaaaaaaaaaaaaaaaaaaaaaaaaaaaaaaaaaaaaaaaaaaaaaaaaaaaaaaaaaaaaaaaaaaaaaaaaaaaaaaaaaaaaaaaaaaaaaaaaa

SEQ ID NO: 20634 - RNA, 1100 nt, Artificial Sequence
  SARS-CoV-2__MT706205.1__ORF3a protein mRNA gc
aggagagucccgcagucggcguccagcggcucugcuuguucgugugugugucguugcaggccuuauucaagcuuaccauggaccuguucaugcgcaucuucaccaucggcaccgugacgcucaagcagggggagaucaaggacgccacccccagcgacuucguccgggccaccgcgaccaucccgauccaggccucccugcccuucggcuggcugaucguggggguggcccuccuggccgucuuccacagcgccuccaagaucaucacgcugaagaagcgcuggcagcucgcgcugagcaagggcgugcacuucgugugcaaccugcuccugcuguucgucaccguguacucccaccuccugcugguggccaccgggcucgaggcccccuuccuguaccuguacgcccucgucuacuuccugcagagcaucaacuucgugcggaucaucaugcgccuguggcucugcuggaagugccgguccaagaacccccugcuguacgacgcgaacuacuuccucugcuggcacaccaacugcuacgacuacugcaucccguacaacagcgugacguccagcaucgucaucaccuccggcgacggcaccaccagccccaucuccgagcacgacuaccagaucgggggcuacacggagaagugggagagcggggugaaggacugcgugguccugcacuccuacuucaccagcgacuacuaccagcuguacuccacccagcucagcaccgacacgggcguggagcacgugaccuucuucaucuacaacaagaucgucgacgagcccgaggagcacgugcagauccacaccaucgacggguccagcggcguggucaaccccgugauggagccgaucuacgacgagcccaccacgaccaccagcgugccccugugaggacuagucccuguucccagagcccacuuuuuuuucuuuuuuugaaauaaaauagccugucuuucagaucucaaaggcucuuuucagagccaccaaaaaaaaaaaaaaaaaaaaaaaaaaaaaaaaaaaaaaaaaaaaaaaaaaaaaaaaaaaaaaaaaaaaaaaaaaaaaaaaaaaaaaaaaaaaaaaaaaaaa

SEQ ID NO: 20635 - RNA, 1100 nt, Artificial Sequence
  SARS-CoV-2__MT706248.1__ORF3a protein mRNA gc
aggagagucccgcagucggcguccagcggcucugcuuguucgugugugugucguugcaggccuuauucaagcuuaccauggaccuguucaugcgcaucuucaccaucggcaccgugacgcucaagcagggggagaucaaggacgccacccccagcgacuucguccgggccaccgcgaccaucccgauccaggccucccugcccuucggcuggcugaucguggggguggcccuccuggccgucuuccagagcgccuccaagaucaucacgcugaagaagcgcuggcagcucgcgcugagcaagggcgugcacuucgugugcaaccugcuccugcuguucgucaccguguacucccaccuccugcugguggccgccgggcucgaggcccccuuccuguaccuguacgcgcucgucuacuuccugcagagcaucaacuucgugcggaucaucaugcgccuguggcucugcuggaagugccgguccaagaacccccugcuguacgacgccaacuacuuccucugcuggcacaccaacugcuacgacuacugcaucccguacaacagcgugaccuccagcaucgucaucacguccggcgacggcaccaccagccccaucuccgagcacgacuaccagaucgggggcuacaccgagaagugggagagcggggugaaggacugcgugguccugcacuccuacuucacgagcgacuacuaccagcuguacuccacccagcucagcaccgacaccggcguggagcacgugacguucuucaucuacaacaagaucgucgacgagcccgaggagcacgugcagauccacaccaucgacggguccagcggcguggucaaccccgugauggagccgaucuacgacgagcugaccaccacgaccagcgugccccugugaggacuagucccuguucccagagcccacuuuuuuuucuuuuuuugaaauaaaauagccugucuuucagaucucaaaggcucuuuucagagccaccaaaaaaaaaaaaaaaaaaaaaaaaaaaaaaaaaaaaaaaaaaaaaaaaaaaaaaaaaaaaaaaaaaaaaaaaaaaaaaaaaaaaaaaaaaaaaaaaaaaaa

SEQ ID NO: 20636 - RNA, 1100 nt, Artificial Sequence
  SARS-CoV-2__MT706263.1__ORF3a protein mRNA gc
aggagagucccgcagucggcguccagcggcucugcuuguucgugugugugucguugcaggccuuauucaagcuuaccauggaccuguucaugcgcaucuucaccaucggcaccgugacgcucaagcagggggagaucaaggacgccacccccagcgacuucguccgggccaccgcgaccaucccgauccaggccucccugcccuucggcuggcugaucguggggguggcccuccuggccgucuuccagagcgccuccaagaucaucacgcugaagaagcgcuggcagcucgcgcugagcaagggcgugcacuucgugugcaaccugcuccugcuguucgucaccguguacucccaccuccugcugguggccgccgggcucgaggcccccuuccuguaccuguacgcgcucgucuacuuccugcagagcaucaacuucgugcggaucaucaugcgccuguggcucugcuggaagugccgguccaagaacccccugcuguacgacgccaacuacuuccucugcuggcacaccaacugcuacgacuacugcaucccguacaacagcgugaccuccagcaucgucaucacguccggcgacggcaccaccagccccaucuccgagcacgacuaccagaucgggggcuacaccgagaagugggagagcgggaucaaggacugcguggugcugcacuccuacuucacgagcgacuacuaccagcuguacuccacccagcucagcaccgacaccggcgucgagcacgugacguucuucaucuacaacaagaucguggacgagcccgaggagcacguccagauccacaccaucgacggguccagcggcguggugaaccccgucauggagccgaucuacgacgagcccaccaccacgaccagcgugccccugugaggacuagucccuguucccagagcccacuuuuuuuucuuuuuuugaaauaaaauagccugucuuucagaucucaaaggcucuuuucagagccaccaaaaaaaaaaaaaaaaaaaaaaaaaaaaaaaaaaaaaaaaaaaaaaaaaaaaaaaaaaaaaaaaaaaaaaaaaaaaaaaaaaaaaaaaaaaaaaaaaaaaa

SEQ ID NO: 20637 - RNA, 1100 nt, Artificial Sequence
  SARS-CoV-2__MT706326.1__ORF3a protein mRNA gc
aggagagucccgcagucggcguccagcggcucugcuuguucgugugugugucguugcaggccuuauucaagcuuaccauggaccuguucaugcgcaucuucaccaucggcaccgugacgcucaagcagggggagaucaaggacgccacccccagcgacuucguccgggccaccgcgaccaucccgauccaggccucccugcccuucggcuggcugaucguggggguggcccuccuggccgucuuccagagcgccuccaagaucaucacgcugaagaagcgcuggcagcucgcgcugagcaagggcgugcacuucgugugcaaccugcuccugcuguucgucaccguguacucccaccuccugcugguggccgccgggcucgaggcccccuuccuguaccuguacgcgcucgucuacuuccugcagagcaucaacuucgugcggaucaucaugcgccuguggcucugcuggaagugccuguccaagaacccccugcucuacgacgccaacuacuuccugugcuggcacaccaacugcuacgacuacugcaucccguacaacagcgugaccuccagcaucgucaucacguccggcgacggcaccaccagccccaucuccgagcacgacuaccagaucgggggcuacaccgagaagugggagagcggggugaaggacugcgugguccugcacuccuacuucacgagcgacuacuaccagcucuacuccacccagcugagcaccgacaccggcguggagcacgugacguucuucaucuacaacaagaucgucgacgagcccgaggagcacgugcagauccacaccaucgacggguccagcggcguggucaaccccgugauggagccgaucuacgacgagcccaccaccacgaccagcgugccccugugaggacuagucccuguucccagagcccacuuuuuuuucuuuuuuugaaauaaaauagccugucuuucagaucucaaaggcucuuuucagagccaccaaaaaaaaaaaaaaaaaaaaaaaaaaaaaaaaaaaaaaaaaaaaaaaaaaaaaaaaaaaaaaaaaaaaaaaaaaaaaaaaaaaaaaaaaaaaaaaaaaaaa

SEQ ID NO: 20638 - RNA, 1100 nt, Artificial Sequence
  SARS-CoV-2__MT706405.1__ORF3a protein mRNA gc
aggagagucccgcagucggcguccagcggcucugcuuguucgugugugugucguugcaggccuuauucaagcuuaccauggaccuguucaugcgcaucuucaccaucggcaccgugacgcucaagcagggggagaucaaggacgccacccccagcgacuucguccgggccaccgcgaccaucccgauccagacgucccugcccuucggcuggcugaucguggggguggcccuccuggccgucuuccagagcgccuccaagaucaucacccugaagaagcgcuggcagcucgcccugagcaagggcgugcacuucgugugcaaccugcuccugcuguucgucaccguguacucccaccuccugcugguggcggccgggcucgaggcccccuuccuguaccuguacgcccucgucuacuuccugcagagcaucaacuucgugcggaucaucaugcgccuguggcucugcuggaagugccgguccaagaacccccugcuguacgacgcgaacuacuuccucugcuggcacaccaacugcuacgacuacugcaucccguacaacagcgugacguccagcaucgucaucaccuccggcgacggcaccaccagccccaucuccgagcacgacuaccagaucgggggcuacacggagaagugggagagcggggugaaggacugcgugguccugcacuccuacuucaccagcgacuacuaccagcuguacuccacccagcucagcaccgacacgggcguggagcacgugaccuucuucaucuacaacaagaucgucgacgagcccgaggagcacgugcagauccacaccaucgacggguccagcggcguggucaaccccgugauggagccgaucuacgacgagcccaccacgaccaccagcgugccccugugaggacuagucccuguucccagagcccacuuuuuuuucuuuuuuugaaauaaaauagccugucuuucagaucucaaaggcucuuuucagagccaccaaaaaaaaaaaaaaaaaaaaaaaaaaaaaaaaaaaaaaaaaaaaaaaaaaaaaaaaaaaaaaaaaaaaaaaaaaaaaaaaaaaaaaaaaaaaaaaaaaaaa

SEQ ID NO: 20639 - RNA, 1100 nt, Artificial Sequence
  SARS-CoV-2__MT683408.1__ORF3a protein mRNA gc
aggagagucccgcagucggcguccagcggcucugcuuguucgugugugugucguugcaggccuuauucaagcuuaccauggaccuguucaugcgcaucuucaccaucggcaccgugauccucaagcagggggagaucaaggacgccacgcccagcgacuucguccgggccaccgcgaccaucccgauccaggccucccugcccuucggcuggcugaucguggggguggcccuccuggccgucuuccagagcgccuccaagaucaucacccugaagaagcgcuggcagcucgcgcugagcaagggcgugcacuucgugugcaaccugcuccugcuguucgucacgguguacucccaccuccugcugguggccgccgggcucgaggcccccuuccuguaccuguacgcgcucgucuacuuccugcagagcaucaacuucgugcggaucaucaugcgccuguggcucugcuggaagugccgguccaagaacccccugcuguacgacgccaacuacuuccucugcuggcacaccaacugcuacgacuacugcaucccguacaacagcgugaccuccagcaucgucaucaccuccggcgacggcacgaccagccccaucuccgagcacgacuaccagaucgggggcuacaccgagaagugggagagcggggugaaggacugcgugguccugcacuccuacuucaccagcgacuacuaccagcuguacuccacgcagcucagcaccgacaccggcguggagcacgugaccuucuucaucuacaacaagaucgucgacgagcccgaggagcacgugcagauccacacgaucgacggguccagcggcguggucaaccccgugauggagccgaucuacgacgagcccaccaccaccacgagcgugccccugugaggacuagucccuguucccagagcccacuuuuuuuucuuuuuuugaaauaaaauagccugucuuucagaucucaaaggcucuuuucagagccaccaaaaaaaaaaaaaaaaaaaaaaaaaaaaaaaaaaaaaaaaaaaaaaaaaaaaaaaaaaaaaaaaaaaaaaaaaaaaaaaaaaaaaaaaaaaaaaaaaaaaa

SEQ ID NO: 20640 - RNA, 1100 nt, Artificial Sequence
  SARS-CoV-2__MT679156.1__ORF3a protein mRNA gc
aggagagucccgcagucggcguccagcggcucugcuuguucgugugugugucguugcaggccuuauucaagcuuaccauggaccuguucaugcgcaucuucaccaucggcaccgugacgcucaagcagggggagaucaaggacgccacccccagcgacuucguccgggccaccgcgaccaucccgauccaggccucccugcccuucggcuggcugaucguggggguggcccuccuggccgucuuccacagcgccuccaagaucaucacguucaagaagcgcuggcagcuggcgcucagcaagggcgugcacuucgugugcaaccugcugcuccuguucgucaccguguacucccaccuccugcugguggccgccgggcuggaggcccccuuccucuaccuguacgcgcuggucuacuuccuccagagcaucaacuucgugcggaucaucaugcgccuguggcugugcuggaagugccgguccaagaacccccuccuguacgacgccaacuacuuccugugcuggcacaccaacugcuacgacuacugcaucccguacaacagcgugaccuccagcaucgucaucacguccggcgacggcaccaccagccccaucuccgagcacgacuaccagaucgggggcuacaccgagaagugggagagcggggugaaggacugcgugguccuccacuccuacuucacgagcgacuacuaccagcuguacuccacccagcugagcaccgacaccggcguggagcacgugacguucuucaucuacaacaagaucgucgacgagcccgaggagcacgugcagauccacaccaucgacggguccagcggcguggucaaccccgugauggagccgaucuacgacgagcccaccaccacgaccagcgugccccucugaggacuagucccuguucccagagcccacuuuuuuuucuuuuuuugaaauaaaauagccugucuuucagaucucaaaggcucuuuucagagccaccaaaaaaaaaaaaaaaaaaaaaaaaaaaaaaaaaaaaaaaaaaaaaaaaaaaaaaaaaaaaaaaaaaaaaaaaaaaaaaaaaaaaaaaaaaaaaaaaaaaaa

SEQ ID NO: 20641 - RNA, 1100 nt, Artificial Sequence
  SARS-CoV-2__MT611448.1__ORF3a protein mRNA gc
aggagagucccgcagucggcguccagcggcucugcuuguucgugugugugucguugcaggccuuauucaagcuuaccauggaccuguucaugcgcaucuucaccaucggcaccgugacgcucaagcagggggagaucaaggacgccacccccagcgacuucguccgggccaccgcgaccaucccgauccaggccucccugcccuucggcuggcugaucguggggguggcccuccuggccgucuuccacagcgccuccaagaucaucacgcugaagaagcgcuggcagcucgcgcugagcaagggcgugcacuucgugugcaaccugcuccugcuguucgucaccguguacucccaccuccugcugguggccgccgggcucgaggcccccuuccuguaccuguacgcgcucgucuacuuccugcagagcaucaacuucgugcggaucaucaugcgccuguggcucugcuggaagugccgguccaagaacccccugcuguacgacgccaacuacuuccucugcuggcacaccaacugcuacgacuacugcaucccguacaacagcgugaccuccagcaucgucaucacguccggcgacggcaccaccagccccaucuccgaguacgacuaccagaucgggggcuacaccgagaagugggagagcggggugaaggacugcgugguccugcacuccuacuucacgagcgacuacuaccagcuguacuccacccagcucagcaccgacaccggcguggagcacgugacguucuucaucuacaacaagaucgucgacgagcccgaggagcacgugcagauccacaccaucgacggguccagcggcguggucaaccccgugauggagccgaucuacgacgagcccaccaccacgaccagcgugccccugugaggacuagucccuguucccagagcccacuuuuuuuucuuuuuuugaaauaaaauagccugucuuucagaucucaaaggcucuuuucagagccaccaaaaaaaaaaaaaaaaaaaaaaaaaaaaaaaaaaaaaaaaaaaaaaaaaaaaaaaaaaaaaaaaaaaaaaaaaaaaaaaaaaaaaaaaaaaaaaaaaaaaa

SEQ ID NO: 20642 - RNA, 1100 nt, Artificial Sequence
  SARS-CoV-2__MT614601.1__ORF3a protein mRNA gc
aggagagucccgcagucggcguccagcggcucugcuuguucgugugugugucguugcaggccuuauucaagcuuaccauggaccuguucaugcgcaucuucaccaucggcaccgugacgcucaagcagggggagaucaaggacgccacccccagcgacuucguccgggccaccgcgaccaucccgauccaggccucccugcccuucggcuggcugaucguggggguggcccuccuggccuucuuccagagcgccuccaagaucaucacgcugaagaagcgcuggcagcucgcgcugagcaagggcguccacuucgugugcaaccugcuccugcuguucgugaccgucuacucccaccuccugcugguggccgccgggcucgaggcccccuuccuguaccuguacgcgcucguguacuuccugcagagcaucaacuucguccggaucaucaugcgccuguggcucugcuggaagugccgguccaagaacccccugcuguacgacgccaacuacuuccucugcuggcacaccaacugcuacgacuacugcaucccguacaacagcgugaccuccagcaucgugaucacgcugggcgacggcaccaccucccccaucagcgagcacgacuaccagaucgggggcuacaccgagaagugggaguccggggucaaggacugcguggugcugcacagcuacuucacguccgacuacuaccagcucuacagcacccagcuguccaccgacaccggcgucgagcacgugacguucuucaucuacaacaagaucguggacgagcccgaggagcacguccagauccacaccaucgacgggagcuccggcguggugaaccccgucauggagccgaucuacgacgagcccaccaccacgaccagcgugccccugugaggacuagucccuguucccagagcccacuuuuuuuucuuuuuuugaaauaaaauagccugucuuucagaucucaaaggcucuuuucagagccaccaaaaaaaaaaaaaaaaaaaaaaaaaaaaaaaaaaaaaaaaaaaaaaaaaaaaaaaaaaaaaaaaaaaaaaaaaaaaaaaaaaaaaaaaaaaaaaaaaaaaa

SEQ ID NO: 20643 - RNA, 1100 nt, Artificial Sequence
  SARS-CoV-2__MT675289.1__ORF3a protein mRNA gc
aggagagucccgcagucggcguccagcggcucugcuuguucgugugugugucguugcaggccuuauucaagcuuaccauggaccuguucaugcgcaucuucaccaucggcaccgugacgcucaagcagggggagaucaaggacgccacccccagcgacuucguccgggccaccgcgaccaucccgauccaggccucccugcccuucggcuggcugaucguggggguggcccuccuggccgucuuccagagcgccuccaagaucaucacgcugaagaagcgcuggcagcucgcgcugagcaagggcgugcacuucgugugcaaccugcuccugcuguucgccaccgucuacucccaccuccugcugguggccgccgggcucgaggcgcccuuccuguaccuguacgcccucguguacuuccugcagagcaucaacuucguccggaucaucaugcgccuguggcucugcuggaagugccgguccaagaacccccugcuguacgacgccaacuacuuccucugcuggcacaccaacugcuacgacuacugcaucccguacaacagcgugaccuccagcaucgugaucacguccggcgacggcaccaccagccccaucuccgagcacgacuaccagaucgggggcuacaccgagaagugggagagcggggucaaggacugcguggugcugcacuccuacuucacgagcgacuacuaccagcuguacuccacccagcucagcaccgacaccggcgucgagcacgugacguucuucaucuacaacaagaucguggacgagcccgaggagcacguccagauccacaccaucgacguguccagcgggguggucaaccccgugauggagccgaucuacgacgagcccaccaccacgaccagcgugccccugugaggacuagucccuguucccagagcccacuuuuuuuucuuuuuuugaaauaaaauagccugucuuucagaucucaaaggcucuuuucagagccaccaaaaaaaaaaaaaaaaaaaaaaaaaaaaaaaaaaaaaaaaaaaaaaaaaaaaaaaaaaaaaaaaaaaaaaaaaaaaaaaaaaaaaaaaaaaaaaaaaaaaa

SEQ ID NO: 20644 - RNA, 1100 nt, Artificial Sequence
  SARS-CoV-2__MT664169.1__ORF3a protein mRNA gc
aggagagucccgcagucggcguccagcggcucugcuuguucgugugugugucguugcaggccuuauucaagcuuaccauggaccuguucaugcgcaucuucaccaucggcaccgugacgcucaagcagggggagaucaaggacgccacccccagcgacuucguccgggccaccgcgaccaucccgauccaggccucccugcccuucggcuggcugaucguggggguggcccuccuggccgucuuccagagcgccuccaagaucaucacgcugaacaagcgcuggcagcucgcgcugagcaagggcgugcacuucgugugcaaccugcuccugcuguucgucaccguguacucccaccuccugcugguggccgccgggcucgaggcccccuuccuguaccuguacgcgcucgucuacuuccugcagagcaucaacuucgugcggaucaucaugcgccuguggcucugcuggaagugccgguccaagaacccccugcuguacgacgccaacuacuuccucugcuggcacaccaacugcuacgacuacugcaucccguacaacagcgugaccuccagcaucgucaucacguccggcgacggcaccaccagccccaucuccgagcacgacuaccagaucgggggcuacaccgagaagugggagagcggggugaaggacugcgugguccugcacuccuacuucacgagcgacuacuaccagcuguacuccacccagcucagcaccgacaccggcguggagcacgugacguucuucaucuacaacaagaucgucgacgagcccgaggagcacgugcagauccacaccaucgacggguccagcggcguggucaaccccgugauggagccgaucuacgacgagcccaccaccacgaccagcgugccccugugaggacuagucccuguucccagagcccacuuuuuuuucuuuuuuugaaauaaaauagccugucuuucagaucucaaaggcucuuuucagagccaccaaaaaaaaaaaaaaaaaaaaaaaaaaaaaaaaaaaaaaaaaaaaaaaaaaaaaaaaaaaaaaaaaaaaaaaaaaaaaaaaaaaaaaaaaaaaaaaaaaaaa

SEQ ID NO: 20645 - RNA, 1100 nt, Artificial Sequence
  SARS-CoV-2__MT653097.1__ORF3a protein mRNA gc
aggagagucccgcagucggcguccagcggcucugcuuguucgugugugugucguugcaggccuuauucaagcuuaccauggaccuguucaugcgcaucuucaccaucggcaccgugacgcucaagcagggggagaucaaggacgccacccccagcgacuucguccgggccaccgcgaccaucccgauccaggccucccugcccuucggcuggcugaucguggggguggcccuccuggccgucuuccagagcgccuccaagaucaucacgcugaagaagcgcuggcagcucgcgcugagcaagggcgugcacuucgugugcaaccugcuccugcuguucgucaccguguacucccaccuccugcugguggccgccgggcucgaggcccccuuccuguaccuguacgcgcucgucuacuuccugcagagcaucaacuucgugcggaucaucaugcgccuguggcucugcuggaagugccgguccaagaacccccugcuguacgacgccaacuacuuccucugcuggcacaccaacugcuacgacuacugcaucccguacaacagcgugaccuccagcaucgucaucacguccggcgacggcaccaccagccccaucuccgagcacgacuaccagaucgggggcuacaccgagaagugggagagcggggugaaggacugcgugguccugcacuccuacuucacgagcgacuacuaccagcuguacuccacccagcucagcaccgacaccggcguggagcacgugaucuucuucaucuacaacaagaucgucgacgagcccgaggagcacgugcagauccacacgaucgacggguccagcggcguggucaaccccgugauggagccgaucuacgacgagcccaccaccaccacgagcgugccccugugaggacuagucccuguucccagagcccacuuuuuuuucuuuuuuugaaauaaaauagccugucuuucagaucucaaaggcucuuuucagagccaccaaaaaaaaaaaaaaaaaaaaaaaaaaaaaaaaaaaaaaaaaaaaaaaaaaaaaaaaaaaaaaaaaaaaaaaaaaaaaaaaaaaaaaaaaaaaaaaaaaaaa

SEQ ID NO: 20646 - RNA, 1100 nt, Artificial Sequence
  SARS-CoV-2__MT655750.1__ORF3a protein mRNA gc
aggagagucccgcagucggcguccagcggcucugcuuguucgugugugugucguugcaggccuuauucaagcuuaccauggaccuguucaugcgcaucuucaccaucggcaccgugacgcucaagcagggggagaucaaggacgccacccccagcgacuucguccgggccaccgcgaccaucccgauccaggccucccugcccuucggcuggcugaucguggggguggcccuccuggccgucuuccagagcgccuccaagaucaucacgcugaagaagcgccggcagcucgcgcugagcaagggcgugcacuucgugugcaaccugcuccugcuguucgucaccguguacucccaccuccugcugguggccgccgggcucgaggcccccuuccuguaccuguacgcgcucgucuacuuccugcagagcaucaacuucgugcgcaucaucaugcggcuguggcucugcuggaagugccgcuccaagaacccccugcuguacgacgccaacuacuuccucugcuggcacaccaacugcuacgacuacugcaucccguacaacagcgugaccuccagcaucgucaucacguccggcgacggcaccaccagccccaucuccgagcacgacuaccagaucgggggcuacaccgagaagugggagagcggggugaaggacugcgugguccugcacuccuacuucacgagcgacuacuaccagcuguacuccacccagcucagcaccgacaccggcguggagcacgugacguucuucaucuacaacaagaucgucgacgagcccgaggagcacgugcagauccacaccaucgacggguccagcggcguggucaaccccgugauggagccgaucuacgacgagcccaccaccacgaccagcgugccccugugaggacuagucccuguucccagagcccacuuuuuuuucuuuuuuugaaauaaaauagccugucuuucagaucucaaaggcucuuuucagagccaccaaaaaaaaaaaaaaaaaaaaaaaaaaaaaaaaaaaaaaaaaaaaaaaaaaaaaaaaaaaaaaaaaaaaaaaaaaaaaaaaaaaaaaaaaaaaaaaaaaaaa

SEQ ID NO: 20647 - RNA, 1100 nt, Artificial Sequence
  SARS-CoV-2__MT646053.1__ORF3a protein mRNA gc
aggagagucccgcagucggcguccagcggcucugcuuguucgugugugugucguugcaggccuuauucaagcuuaccauggaccuguucaugcgcaucuucaccaucggcaccgugacgcucaagcgcggggagaucaaggacgccacccccagcgacuucguccgggccaccgcgaccaucccgauccaggccucccugcccuucggcuggcugaucguggggguggcccuccuggccgucuuccagagcgccuccaagaucaucacgcugaagaagcgguggcagcucgcgcugagcaagggcgugcacuucgugugcaaccugcuccugcuguucgucaccguguacucccaccuccugcugguggccgccgggcucgaggcccccuuccuguaccuguacgcgcucgucuacuuccugcagagcaucaacuucgugcgcaucaucaugcggcuguggcucugcuggaagugccgcuccaagaacccccugcuguacgacgccaacuacuuccucugcuggcacaccaacugcuacgacuacugcaucccguacaacagcgugaccuccagcaucgucaucacguccggcgacggcaccaccagccccaucuccgagcacgacuaccagaucgggggcuacaccgagaagugggagagcggggugaaggacugcgugguccugcacuccuacuucacgagcgacuacuaccagcuguacuccacccagcucagcaccgacaccggcguggagcacgugacguucuucaucuacaacaagaucgucgacgagcccgaggagcacgugcagauccacaccaucgacggguccagcggcguggucaaccccgugauggagccgaucuacgacgagcccaccaccacgaccagcgugccccugugaggacuagucccuguucccagagcccacuuuuuuuucuuuuuuugaaauaaaauagccugucuuucagaucucaaaggcucuuuucagagccaccaaaaaaaaaaaaaaaaaaaaaaaaaaaaaaaaaaaaaaaaaaaaaaaaaaaaaaaaaaaaaaaaaaaaaaaaaaaaaaaaaaaaaaaaaaaaaaaaaaaaa

SEQ ID NO: 20648 - RNA, 1100 nt, Artificial Sequence
  SARS-CoV-2__MT641689.1__ORF3a protein mRNA gc
aggagagucccgcagucggcguccagcggcucugcuuguucgugugugugucguugcaggccuuauucaagcuuaccauggaccuguucaugcgcaucuucaccaucggcaccgugacgcucaagcagggggagaucaaggacgccacccccagcgacuucguccgggccaccgcgaccaucccgauccaggccucccugcccuucggcuggcugaucguggggguggcccuccuggccgucuuccacagcgccuccaagaucaucacgcugaagaagcgcuggcagcucgcgcugagcaagggcgugcacuucgugugcaaccugcuccugcuguucgucaccguguacucccaccuccugcugguggccgccgggcucgaggcccccuuccuguaccuguacgcgcucgucuacuuccugcagagcaucaacuucgugcggaucaucaugcgccuguggcucugcuggaagugccgguccaagaacccccugcuguacgacgccaacuacuuccucugcuggcacaccaacugcuacgacuacugcaucccguacaacagcgugaccuccagcaucgucaucacguccggcgacggcaccaccagccccaucuccgagcacgacuaccagaucgggggcuacaccgagaagugggagagcggggugaaggacugcgugguccugcacuccuacuucacgagcgacuacuaccagcuguacuccacccagcucagcaccgacaccggcguggagcacgugacguucuucaucuacaacaagaucgucgacgagcccgaggagcacgugcagauccacaccaucgacggguccagcggcguggucaaccccgugauggagagcaucuacgacgagccgaccaccacgaccuccgugccccugugaggacuagucccuguucccagagcccacuuuuuuuucuuuuuuugaaauaaaauagccugucuuucagaucucaaaggcucuuuucagagccaccaaaaaaaaaaaaaaaaaaaaaaaaaaaaaaaaaaaaaaaaaaaaaaaaaaaaaaaaaaaaaaaaaaaaaaaaaaaaaaaaaaaaaaaaaaaaaaaaaaaaa

SEQ ID NO: 20649 - RNA, 1100 nt, Artificial Sequence
  SARS-CoV-2__MT641720.1__ORF3a protein mRNA gc
aggagagucccgcagucggcguccagcggcucugcuuguucgugugugugucguugcaggccuuauucaagcuuaccauggaccuguucaugcgcaucuucaccaucggcaccgugacgcucaagcagggggagaucaaggacgccacccccagcgacuucguccgggccaccgcgaccaucccgauccaggccucccugcccuucggcuggcugaucguggggguggcccuccuggccgucuuccacagcgccuccaagaucaucacgcugaagaagcgcuggcagcucgcgcugagccggggcgugcacuucgugugcaaccugcuccugcuguucgucaccguguacucccaccuccugcugguggccgccgggcucgaggcccccuuccuguaccuguacgcgcucgucuacuuccugcagagcaucaacuucgugcgcaucaucaugcggcuguggcucugcuggaagugccgcuccaagaacccccugcuguacgacgccaacuacuuccucugcuggcacaccaacugcuacgacuacugcaucccguacaacagcgugaccuccagcaucgucaucacguccggcgacggcaccaccagccccaucuccgagcacgacuaccagaucgggggcuacaccgagaagugggagagcggggugaaggacugcgugguccugcacuccuacuucacgagcgacuacuaccagcuguacuccacccagcucagcaccgacaccggcguggagcacgugacguucuucaucuacaacaagaucgucgacgagcccgaggagcacgugcagauccacaccaucgacggguccagcggcguggucaaccccgugauggagccgaucuacgacgagcccaccaccacgaccagcgugccccugugaggacuagucccuguucccagagcccacuuuuuuuucuuuuuuugaaauaaaauagccugucuuucagaucucaaaggcucuuuucagagccaccaaaaaaaaaaaaaaaaaaaaaaaaaaaaaaaaaaaaaaaaaaaaaaaaaaaaaaaaaaaaaaaaaaaaaaaaaaaaaaaaaaaaaaaaaaaaaaaaaaaaa

SEQ ID NO: 20650 - RNA, 1100 nt, Artificial Sequence
  SARS-CoV-2__MT641737.1__ORF3a protein mRNA gc
aggagagucccgcagucggcguccagcggcucugcuuguucgugugugugucguugcaggccuuauucaagcuuaccauggaccuguucaugcgcaucuucaccaucggcaccgugacgcucaagcagggggagaucaaggacgccacccccagcgacuucguccgggccaccgcgaccaucccgauccaggccucccugcccuucggcuggcugaucguggggguggcccuccuggccgucuuccagagcgccuccaagaucaucacgcugaagaagcgccuccagcuggcgcugagcaagggcgugcacuucgugugcaaccuccugcugcuguucgucaccguguacucccaccuccugcucguggccgccgggcuggaggcccccuuccuguaccucuacgcgcuggucuacuuccugcagagcaucaacuucgugcggaucaucaugcgccucuggcugugcuggaagugccgguccaagaacccccugcucuacgacgccaacuacuuccugugcuggcacaccaacugcuacgacuacugcaucccguacaacagcgugaccuccagcaucgucaucacguccggcgacggcaccaccagccccaucuccgagcacgacuaccagaucgggggcuacaccgagaagugggagagcggggugaaggacugcgugguccugcacuccuacuucacgagcgacuacuaccagcucuacuccacccagcugagcaccgacaccggcguggagcacgugacguucuucaucuacaacaagaucgucgacgagcccgaggagcacgugcagauccacaccaucgacguguccagcggggucgugaaccccgugauggagccgaucuacgacgagcccaccaccacgaccagcgucccccugugaggacuagucccuguucccagagcccacuuuuuuuucuuuuuuugaaauaaaauagccugucuuucagaucucaaaggcucuuuucagagccaccaaaaaaaaaaaaaaaaaaaaaaaaaaaaaaaaaaaaaaaaaaaaaaaaaaaaaaaaaaaaaaaaaaaaaaaaaaaaaaaaaaaaaaaaaaaaaaaaaaaaa

SEQ ID NO: 20651 - RNA, 1100 nt, Artificial Sequence
  SARS-CoV-2__MT641741.1__ORF3a protein mRNA gc
aggagagucccgcagucggcguccagcggcucugcuuguucgugugugugucguugcaggccuuauucaagcuuaccauggaccuguucaugcgcaucuucaccaucggcaccgugacgcucaagcagggggagaucaaggacgccacccccagcgacuucguccgggccaccgcgaccaucccgauccaggccucccugcccuucggcuggcugaucguggggguggcccuccuggccgucuuccagagcgccuccaagaucaucacgcugaagaagcgcuggcagcucgcgcugcccaagggcgugcacuucgugugcaaccugcuccugcuguucgucaccguguacagccaccuccugcugguggccgccgggcucgaggcccccuuccuguaccuguacgcgcucgucuacuuccugcaguccaucaacuucgugcggaucaucaugcgccuguggcucugcuggaagugccggagcaagaacccgcugcuguacgacgccaacuacuuccucugcuggcacaccaacugcuacgacuacugcauccccuacaacuccgugaccagcuccaucgucaucacgagcggcgacggcaccaccucccccaucagcgagcacgacuaccagaucgggggcuacaccgagaagugggaguccggggugaaggacugcgugguccugcacagcuacuucacguccgacuacuaccagcuguacagcacccagcucuccaccgacaccggcguggagcacgugacguucuucaucuacaacaagaucgucgacgagcccgaggagcacgugcagauccacaccaucgacgggagcuccggcguggucaacccggugauggagcccaucuacgacgagcccaccaccacgaccagcgugccccugugaggacuagucccuguucccagagcccacuuuuuuuucuuuuuuugaaauaaaauagccugucuuucagaucucaaaggcucuuuucagagccaccaaaaaaaaaaaaaaaaaaaaaaaaaaaaaaaaaaaaaaaaaaaaaaaaaaaaaaaaaaaaaaaaaaaaaaaaaaaaaaaaaaaaaaaaaaaaaaaaaaaaa

SEQ ID NO: 20652 - RNA, 1100 nt, Artificial Sequence
  SARS-CoV-2__MT642138.1__ORF3a protein mRNA gc
aggagagucccgcagucggcguccagcggcucugcuuguucgugugugugucguugcaggccuuauucaagcuuaccauggaccuguucaugcgcaucuucaccaucggcaccgugacgcucaagcagggggagaucaaggacgccacccccagcgacuucguccgggccaccgcgaccaucccgauccaggccucccugcccuucggcuggcugaucguggggguggcccuccuggccgucuuccacagcgccuccaagaucaucacgcugaagaagcgcuggcagcucgcgcugagcaagggcgugcacuucgugugcaaccugcuccugcuguucgucaccguguacucccaccuccugcugguggccgccgggcucgaggcccccuuccuguaccuguacgcgcucgucuacuuccugcagagcaucaacuucgugcggaucaucaugcgccuguggcucugcuggaagugccgguccaagaacccccugcuguacgacgccaacuacuuccucugcuggcacaccaacugcuacgacuacugcaucccguacaacagcgugaccuccagcaucgucaucacguccggcgacggcaccaccagccccaucuccgagcacgacuaccagaucgggggcuacaccgagaagcgcgagagcggggugaaggacugcgugguccugcacuccuacuucacgagcgacuacuaccagcuguacuccacccagcucagcaccgacaccggcguggagcacgugacguucuucaucuacaacaagaucgucgacgagcccgaggagcacgugcagauccacaccaucgacggguccagcggcguggucaaccccgugauggagccgaucuacgacgagcccaccaccacgaccagcgugccccugugaggacuagucccuguucccagagcccacuuuuuuuucuuuuuuugaaauaaaauagccugucuuucagaucucaaaggcucuuuucagagccaccaaaaaaaaaaaaaaaaaaaaaaaaaaaaaaaaaaaaaaaaaaaaaaaaaaaaaaaaaaaaaaaaaaaaaaaaaaaaaaaaaaaaaaaaaaaaaaaaaaaaa

SEQ ID NO: 20653 - RNA, 1100 nt, Artificial Sequence
  SARS-CoV-2__MT642186.1__ORF3a protein mRNA gc
aggagagucccgcagucggcguccagcggcucugcuuguucgugugugugucguugcaggccuuauucaagcuuaccauggaccuguucaugcgcaucuucaccaucggcaccgugacgcucaagcagggggagaucaaggacgccacccugagcgacuucguccgggccaccgcgaccauccccauccaggccucccugccguucggcuggcucaucguggggguggcccugcuggccgucuuccacagcgccuccaagaucaucacgcucaagaagcgcuggcagcuggcgcugagcaagggcgugcacuucgugugcaaccuccugcugcuguucgucaccguguacucccaccuccugcucguggccgccgggcuggaggcccccuuccuguaccucuacgcgcuggucuacuuccugcagagcaucaacuucgugcggaucaucaugcgccucuggcugugcuggaagugccgguccaagaacccccugcucuacgacgccaacuacuuccugugcuggcacaccaacugcuacgacuacugcauccccuacaacagcgugaccuccagcaucgucaucacguccggcgacggcaccaccagcccgaucuccgagcacgacuaccagaucgggggcuacaccgagaagugggagagcggggugaaggacugcgugguccugcacuccuacuucacgagcgacuacuaccagcucuacuccacccagcugagcaccgacaccggcguggagcacgugacguucuucaucuacaacaagaucgucgacgagcccgaggagcacgugcagauccacaccaucgacggguccagcggcguggucaaccccgugauggagcccaucuacgacgagccgaccaccacgaccagcgugccccugugaggacuagucccuguucccagagcccacuuuuuuuucuuuuuuugaaauaaaauagccugucuuucagaucucaaaggcucuuuucagagccaccaaaaaaaaaaaaaaaaaaaaaaaaaaaaaaaaaaaaaaaaaaaaaaaaaaaaaaaaaaaaaaaaaaaaaaaaaaaaaaaaaaaaaaaaaaaaaaaaaaaaa

SEQ ID NO: 20654 - RNA, 1100 nt, Artificial Sequence
  SARS-CoV-2__MT642305.1__ORF3a protein mRNA gc
aggagagucccgcagucggcguccagcggcucugcuuguucgugugugugucguugcaggccuuauucaagcuuaccauggaccuguucaugcgcaucuucaccaucggcaccgugacgcucaagcagggggagaucaaggacgccacccccagcgacuucguccgggccaccgcgaccaucccgauccaggccucccugcccuucggcuggcugaucguggggguggcccuccuggccgucuuccagagcgccuccaagaucaucacgcugaagaagcgcuggcagcucgcgcugagcaagggcgugcacuucgugugcaaccugcuccugcuguucgccaccgucuacucccaccuccugcugguggccgccgggcucgaggcgcccuuccuguacuucuacgcccugguguacuuccuccagagcaucaacuucguccggaucaucaugcgccuguggcugugcuggaagugccgguccaagaacccccuccuguacgacgccaacuacuuccugugcuggcacaccaacugcuacgacuacugcaucccguacaacagcgugaccuccagcaucgugaucacgcucggcgacggcaccaccucccccaucagcgagcacgacuaccagaucgggggcuacaccgagaagugggaguccggggucaaggacugcguggugcugcacagcuacuucacguccgacuacuaccagcuguacagcacccagcucuccaccgacaccggcgucgagcacgugacguucuucaucuacaacaagaucguggacgagcccgaggagcacguccagauccacaccaucgacgugagcuccgggguggucaaccccgugauggagccgaucuacgacgagcccaccaccacgaccagcgugccccugugaggacuagucccuguucccagagcccacuuuuuuuucuuuuuuugaaauaaaauagccugucuuucagaucucaaaggcucuuuucagagccaccaaaaaaaaaaaaaaaaaaaaaaaaaaaaaaaaaaaaaaaaaaaaaaaaaaaaaaaaaaaaaaaaaaaaaaaaaaaaaaaaaaaaaaaaaaaaaaaaaaaaa

SEQ ID NO: 20655 - RNA, 1100 nt, Artificial Sequence
  SARS-CoV-2__MT642307.1__ORF3a protein mRNA gc
aggagagucccgcagucggcguccagcggcucugcuuguucgugugugugucguugcaggccuuauucaagcuuaccauggaccuguucaugcgcaucuucaccaucggcaccgugacgcucaagcagggggagaucaaggacgccacccccagcgacuucguccgggccaccgcgaccaucccgauccaggccuccauccccuucggcuggcugaucguggggguggcccugcucgccgucuuccagagcgccuccaagaucaucacgcugaagaagcgcuggcagcuggcgcucagcaagggcgugcacuucgugugcaaccugcugcuccuguucgucaccguguacucccaccuccugcugguggccgccgggcuggaggcccccuuccucuaccuguacgcgcuggucuacuuccuccagagcaucaacuucgugcggaucaucaugcgccuguggcugugcuggaagugccgguccaagaacccccuccuguacgacgccaacuacuuccugugcuggcacaccaacugcuacgacuacugcaucccguacaacagcgugaccuccagcaucgucaucacguccggcgacggcaccaccagccccaucuccgagcacgacuaccagaucgggggcuacaccgagaagugggagagcggggugaaggacugcgugguccuccacuccuacuucacgagcgacuacuaccagcuguacuccacccagcugagcaccgacaccggcguggagcacgugacguucuucaucuacaacaagaucgucgacgagcccgaggagcacgugcagauccacaccaucgacggguccagcggcguggucaaccccgugauggagccgaucuacgacgagcccaccaccacgaccagcgugccccucugaggacuagucccuguucccagagcccacuuuuuuuucuuuuuuugaaauaaaauagccugucuuucagaucucaaaggcucuuuucagagccaccaaaaaaaaaaaaaaaaaaaaaaaaaaaaaaaaaaaaaaaaaaaaaaaaaaaaaaaaaaaaaaaaaaaaaaaaaaaaaaaaaaaaaaaaaaaaaaaaaaaaa

SEQ ID NO: 20656 - RNA, 1100 nt, Artificial Sequence
  SARS-CoV-2__MT642356.1__ORF3a protein mRNA gc
aggagagucccgcagucggcguccagcggcucugcuuguucgugugugugucguugcaggccuuauucaagcuuaccauggaccuguucaugcgcaucuucaccaucggcaccgugacgcucaagcagggggagaucaaggacgccacccccagcgacuucguccgggccaccgcgaccaucccgauccaggccucccugcccuucggcuggcugaucguggggguggcccuccuggccgucuuccagagcgccuccaagaucaucacgcugaagaagcgcuggcagcucgcgcugagcaagggcgugcacuucgugugcaaccugcuccugcuguucgucaccguguacucccaccuccugcugguggccgccgggcucgaggcccccuuccuguaccuguacgcgcucgucuacuuccugcagagcaucaacuucgugcggaucaucaugcgccuguggcucugcuggaagugccgguccaagaacccccugcuguacgacgccaacuacuuccucugcuggcacaccaacugcuacgacuacugcaucccguacaacagcgugaccuccagcaucgucaucacguccggcgacggcaccaccagccccaucuccgagcacgacuaccagaucgggggcuacaccgagaagugggagagcggggugaaggacugcgugguccugcacuccuacuucacgagcgacuacuaccagcuguacuccacccgccucagcaccgacaccggcguggagcacgugacguucuucaucuacaacaagaucgucgacgagcccgaggagcacgugcagauccacaccaucgacggguccagcggcguggucaaccccgugauggagccgaucuacgacgagcccaccaccacgaccagcgugccccugugaggacuagucccuguucccagagcccacuuuuuuuucuuuuuuugaaauaaaauagccugucuuucagaucucaaaggcucuuuucagagccaccaaaaaaaaaaaaaaaaaaaaaaaaaaaaaaaaaaaaaaaaaaaaaaaaaaaaaaaaaaaaaaaaaaaaaaaaaaaaaaaaaaaaaaaaaaaaaaaaaaaaa

SEQ ID NO: 20657 - RNA, 1100 nt, Artificial Sequence
  SARS-CoV-2__MT642412.1__ORF3a protein mRNA gc
aggagagucccgcagucggcguccagcggcucugcuuguucgugugugugucguugcaggccuuauucaagcuuaccauggaccuguucaugcgcaucuucaccaucggcaccgugacgcucaagcagggggagaucaaggacgccacccccagcgacuucguccgggccaccgcgaccaucccgauccaggccucccugcccuucggcuggcugaucguggggguggcccuccuggccgucuuccagagcgccuccaagaucaucacgcugaagaagcgcuggcagcucgcgcugagcaagggcgugcacuucgugugcaaccugcuccugcuguucgccaccgucuacucccaccuccugcugguggccgccgggcucgaggcgcccuuccuguaccuguacgcccucguguacuuccugcagagcaucaacuucguccggaucaucaugcgccuguggcucugcuggaagugccgguccaagaacccccugcuguacgacgccaacuacuuccucugcuggcacaccaacugcuacgacuacugcaucccguacaacagcgugaccuccagcaucgugaucacgcugggcgacggcaccaccucccccaucagcgagcacgacuaccagaucgggggcuacaccgagaagugggaguccggggucaaggacugcguggugcugcacagcuacuucacguccgacuacuaccagcucuacagcacccagcuguccaccgacaccggcgucgagcacgugacguucuucaucuacaacaagaucguggacgagcccgaggagcacguccagauccacaccaucgacgugagcuccgggguggucaaccccgugauggagccgaucuacgacgagcccaccaccacgaccagcgugccccugugaggacuagucccuguucccagagcccacuuuuuuuucuuuuuuugaaauaaaauagccugucuuucagaucucaaaggcucuuuucagagccaccaaaaaaaaaaaaaaaaaaaaaaaaaaaaaaaaaaaaaaaaaaaaaaaaaaaaaaaaaaaaaaaaaaaaaaaaaaaaaaaaaaaaaaaaaaaaaaaaaaaaa

SEQ ID NO: 20658 - RNA, 1100 nt, Artificial Sequence
  SARS-CoV-2__MT635653.1__ORF3a protein mRNA gc
aggagagucccgcagucggcguccagcggcucugcuuguucgugugugugucguugcaggccuuauucaagcuuaccauggaccuguucaugcgcaucuucaccaucggcaccgugacgcucaagcagggggagaucaaggacgccacccccagcgacuucguccgggccaccgcgaccaucccgauccaggccucccugcccuucggcuggcugaucguggggguggcccuccuggccgucuuccacagcgccuccaagaucaucacgcugaagaagcgcuggcagcucgcgcugagcaagggcgugcacuucgugugcaaccugcuccugcuguucgucaccguguacucccaccuccugcugguggccgccgggcucgaggcccccuuccuguaccuguacgcgcucgucuacuuccugcagagcaucaacuucgugcggaucaucaugcgccuguggcucugcuggaagugccgguccaagaacccccugcuguacgacgccaacuacuuccucugcuggcacaccaacugcuacgacuacugcaucccguacaacagcgugaccuccagcaucgucaucacguccggcgacggcaccaccagccccaucuccgagcacgacuaccacaucgggggcuacaccgagaagugggagagcggggugaaggacugcgugguccugcacuccuacuucacgagcgacugcuaccagcuguacuccacccagcucagcaccgacaccggcguggagcacgugacguucuucaucuacaacaagaucgucgacgagcccgaggagcacgugcagauccacaccaucgacggguccagcggcguggucaaccccgugauggagccgaucuacgacgagcccaccaccacgaccagcgugccccugugaggacuagucccuguucccagagcccacuuuuuuuucuuuuuuugaaauaaaauagccugucuuucagaucucaaaggcucuuuucagagccaccaaaaaaaaaaaaaaaaaaaaaaaaaaaaaaaaaaaaaaaaaaaaaaaaaaaaaaaaaaaaaaaaaaaaaaaaaaaaaaaaaaaaaaaaaaaaaaaaaaaaa

SEQ ID NO: 20659 - RNA, 1100 nt, Artificial Sequence
  SARS-CoV-2__MT627609.1__ORF3a protein mRNA gc
aggagagucccgcagucggcguccagcggcucugcuuguucgugugugugucguugcaggccuuauucaagcuuaccauggaccuguucaugcgcaucuucaccaucggcaccgugacgcucaagcagggggagaucaaggacgccacccccagcgacuucguccgggccaccgcgaccaucccgauccaggccucccugcccuucggcuggcugaucguggggguggcccuccuggccgucuuccagagcgccuccaagaucaucacgcugaagaagcgcuggcagcucgcgcugagcaagggcgugcacuucgugugcaaccugcuccugcuguucgucaccguguacucccaccuccugcugguggccgccgggcucgaggcccccuuccuguaccuguacgcgcucgucuacuuccugcagagcaucaacuucgugcggaucaucaugcgccuguggcucugcuggaagugccgguccaagaacccccugcuguacgacgccaacuacuuccucugcuggcacaccaacugcuacgacuacugcaucccguacaacagcgugaccuccagcaucgucaucacguccggcgacggcaccaccagccccaucuccgagcacgacuaccagaucgggggcuacaccgagaagugggagagcggggugaaggacugcaucgugcugcacuccuacuucacgagcgacuacuaccagcuguacuccacccagcucagcaccgacaccggcgucgagcacgugacguucuucaucuacaacaagaucguggacgagcccgaggagcacguccagauccacaccaucgacggguccagcggcguggugaaccccgucauggagccgaucuacgacgagcccaccaccacgaccagcgugccccugugaggacuagucccuguucccagagcccacuuuuuuuucuuuuuuugaaauaaaauagccugucuuucagaucucaaaggcucuuuucagagccaccaaaaaaaaaaaaaaaaaaaaaaaaaaaaaaaaaaaaaaaaaaaaaaaaaaaaaaaaaaaaaaaaaaaaaaaaaaaaaaaaaaaaaaaaaaaaaaaaaaaaa

SEQ ID NO: 20660 - RNA, 1100 nt, Artificial Sequence
  SARS-CoV-2__MT627747.1__ORF3a protein mRNA gc
aggagagucccgcagucggcguccagcggcucugcuuguucgugugugugucguugcaggccuuauucaagcuuaccauggaccuguucaugcgcaucuucaccaucggcaccgugacgcucaagcagggggagaucaaggacgccacccccagcgacuucguccgggccaccgcgaccaucccgauccaggccucccugcccuucggcuggcugaucguggggguggcccuccuggccgucuuccacagcgccuccaagaucaucacgcugaagaagcgcuggcagcucgcgcugagcaagggcgugcacuucgugugcaaccugcuccugcuguucgucaccguguacucccaccuccugcugguggccgccgggcucgaggcccccuuccuguaccuguacgcgcucgucuacuuccugcagagcaucaacuucgugcggaucaucaugcgccuguggcucugcuggaagugccgguccaagaacccccugcuguacgacgccaacuacuuccucugcuggcacaccaacugcuacgacuacugcaucccguacaacagcgugaccuccagcaucgucaucacguccggcgacggcaccaccagccccaucuccgagcacgacuaccagaucgggggcuacaccgagaagugggagagcggggugaaggacugcgugguccugcacuccuacuucacgagcgacuacuaccagcuguacuccacccagcucagcaccgacaccggcguggagcacgugacguucuucaucuacaacaagaucgucgacgagcccgaggagcacgugcagauccacaccaucgacggguccagcggcguggucaaccccgugauggagccgaucuacgacgagcccaccaccacgaucagcgugccccugugaggacuagucccuguucccagagcccacuuuuuuuucuuuuuuugaaauaaaauagccugucuuucagaucucaaaggcucuuuucagagccaccaaaaaaaaaaaaaaaaaaaaaaaaaaaaaaaaaaaaaaaaaaaaaaaaaaaaaaaaaaaaaaaaaaaaaaaaaaaaaaaaaaaaaaaaaaaaaaaaaaaaa

SEQ ID NO: 20661 - RNA, 1100 nt, Artificial Sequence
  SARS-CoV-2__MT628095.1__ORF3a protein mRNA gc
aggagagucccgcagucggcguccagcggcucugcuuguucgugugugugucguugcaggccuuauucaagcuuaccauggaccuguucaugcgcaucuucaccaucggcaccgugacgcucaagcagggggagaucaaggacgccacccccagcgacuucguccgggccaccgcgaccaucccgauccaggccucccugcccuucggcuggcugaucguggggguggcccuccuggccgucuuccagagcgccuccaagaucaucacgcugaagaagcgcuggcagcucgcgcugagcaagggcgugcacuucgugugcaaccugcuccugcuguucgucaccguguacucccaccuccugcugguggccgccgggcucgaggcccccuuccuguaccuguacgcgcucgucuacuuccugcagagcaucaacuucgugcggaucaucaugcgccuguggcucugcuggaagugccgguccaagaacccccugcuguacgacgccaacuacuuccucugcuggcacaccaacugcuacgacuacugcaucccguacaacagcgugaccuccagcaucgucaucacguccggcgacggcaccaccagccccaucuccgagcacgacuaccagaucgggggcuacaccgagaagugggagagcggggugaaggacugcgugguccugcacuccuacuucacgagcgacuacuaccagcuguacuccacccagcucagcaccgacaccggcguggagcacgugacguucuucaucuacaacaagaucgucgacgagcccgaggagcacgugcagauccacaccaucgacggguccagcggcguggucaaccccgugaaggagccgaucuacgacgagcccaccaccacgaccagcgugccccugugaggacuagucccuguucccagagcccacuuuuuuuucuuuuuuugaaauaaaauagccugucuuucagaucucaaaggcucuuuucagagccaccaaaaaaaaaaaaaaaaaaaaaaaaaaaaaaaaaaaaaaaaaaaaaaaaaaaaaaaaaaaaaaaaaaaaaaaaaaaaaaaaaaaaaaaaaaaaaaaaaaaaa

SEQ ID NO: 20662 - RNA, 1100 nt, Artificial Sequence
  SARS-CoV-2__MT628180.1__ORF3a protein mRNA gc
aggagagucccgcagucggcguccagcggcucugcuuguucgugugugugucguugcaggccuuauucaagcuuaccauggaccuguucaugcgcaucuucaccaucggcaccgugacgcucaagcagggggagaucaaggacgccacccccagcgacuucguccgggccaccgcgaccaucccgauccaggccucccugcccuucggcuggcugaucguggggguggcccuccuggccgucuuccagagcgccuccaagaucaucacgcugaagaagcgcuggcagcucgcgcugagcaagggcgugcacuucgugugcaaccugcuccugcuguucgucaccguguacucccaccuccugcugguggccgccgggcucgaggcccccuuccuguacuucuacgcgcuggucuacuuccuccagagcaucaacuucgugcggaucaucaugcgccuguggcugugcuggaagugccgguccaagaacccccuccuguacgacgccaacuacuuccugugcuggcacaccaacugcuacgacuacugcaucccguacaacagcgugaccuccagcaucgucaucacguccggcgacggcaccaccagccccaucuccgagcacgacuaccagaucgggggcuacaccgagaagugggagagcggggugaaggacugcgugguccuccacuccuacuucacgagcgacuacuaccagcuguacuccacccagcugagcaccgacaccggcguggagcacgugacguucuucaucuacaacaagaucgucgacgagcccgaggagcacgugcagauccacaccaucgacggguccagcggcguggucaaccccgugauggagccgaucuacgacgagcccaccaccacgaccagcgugccccucugaggacuagucccuguucccagagcccacuuuuuuuucuuuuuuugaaauaaaauagccugucuuucagaucucaaaggcucuuuucagagccaccaaaaaaaaaaaaaaaaaaaaaaaaaaaaaaaaaaaaaaaaaaaaaaaaaaaaaaaaaaaaaaaaaaaaaaaaaaaaaaaaaaaaaaaaaaaaaaaaaaaaa

SEQ ID NO: 20663 - RNA, 1100 nt, Artificial Sequence
  SARS-CoV-2__MT628245.1__ORF3a protein mRNA gc
aggagagucccgcagucggcguccagcggcucugcuuguucgugugugugucguugcaggccuuauucaagcuuaccauggaccuguucaugcgcaucuucaccaucggcaccgugacgcucaagcagggggagaucaaggacgccacccccagcgacuucguccgggccaccgcgaccaucccgauccaggccucccugcccuacggcuggcugaucguggggguggcccuccuggccgucuuccacagcgccuccaagaucaucacgcugaagaagcgcuggcagcucgcgcugagcaagggcgugcacuucgugugcaaccugcuccugcuguucgucaccguguacucccaccuccugcugguggccgccgggcucgaggcccccuuccuguaccuguacgcgcucgucuacuuccugcagagcaucaacuucgugcggaucaucaugcgccuguggcucugcuggaagugccgguccaagaacccccugcuguacgacgccaacuacuuccucugcuggcacaccaacugcuacgacuacugcaucccguacaacagcgugaccuccagcaucgucaucacguccggcgacggcaccaccagccccaucuccgagcacgacuaccagaucgggggcuacaccgagaagugggagagcggggugaaggacugcgugguccugcacuccuacuucacgagcgacuacuaccagcuguacuccacccagcucagcaccgacaccggcguggagcacgugacguucuucaucuacaacaagaucgucgacgagcccgaggagcacgugcagauccacaccaucgacggguccagcggcguggucaaccccgugauggagccgaucuacgacgagcccaccaccacgaccagcgugccccugugaggacuagucccuguucccagagcccacuuuuuuuucuuuuuuugaaauaaaauagccugucuuucagaucucaaaggcucuuuucagagccaccaaaaaaaaaaaaaaaaaaaaaaaaaaaaaaaaaaaaaaaaaaaaaaaaaaaaaaaaaaaaaaaaaaaaaaaaaaaaaaaaaaaaaaaaaaaaaaaaaaaaa

SEQ ID NO: 20664 - RNA, 1100 nt, Artificial Sequence
  SARS-CoV-2__MT630422.1__ORF3a protein mRNA gc
aggagagucccgcagucggcguccagcggcucugcuuguucgugugugugucguugcaggccuuauucaagcuuaccauggaccuguucaugcgcaucuucaccaucggcaccgugacgcucaagcagggggagaucaaggacgccacccccagcgacuucguccgggccaccgcgaccaucccgauccaggccucccugcccuucggcuggcugaucguggggguggcccuccuggccgucuuccagagcgccuccaagaucaucacgcugaagaagcgcuggcagcucgcgcugagcaagggcgugcacuucgugugcaaccugcuccugcuguucgccaccgucuacucccaccuccugcugguggccgccgggcucgaggcgcccuuccuguaccuguacgcccucguguacuuccugcagagcaucaacuucguccggaucaucaugcgccuguggcucugcuggaagugccgguccaagaacccccugcuguacgacgccaacuacuuccucugcuggcacaccaacugcuacgacuacugcaucccguacaacagcgugaccuccagcaucgugaucacguccggcgacggcaccaccagccccaucuccgagcacgacuaccagaucgggggcuacaccgagaagugggagagcggggucaaggacugcguggugcugcacuccuacuucacgagcgacuacuaccagcuguacuccacccagcucagcaccgacaccggcgucgagcacgugacguucuucaucuacaacaagaucguggacgagcccgaggagcacguccagauccacaccaucgacggguccagcggcguggugaaccccgucauggagccgaucuacgacgagcccaccaccacgaccagcgugccccugugaggacuagucccuguucccagagcccacuuuuuuuucuuuuuuugaaauaaaauagccugucuuucagaucucaaaggcucuuuucagagccaccaaaaaaaaaaaaaaaaaaaaaaaaaaaaaaaaaaaaaaaaaaaaaaaaaaaaaaaaaaaaaaaaaaaaaaaaaaaaaaaaaaaaaaaaaaaaaaaaaaaaa

SEQ ID NO: 20665 - RNA, 1100 nt, Artificial Sequence
  SARS-CoV-2__MT632576.1__ORF3a protein mRNA gc
aggagagucccgcagucggcguccagcggcucugcuuguucgugugugugucguugcaggccuuauucaagcuuaccauggaccuguucaugcgcaucuucaccaucggcaccgugacgcucaagcagggggagaucaaggacgccacccccagcgacuucguccgggccaccgcgaccaucccgauccaggccucccugcccuucggcuggcugaucguggggguggcccuccuggccgucuuccagagcgccuccaagaucaucacgcugaagaagcgcuggcagcucgcgcugagcaagggcgugcacuucgugugcaaccugcuccugcuguucgucaccguguacucccaccuccugcugguggccgccgggcucgaggcccccuuccuguaccuguacgcgcucgucuacuuccugcagagcaucaacuucgugcggaucaucaugcgccuguggcucugcuggaagugccgguccaagaacccccuguucuacgacgccaacuacuuccugugcuggcacaccaacugcuacgacuacugcaucccguacaacagcgugaccuccagcaucgucaucacguccggcgacggcaccaccagccccaucuccgagcacgacuaccagaucgggggcuacaccgagaagugggagagcggggugaaggacugcgugguccuccacuccuacuucacgagcgacuacuaccagcuguacuccacccagcugagcaccgacaccggcguggagcacgugacguucuucaucuacaacaagaucgucgacgagcccgaggagcacgugcagauccacaccaucgacggguccagcggcguggucaaccccgugauggagccgaucuacgacgagcccaccaccacgaccagcgugccccucugaggacuagucccuguucccagagcccacuuuuuuuucuuuuuuugaaauaaaauagccugucuuucagaucucaaaggcucuuuucagagccaccaaaaaaaaaaaaaaaaaaaaaaaaaaaaaaaaaaaaaaaaaaaaaaaaaaaaaaaaaaaaaaaaaaaaaaaaaaaaaaaaaaaaaaaaaaaaaaaaaaaaa

SEQ ID NO: 20666 - RNA, 1100 nt, Artificial Sequence
  SARS-CoV-2__MT632795.1__ORF3a protein mRNA gc
aggagagucccgcagucggcguccagcggcucugcuuguucgugugugugucguugcaggccuuauucaagcuuaccauggaccuguucaugcgcaucuucaccaucggcaccgugacgcucaagcagggggagaucaaggacgccacccccagcgacuucguccgggccaccgcgaccaucccgauccaggccucccugcccuucggcuggcugaucguggggguggcccuccuggccgucuuccagagcgccuccaagaucaucacgcugaagaagcgcuggcagcucgcgcugagcaagggcgugcacuucgugugcaaccugcuccugcuguucgucaccguguacucccaccuccugcugguggccgccgggcucgaggcccccuuccuguaccuguacgcgcucgucuacuuccugcagagcaucaacuucgugcggaucaucaugcgccuguggcucugcuggaagugccgguccaagaacccccugcuguacgacgccaacuacuuccucugcuggcacaccaacugcuacgacuacugcaucccguacaacagcgugaccuccagcaucgucaucacguccggcgacggcaccaccagccccaucuccgagcacgacuaccagaucgggggcuacaccgagaagugggagagcggggugaaggacugcgugguccugcacuccuacuucacgagcgacuacuaccagcuguacuccacccagcucagcaccgacaccggcguggagcacgugacguucuucaucuacaacaagaucgucgaggagcccgaggagcacgugcagauccacaccaucgacggguccagcggcguggucaaccccgugauggagccgaucuacgacgagcccaccaccacgaccagcgugccccugugaggacuagucccuguucccagagcccacuuuuuuuucuuuuuuugaaauaaaauagccugucuuucagaucucaaaggcucuuuucagagccaccaaaaaaaaaaaaaaaaaaaaaaaaaaaaaaaaaaaaaaaaaaaaaaaaaaaaaaaaaaaaaaaaaaaaaaaaaaaaaaaaaaaaaaaaaaaaaaaaaaaaa

SEQ ID NO: 20667 - RNA, 1100 nt, Artificial Sequence
  SARS-CoV-2__MT632887.1__ORF3a protein mRNA gc
aggagagucccgcagucggcguccagcggcucugcuuguucgugugugugucguugcaggccuuauucaagcuuaccauggaccuguucaugcgcaucuucaccaucggcaccgugacgcucaagcagggggagaucaaggacgccacccccagcgacuucguccgggccaccgcgaccaucccgauccaggccucccugcccuucggcuggcugaucguggggguggcccuccuggccgucuuccagagcgccuccaagaucaucacgcugaagaagcgcuggcagcucgcgcugagcaagggcgugcacuucgugugcaaccugcuccugcuguucgucaccguguacucccaccuccugcugguggccgccgggcucgaggcccccuuccuguaccuguacgcgcucgucuacuuccugcagagcaucaacuucgugcggaucaucaugcgccuguggcucugcuggaagugccgguccaagaacccccugcuguacgacgccaacuacuuccucugcuggcacaccaacugcuacgacuacugcaucccguacaacagcgugaccuucuccaucgucaucacgagcggcgacggcaccaccucccccaucagcgagcacgacuaccagaucgggggcuacaccgagaagugggaguccggggugaaggacugcgugguccugcacagcuacuucacguccgacuacuaccagcuguacagcacccagcucuccaccgacaccggcguggagcacgugacguucuucaucuacaacaagaucgucgacgagcccgaggagcacgugcagauccacaccaucgacgggagcuccggcguggucaaccccgugauggagccgaucuacgacgagcccaccaccacgaccagcgugccccugugaggacuagucccuguucccagagcccacuuuuuuuucuuuuuuugaaauaaaauagccugucuuucagaucucaaaggcucuuuucagagccaccaaaaaaaaaaaaaaaaaaaaaaaaaaaaaaaaaaaaaaaaaaaaaaaaaaaaaaaaaaaaaaaaaaaaaaaaaaaaaaaaaaaaaaaaaaaaaaaaaaaaa

SEQ ID NO: 20668 - RNA, 1100 nt, Artificial Sequence
  SARS-CoV-2__MT632892.1__ORF3a protein mRNA gc
aggagagucccgcagucggcguccagcggcucugcuuguucgugugugugucguugcaggccuuauucaagcuuaccauggaccuguucaugcgcaccuucaccaucggcacggugacccucaagcagggggagaucaaggacgccacccccagcgacuucguccgggccaccgcgacgaucccgauccaggccucccugcccuucggcuggcugaucguggggguggcccuccuggccgucuuccagagcgccuccaagaucaucacccugaagaagcgcuggcagcucgcgcugagcaagggcgugcacuucgugugcaaccugcuccugcuguucgucaccguguacucccaccuccugcugguggccgccgggcucgaggcccccuuccuguaccuguacgcgcucgucuacuuccugcagagcaucaacuucgugcggaucaucaugcgccuguggcucugcuggaagugccgguccaagaacccccugcuguacgacgccaacuacuuccucugcuggcacaccaacugcuacgacuacugcaucccguacaacagcgugacguccagcaucgucaucaccuccggcgacggcaccaccagccccaucuccgagcacgacuaccagaucgggggcuacacggagaagugggagagcggggugaaggacugcgugguccugcacuccuacuucaccagcgacuacuaccagcuguacuccacccagcucagcaccgacacgggcguggagcacgugaccuucuucaucuacaacaagaucgucgacgagcccgaggagcacgugcagauccacaccaucgacggguccagcggcguggucaaccccgugauggagccgaucuacgacgagcccaccacgaccaccagcgugccccugugaggacuagucccuguucccagagcccacuuuuuuuucuuuuuuugaaauaaaauagccugucuuucagaucucaaaggcucuuuucagagccaccaaaaaaaaaaaaaaaaaaaaaaaaaaaaaaaaaaaaaaaaaaaaaaaaaaaaaaaaaaaaaaaaaaaaaaaaaaaaaaaaaaaaaaaaaaaaaaaaaaaaa

SEQ ID NO: 20669 - RNA, 1100 nt, Artificial Sequence
  SARS-CoV-2__MT614460.1__ORF3a protein mRNA gc
aggagagucccgcagucggcguccagcggcucugcuuguucgugugugugucguugcaggccuuauucaagcuuaccauggaccuguucaugcgcaucuucaccaucggcaccgugacgcucaagcagggggagaucaaggacgccacccccagcgacuucguccgggccaccgcgaccaucccgauccaggccucccugcccuucggcuggcugaucguggggguggcccucuucgccgucuuccacagcgccuccaagaucaucacgcugaagaagcgcuggcagcuggcgcucagcaagggcgugcacuucgugugcaaccugcugcuccuguucgucaccguguacucccaccuccugcugguggccgccgggcuggaggcccccuuccucuaccuguacgcgcuggucuacuuccuccagagcaucaacuucgugcggaucaucaugcgccuguggcugugcuggaagugccgguccaagaacccccuccuguacgacgccaacuacuuccugugcuggcacaccaacugcuacgacuacugcaucccguacaacagcgugaccuccagcaucgucaucacguccggcgacggcaccaccagccccaucuccgagcacgacuaccagaucgggggcuacaccgagaagugggagagcggggugaaggacugcgugguccuccacuccuacuucacgagcgacuacuaccagcuguacuccacccagcugagcaccgacaccggcguggagcacgugacguucuucaucuacaacaagaucgucgacgagcccgaggagcacgugcagauccacaccaucgacggguccagcggcguggucaaccccgugauggagccgaucuacgacgagcccaccaccacgaccagcgugccccucugaggacuagucccuguucccagagcccacuuuuuuuucuuuuuuugaaauaaaauagccugucuuucagaucucaaaggcucuuuucagagccaccaaaaaaaaaaaaaaaaaaaaaaaaaaaaaaaaaaaaaaaaaaaaaaaaaaaaaaaaaaaaaaaaaaaaaaaaaaaaaaaaaaaaaaaaaaaaaaaaaaaaa

SEQ ID NO: 20670 - RNA, 1100 nt, Artificial Sequence
  SARS-CoV-2__MT614496.1__ORF3a protein mRNA gc
aggagagucccgcagucggcguccagcggcucugcuuguucgugugugugucguugcaggccuuauucaagcuuaccauggaccuguucaugcgcaucuucaucaucggcaccgugacccucaagcagggggagaucaaggacgccacgcccagcgacuucguccgggccaccgcgaccaucccgauccaggccucccugcccuucggcuggcugaucguggggguggcccuccuggccgucuuccacagcgccuccaagaucaucacccugaagaagcgcuggcagcucgcgcugagcaagggcgugcacuucgugugcaaccugcuccugcuguucgucacgguguacucccaccuccugcugguggccgccgggcucgaggcccccuuccuguaccuguacgcgcucgucuacuuccugcagagcaucaacuucgugcggaucaucaugcgccuguggcucugcuggaagugccgguccaagaacccccugcuguacgacgccaacuacuuccucugcuggcacaccaacugcuacgacuacugcaucccguacaacagcgugaccuccagcaucgucaucaccuccggcgacggcacgaccagccccaucuccgagcacgacuaccagaucgggggcuacaccgagaagugggagagcggggugaaggacugcgugguccugcacuccuacuucaccagcgacuacuaccagcuguacuccacgcagcucagcaccgacaccggcguggagcacgugaccuucuucaucuacaacaagaucgucgacgagcccgaggagcacgugcagauccacacgaucgacggguccagcggcguggucaaccccgugauggagccgaucuacgacgagcccaccaccaccacgagcgugccccugugaggacuagucccuguucccagagcccacuuuuuuuucuuuuuuugaaauaaaauagccugucuuucagaucucaaaggcucuuuucagagccaccaaaaaaaaaaaaaaaaaaaaaaaaaaaaaaaaaaaaaaaaaaaaaaaaaaaaaaaaaaaaaaaaaaaaaaaaaaaaaaaaaaaaaaaaaaaaaaaaaaaaa

SEQ ID NO: 20671 - RNA, 1100 nt, Artificial Sequence
  SARS-CoV-2__MT620771.1__ORF3a protein mRNA gc
aggagagucccgcagucggcguccagcggcucugcuuguucgugugugugucguugcaggccuuauucaagcuuaccauggaccuguucaugcgcaucuucaccaucggcaccgugacgcucaagcagggggagaucaaggacgccacccccagcgacuucguccgggccaccgcgaccaucccgauccaggccucccugcccuucggcuggcugaucguggggguggcccuccuggccgucuuccagagcgccuccaagaucaucacgcugaagaagcgcuggcagcucgcgcugagcaagggcgugcacuucgugugcaaccugcuccugcuguucgucaccguguacucccaccuccugcugguggccgccgggcucgaggcccccuuccuguaccuguacgcgcucgucuacuuccugcagagcgugaacuucgugcggaucaucaugcgccuguggcucugcuggaagugccgguccaagaacccccugcuguacgacgccaacuacuuccucugcuggcacaccaacugcuacgacuacugcaucccguacaacagcgucaccuccagcaucgugaucacguccggcgacggcaccaccagccccaucuccgagcacgacuaccagaucgggggcuacaccgagaagugggagagcggggugaaggacugcgucgugcugcacuccuacuucacgagcgacuacuaccagcuguacuccacccagcucagcaccgacaccggcguggagcacgucacguucuucaucuacaacaagaucguggacgagcccgaggagcacgugcagauccacaccaucgacggguccagcggcgucgugaaccccgugauggagccgaucuacgacgagcccaccaccacgaccagcgucccccugugaggacuagucccuguucccagagcccacuuuuuuuucuuuuuuugaaauaaaauagccugucuuucagaucucaaaggcucuuuucagagccaccaaaaaaaaaaaaaaaaaaaaaaaaaaaaaaaaaaaaaaaaaaaaaaaaaaaaaaaaaaaaaaaaaaaaaaaaaaaaaaaaaaaaaaaaaaaaaaaaaaaaa

SEQ ID NO: 20672 - RNA, 1100 nt, Artificial Sequence
  SARS-CoV-2__MT622319.1__ORF3a protein mRNA gc
aggagagucccgcagucggcguccagcggcucugcuuguucgugugugugucguugcaggccuuauucaagcuuaccauggaccuguucaugcgcaucuucaccaucggcaccgugacgcucaagcagggggagaucaaggacgccacccccagcgacuucguccgggccaucgcgaccaucccgauccaggccucccugcccuucggcuggcugaucguggggguggcccuccuggccgucuuccagagcgccuccaagaucaucacccugaagaagcgcuggcagcucgcgcugagcaagggcgugcacuucgugugcaaccugcuccugcuguucgucacgguguacucccaccuccugcugguggccgccgggcucgaggcccccuuccuguaccuguacgcgcucgucuacuuccugcagagcaucaacuucgugcggaucaucaugcgccuguggcucugcuggaagugccgguccaagaacccccugcuguacgacgccaacuacuuccucugcuggcacaccaacugcuacgacuacugcaucccguacaacagcgugaccuccagcaucgucaucaccuccggcgacggcacgaccagccccaucuccgagcacgacuaccagaucgggggcuacaccgagaagugggagagcggggugaaggacugcgugguccugcacuccuacuucaccagcgacuacuaccagcuguacuccacgcagcucagcaccgacaccggcguggagcacgugaccuucuucaucuacaacaagaucgucgacgagcccgaggagcacgugcagauccacacgaucgacggguccagcggcguggucaaccccgugauggagccgaucuacgacgagcccaccaccaccacgagcgugccccugugaggacuagucccuguucccagagcccacuuuuuuuucuuuuuuugaaauaaaauagccugucuuucagaucucaaaggcucuuuucagagccaccaaaaaaaaaaaaaaaaaaaaaaaaaaaaaaaaaaaaaaaaaaaaaaaaaaaaaaaaaaaaaaaaaaaaaaaaaaaaaaaaaaaaaaaaaaaaaaaaaaaaa

SEQ ID NO: 20673 - RNA, 1100 nt, Artificial Sequence
  SARS-CoV-2__MT601290.1__ORF3a protein mRNA gc
aggagagucccgcagucggcguccagcggcucugcuuguucgugugugugucguugcaggccuuauucaagcuuaccauggaccuguucaugcgcaucuucaccaucggcaccgugacgcucaagcagggggagaucaaggacgccacccccagcgacuucguccgggccaccgcgaccaucccgauccaggccucccugcccuucggcuggcugaucguggggguggcccuccuggccgucuuccagagcgccuccaagaucaucacgcugaagaagcgccuccagcuggcgcugagcaagggcgugcacuucgugugcaaccuccugcugcuguucgucaccguguacucccaccuccugcucguggccgccgggcuggaggcccccuuccuguaccucuacgcgcuggucuacuuccugcagagcaucaacuucgugcggaucaucaugcgccucuggcugugcuggaagugccgguccaagaacccccugcucuacgacgccaacuacuuccugugcuggcacaccaacugcuacgacuacugcaucccguacaacagcgugaccuccagcaucgucaucacguccggcgacggcaccaccagccccaucuccgagcacgacuaccagaucgggggcuacaccgagaagugggagagcggggugaaggacugcgugguccugcacuccuacuucacgagcgacuacuaccagcucuacuccacccagcugagcaccgacaccggcguggagcacgugacguucuucaucuacaacaagaucgucgacgagcccgaggagcacgugcagauccacaccaucgacggguccagcggcguggucaaccccgugauggagccgaucuacgacgagcccaccaccacgaccagcgugccccugugaggacuagucccuguucccagagcccacuuuuuuuucuuuuuuugaaauaaaauagccugucuuucagaucucaaaggcucuuuucagagccaccaaaaaaaaaaaaaaaaaaaaaaaaaaaaaaaaaaaaaaaaaaaaaaaaaaaaaaaaaaaaaaaaaaaaaaaaaaaaaaaaaaaaaaaaaaaaaaaaaaaaa

SEQ ID NO: 20674 - RNA, 1100 nt, Artificial Sequence
  SARS-CoV-2__MT584997.1__ORF3a protein mRNA gc
aggagagucccgcagucggcguccagcggcucugcuuguucgugugugugucguugcaggccuuauucaagcuuaccauggaccuguucaugcgcaucuucaccaucggcaccgugacgcucaagcagggggagaucaaggacgccaccagcuccgacuucguccgggccaccgcgaccauccccauccaggccagccugccguucggcuggcugaucguggggguggcccuccuggccgucuuccaguccgccagcaagaucaucacgcugaagaagcgcuggcagcucgcgcuguccaagggcgugcacuucgugugcaaccugcuccugcuguucgucaccguguacagccaccuccugcugguggccgccgggcucgaggcccccuuccuguaccuguacgcgcucgucuacuuccugcaguccaucaacuucgugcggaucaucaugcgccuguggcucugcuggaagugccggagcaagaacccccugcuguacgacgccaacuacuuccucugcuggcacaccaacugcuacgacuacugcauccccuacaacuccgugaccagcuccaucgucaucacgagcggcgacggcaucaccuccccgaucagcgagcacgacuaccagaucgggggcuacaccgagaagugggaguccggggugaaggacugcgugguccugcacagcuacuucaccuccgacuacuaccagcuguacagcacgcagcucuccaccgacaccggcguggagcacgugaccuucuucaucuacaacaagaucgucgacgagcccgaggagcacgugcagauccacacgaucgacgggagcagcggcguggucaaccccgugauggagcccaucuacgacgagccgaccaccaccacguccgugccccugugaggacuagucccuguucccagagcccacuuuuuuuucuuuuuuugaaauaaaauagccugucuuucagaucucaaaggcucuuuucagagccaccaaaaaaaaaaaaaaaaaaaaaaaaaaaaaaaaaaaaaaaaaaaaaaaaaaaaaaaaaaaaaaaaaaaaaaaaaaaaaaaaaaaaaaaaaaaaaaaaaaaaa

SEQ ID NO: 20675 - RNA, 1100 nt, Artificial Sequence
  SARS-CoV-2__MT585093.1__ORF3a protein mRNA gc
aggagagucccgcagucggcguccagcggcucugcuuguucgugugugugucguugcaggccuuauucaagcuuaccauggaccuguucaugcgcaucuucaccaucggcaccgugacgcucaagcagggggagaucaaggacgccacccccagcgacuucguccgggccaccgcgaccaucccgauccaggccucccugcccuucggcuggcugaucguggggguggcccuccuggccgucuuccacagcgccuccaagaucaucacgcugaagaagcgcugccagcucgcgcugagcaagggcgugcacuucgugugcaaccugcuccugcuguucgucaccguguacucccaccuccugcugguggccgccgggcucgaggcccccuuccuguaccuguacgcgcucgucuacuuccugcagagcaucaacuucgugcggaucaucaugcgccuguggcucugcuggaagugccgguccaagaacccccugcuguacgacgccaacuacuuccucugcuggcacaccaacugcuacgacuacugcaucccguacaacagcgugaccuccagcaucgucaucacguccggcgacggcaccaccagccccaucuccgagcacgacuaccagaucgggggcuacaccgagaagugggagagcggggugaaggacugcgugguccugcacuccuacuucacgagcgacuacuaccagcuguacuccacccagcucagcaccgacaccggcguggagcacgugacguucuucaucuacaacaagaucgucgacgagcccgaggagcacgugcagauccacaccaucgacggguccagcggcguggucaaccccgugauggagccgaucuacgacgagcccaccaccacgaccagcgugccccugugaggacuagucccuguucccagagcccacuuuuuuuucuuuuuuugaaauaaaauagccugucuuucagaucucaaaggcucuuuucagagccaccaaaaaaaaaaaaaaaaaaaaaaaaaaaaaaaaaaaaaaaaaaaaaaaaaaaaaaaaaaaaaaaaaaaaaaaaaaaaaaaaaaaaaaaaaaaaaaaaaaaaa

SEQ ID NO: 20676 - RNA, 1100 nt, Artificial Sequence
  SARS-CoV-2__MT585094.1__ORF3a protein mRNA gc
aggagagucccgcagucggcguccagcggcucugcuuguucgugugugugucguugcaggccuuauucaagcuuaccauggaccuguucaugcgcaucuucaccaucggcaccgugacgcucaagcagggggagaucaaggacgccacccccagcgacuucguccgggccaccgcgaccaucccgauccaggccucccugcccuucggcuggcugaucguggggguggcccuccuggccgucuuccacagcguguccaagaucaucacgcugaagaagcgcuggcagcucgcccugagcaagggcgugcacuucgucugcaaccugcuccugcuguucgugaccguguacucccaccuccugcuggucgcggccgggcucgaggcccccuuccuguaccuguacgcccucguguacuuccugcagagcaucaacuucgugcggaucaucaugcgccuguggcucugcuggaagugccgguccaagaacccccugcuguacgacgcgaacuacuuccucugcuggcacaccaacugcuacgacuacugcaucccguacaacagcgucaccuccagcaucgugaucacguccggcgacggcaccaccagccccaucuccgagcacgacuaccagaucgggggcuacaccgagaagugggagagcggggugaaggacugcgucgugcugcacuccuacuucacgagcgacuacuaccagcuguacuccacccagcucagcaccgacaccggcguggagcacgucacguucuucaucuacaacaagaucguggacgagcccgaggagcacgugcagauccacaccaucgacggguccagcggcgucgugaaccccgugauggagccgaucuacgacgagcccaccaccacgaccagcgucccccugugaggacuagucccuguucccagagcccacuuuuuuuucuuuuuuugaaauaaaauagccugucuuucagaucucaaaggcucuuuucagagccaccaaaaaaaaaaaaaaaaaaaaaaaaaaaaaaaaaaaaaaaaaaaaaaaaaaaaaaaaaaaaaaaaaaaaaaaaaaaaaaaaaaaaaaaaaaaaaaaaaaaaa

SEQ ID NO: 20677 - RNA, 1100 nt, Artificial Sequence
  SARS-CoV-2__MT578015.1__ORF3a protein mRNA gc
aggagagucccgcagucggcguccagcggcucugcuuguucgugugugugucguugcaggccuuauucaagcuuaccauggaccuguucaugcgcaucuucaccaucggcaccgugacgcucaagcagggggagaucaaggacgccacccccagcgacuucguccgggccaccgcgaccaucccgauccaggccucccugcccuucggcuggcugaucguggggguggcccuccuggccgucuuccagagcgccuccaagaucaucacgcugaagaagcgcuggcagcucgcgcugagcaagggcgugcacuucgugugcaaccugcuccugcuguucgucaccguguacucccaccuccugcugguggccgccgggcucgaggcccccuuccuguaccuguacgcgcucgucuacuuccugcagagcaucaacuucgugcggaucaucaugcgccuguggcucugcuggaagugccgguccaagaacccccugcuguacgacgccaacuacuuccucugcuggcacaccaacugcuacgacuacugcaucccguacaacagcgugaccuccagcaucgucaucacguccggcgacggcaccaccagccccaucuccgagcacgacuaccagaucgggggcuacaccgagaagugggagagcgggcugaaggacugcguggugcugcacuccuacuucacgagcgacuacuaccagcucuacuccacccagcugagcaccgacaccggcgucgagcacgugacguucuucaucuacaacaagaucguggacgagcccgaggagcacguccagauccacaccaucgacggguccagcggcguggugaaccccgucauggagccgaucuacgacgagcccaccaccacgaccagcgugccccugugaggacuagucccuguucccagagcccacuuuuuuuucuuuuuuugaaauaaaauagccugucuuucagaucucaaaggcucuuuucagagccaccaaaaaaaaaaaaaaaaaaaaaaaaaaaaaaaaaaaaaaaaaaaaaaaaaaaaaaaaaaaaaaaaaaaaaaaaaaaaaaaaaaaaaaaaaaaaaaaaaaaaa

SEQ ID NO: 20678 - RNA, 1100 nt, Artificial Sequence
  SARS-CoV-2__MT520329.1__ORF3a protein mRNA gc
aggagagucccgcagucggcguccagcggcucugcuuguucgugugugugucguugcaggccuuauucaagcuuaccauggaccuguucaugcgcaucuucaccaucggcaccgugacgcucaagcagggggagaucaaggacgccacccccagcgacuucguccgggccaccgcgaccaucccgauccaggccucccugcccuucggcuggcugaucguggggguggcccuccuggccgucuuccacagcgccuccaagaucaucacgcugaagaagcgcuggcagcucgcgcugagcaagggcgugcacuucgugugcaaccugcuccugcuguucgucaccguguacucccaccuccugcugguggccgccgggcucgaggcccccuuccuguacuucuacgcgcuggucuacuuccuccagagcaucaacuucgugcggaucaucaugcgccuguggcugugcuggaagugccgguccaagaacccccuccuguacgacgccaacuacuuccugugcuggcacaccaacugcuacgacuacugcaucccguacaacagcgugaccuccagcaucgucaucacguccggcgacggcaccaccagccccaucuccgagcacgacuaccagaucgggggcuacaccgagaagugggagagcggggugaaggacugcgugguccuccacuccuacuucacgagcgacuacuaccagcuguacuccacccagcugagcaccgacaccggcguggagcacgugacguucuucaucuacaacaagaucgucgacgagcccgaggagcacgugcagauccacaccaucgacggguccagcggcguggucaaccccgugauggagccgaucuacgacgagcccaccaccacgaccagcgugccccucugaggacuagucccuguucccagagcccacuuuuuuuucuuuuuuugaaauaaaauagccugucuuucagaucucaaaggcucuuuucagagccaccaaaaaaaaaaaaaaaaaaaaaaaaaaaaaaaaaaaaaaaaaaaaaaaaaaaaaaaaaaaaaaaaaaaaaaaaaaaaaaaaaaaaaaaaaaaaaaaaaaaaa

SEQ ID NO: 20679 - RNA, 1100 nt, Artificial Sequence
  SARS-CoV-2__MT520484.1__ORF3a protein mRNA gc
aggagagucccgcagucggcguccagcggcucugcuuguucgugugugugucguugcaggccuuauucaagcuuaccauggaccuguucaugcgcaucuucaccaucggcaccgugacgcucaagcagggggagaucaaggacgccacccccagcgacuucguccgggccaccgcgaccaucccgauccaggccucccugcccuucggcuggcugaucguggggguggcccuccuggccgucuuccacagcgccuccaagaucaucacgcugaagaagcgcuggcagcucgcgcugagcaagggcgugcacuucgugugcaaccugcuccugcuguucgucaccguguacucccaccuccugcugguggccgccgggcucgaggcccccuuccuguaccuguacgcgcucgucuacuuccugcagagcaucaacuucgugcggaucaucaugcgccuguggcucugcuggaagugcugcuccaagaacccccugcuguacgacgccaacuacuuccucugcuggcacaccaacugcuacgacuacugcaucccguacaacagcgugaccuccagcaucgucaucacguccggcgacggcaccaccagccccaucuccgagcacgacuaccagaucgggggcuacaccgagaagugggagagcggggugaaggacugcgugguccugcacuccuacuucacgagcgacuacuaccagcuguacuccacccagcucagcaccgacaccggcguggagcacgugacguucuucaucuacaacaagaucgucgacgagcccgaggagcacgugcagauccacaccaucgacggguccagcggcguggucaaccccgugauggagccgaucuacgacgagcccaccaccacgaccagcgugccccugugaggacuagucccuguucccagagcccacuuuuuuuucuuuuuuugaaauaaaauagccugucuuucagaucucaaaggcucuuuucagagccaccaaaaaaaaaaaaaaaaaaaaaaaaaaaaaaaaaaaaaaaaaaaaaaaaaaaaaaaaaaaaaaaaaaaaaaaaaaaaaaaaaaaaaaaaaaaaaaaaaaaaa

SEQ ID NO: 20680 - RNA, 1100 nt, Artificial Sequence
  SARS-CoV-2__MT520492.1__ORF3a protein mRNA gc
aggagagucccgcagucggcguccagcggcucugcuuguucgugugugugucguugcaggccuuauucaagcuuaccauggaccuguucaugcgcaucuucaccaucggcaccgugacgcucaagcagggggagaucaaggacgccacccccagcgacuucguccgggccaccgcgaccaucccgauccaggccucccugcccuucggcuggcugaucguggggguggcccuccuggccgucuuccacagcgccuccaagaucaucacgcugaagaagcgcuggcagcucgcgcugagcaagggcgugcacuucgugugcaaccugcuccugcuguucgucaccguguacucccaccuccugcugguggccgccgggcucgaggcccccuuccuguaccuguacgcgcucgucuacuuccugcagagcaucaacuucgugcggaucaucaugcgccuguggcucugcuggaagugccgguccaagaacccccugcuguacgacgccaacuacuuccucugcuggcacaccaacugcuacgacuacugcaucccguacaacagcgugaccuccagcaucgucaucacguccggcgacggcaccaccagccccaucuccgagcacgacuaccagaucgggggcuacaccgagaagugggagagcggggugaaggacugcgugguccugcacuccuacuucacgagcgacuacuaccagcuguacuccacccagcucagcaccgacaccggcguggagcacgugacguucuucaucuacaacaagaucgucaacgagcccgaggagcacgugcagauccacaccaucgacggguccagcggcguggucaaccccgugauggagccgaucuacgacgagcccaccaccacgaccagcgugccccugugaggacuagucccuguucccagagcccacuuuuuuuucuuuuuuugaaauaaaauagccugucuuucagaucucaaaggcucuuuucagagccaccaaaaaaaaaaaaaaaaaaaaaaaaaaaaaaaaaaaaaaaaaaaaaaaaaaaaaaaaaaaaaaaaaaaaaaaaaaaaaaaaaaaaaaaaaaaaaaaaaaaaa

SEQ ID NO: 20681 - RNA, 1100 nt, Artificial Sequence
  SARS-CoV-2__MT520523.1__ORF3a protein mRNA gc
aggagagucccgcagucggcguccagcggcucugcuuguucgugugugugucguugcaggccuuauucaagcuuaccauggaccuguucaugcgcaucuucaccaucggcaccgugacgcucaagcagggggagaucaaggacgccacccccagcgacuucguccgggccaccgcgaccaucccgauccaggccucccugcccuucggcuggcugaucguggggguggcccuccuggccgucuuccagagcgccuccaagaucaucacgcugaagaagcgcuggcagcucgcgcugagcaagggcgugcacuucgugugcaaccugcuccugcuguucgucaccguguacucccaccuccugcugguggccgccgggcucgaggcccccuuccuguaccuguacgcgcucgucuacuuccugcagagcaucaacuucgugcggaucaucaugcgccuguggcucugcuggaagugccgguccaagaacccccugcuguacgacgccaacuacuuccucugcuggcacaccaacugcuacgacuacugcaucccguacaacagcgugaccuccagcaucgucaucacguccggcgacggcaccaccagccccaucuccgagcacgacuaccagaucgggggcuacaccgagaagugggagagccgcgugaaggacugcgugguccugcacuccuacuucacgagcgacuacuaccagcuguacuccacccagcucagcaccgacaccgggguggagcacgugacguucuucaucuacaacaagaucgucgacgagcccgaggagcacgugcagauccacaccaucgacggcuccagcgggguggucaaccccgugauggagccgaucuacgacgagcccaccaccacgaccagcgugccccugugaggacuagucccuguucccagagcccacuuuuuuuucuuuuuuugaaauaaaauagccugucuuucagaucucaaaggcucuuuucagagccaccaaaaaaaaaaaaaaaaaaaaaaaaaaaaaaaaaaaaaaaaaaaaaaaaaaaaaaaaaaaaaaaaaaaaaaaaaaaaaaaaaaaaaaaaaaaaaaaaaaaaa

SEQ ID NO: 20682 - RNA, 1100 nt, Artificial Sequence
  SARS-CoV-2__MT520543.1__ORF3a protein mRNA gc
aggagagucccgcagucggcguccagcggcucugcuuguucgugugugugucguugcaggccuuauucaagcuuaccauggaccuguucaugcgcaucuucaccaucggcaccgugacgcucaagcagggggagaucaaggacgccacccccagcgacuucguccgggccaccgcgaccaucccgauccaggccucccugcccuucggcuggcugaucguggggguggcccuccuggccgucuuccacagcgccuccaagaucaucacgcugaagaagcgcuggcagcucgcgcugagcaagggcgugcacuucgugugcaaccugcuccugcuguucgucaccguguacucccaccuccugcugguggccgccgggcucgaggcccccuuccuguaccuguacgcgcucgucuacuuccugcagagcaucaacuucgugcggaucaucaugcgccuguggcucugcuggaagugccgguccaagaacccccugcuguacgacgccaacuacuuccucugcuggcacaccaacugcuacgacuacugcaucccguacaacagcgugaccuccagcaucgucaucacguccggcgacggcaccaccagccccaucuccgagcacgacuaccagaucgggggcuacaccgagaagugggagagcggggugaaggacugcgugguccugcacuccuacuucacgagcgacuacuaccagcugcacuccacccagcucagcaccgacaccggcguggagcacgugacguucuucaucuacaacaagaucgucgacgagcccgaggagcacgugcagauccacaccaucgacggguccagcggcguggucaaccccgugauggagccgaucuacgacgagcccaccaccacgaccagcgugccccugugaggacuagucccuguucccagagcccacuuuuuuuucuuuuuuugaaauaaaauagccugucuuucagaucucaaaggcucuuuucagagccaccaaaaaaaaaaaaaaaaaaaaaaaaaaaaaaaaaaaaaaaaaaaaaaaaaaaaaaaaaaaaaaaaaaaaaaaaaaaaaaaaaaaaaaaaaaaaaaaaaaaaa

SEQ ID NO: 20683 - RNA, 1100 nt, Artificial Sequence
  SARS-CoV-2__MT557568.1__ORF3a protein mRNA gc
aggagagucccgcagucggcguccagcggcucugcuuguucgugugugugucguugcaggccuuauucaagcuuaccauggaccuguucaugcgcaucuucaccaucggcaccgugacgcucaagcagggggagaucaaggacgccacccccagcgacuucguccgggccaccgcgaccaucccgauccaggccucccugcccuucggcuggcugaucguggggguggcccuccuggccgucugccagagcgccuccaagaucaucacgcugaagaagcgcuggcagcucgcgcugagcaagggcgugcacuucgugugcaaccugcuccugcuguucgucaccguguacucccaccuccugcugguggccgccgggcucgaggcccccuuccuguaccuguacgcgcucgucuacuuccugcagagcaucaacuucgugcggaucaucaugcgccuguggcucugcuggaagugccgguccaagaacccccugcuguacgacgccaacuacuuccucugcuggcacaccaacugcuacgacuacugcaucccguacaacagcgugaccuccagcaucgucaucacguccggcgacggcaccaccagccccaucuccgagcacgacuaccagaucgggggcuacaccgagaagugggagagcggggugaaggacugcgugguccugcacuccuacuucacgagcgacuacuaccagcuguacuccacccagcucagcaccgacaccggcguggagcacgugacguucuucaucuacaacaagaucgucgacgagcccgaggagcacgugcagauccacaccaucgacggguccagcggcguggucaaccccgugauggagccgaucuacgacgagcccaccaccacgaccagcgugccccugugaggacuagucccuguucccagagcccacuuuuuuuucuuuuuuugaaauaaaauagccugucuuucagaucucaaaggcucuuuucagagccaccaaaaaaaaaaaaaaaaaaaaaaaaaaaaaaaaaaaaaaaaaaaaaaaaaaaaaaaaaaaaaaaaaaaaaaaaaaaaaaaaaaaaaaaaaaaaaaaaaaaaa

SEQ ID NO: 20684 - RNA, 1100 nt, Artificial Sequence
  SARS-CoV-2__MT558689.1__ORF3a protein mRNA gc
aggagagucccgcagucggcguccagcggcucugcuuguucgugugugugucguugcaggccuuauucaagcuuaccauggaccuguucaugcgcaucuucaccaucggcaccgugacgcucaagcagggggagaucaaggacgccacccccagccacuucguccgggccaccgcgaccaucccgauccaggccucccugcccuucggcuggcugaucguggggguggcccuccuggccgucuuccagagcgccuccaagaucaucacgcugaagaagcgcuggcagcucgcgcugagcaagggcgugcacuucgugugcaaccugcuccugcuguucgucaccguguacucccaccuccugcugguggccgccgggcucgaggcccccuuccuguaccuguacgcgcucgucuacuuccugcagagcaucaacuucgugcggaucaucaugcgccuguggcucugcuggaagugccgguccaagaacccccugcuguacgacgccaacuacuuccucugcuggcacaccaacugcuacgacuacugcaucccguacaacagcgugaccuccagcaucgucaucacguccggcgacggcaccaccagccccaucuccgagcacgacuaccagaucgggggcuacaccgagaagugggagagcggggugaaggacugcgugguccugcacuccuacuucacgagcgacuacuaccagcuguacuccacccagcucagcaccgacaccggcguggagcacgugacguucuucaucuacaacaagaucgucgacgagcccgaggagcacgugcagauccacaccaucgacggguccagcggcguggucaaccccgugauggagccgaucuacgacgagcccaccaccacgaccagcgugccccugugaggacuagucccuguucccagagcccacuuuuuuuucuuuuuuugaaauaaaauagccugucuuucagaucucaaaggcucuuuucagagccaccaaaaaaaaaaaaaaaaaaaaaaaaaaaaaaaaaaaaaaaaaaaaaaaaaaaaaaaaaaaaaaaaaaaaaaaaaaaaaaaaaaaaaaaaaaaaaaaaaaaaa

SEQ ID NO: 20685 - RNA, 1100 nt, Artificial Sequence
  SARS-CoV-2__MT558698.1__ORF3a protein mRNA gc
aggagagucccgcagucggcguccagcggcucugcuuguucgugugugugucguugcaggccuuauucaagcuuaccauggaccuguucaugcgcaucuucaccaucggcaccgugacgcucaagcagggggagaucaaggacgccacccccagcgacuucguccgggccaccgcgaccaucccgauccccgccucccugcccuucggcuggcugaucguggggguggcccuccuggccgucuuccagagcgccuccaagaucaucacgcugaagaagcgcuggcagcucgcgcugagcaagggcgugcacuucgugugcaaccugcuccugcuguucgucaccguguacucccaccuccugcugguggccgccgggcucgaggcccccuuccuguaccuguacgcgcucgucuacuuccugcagagcaucaacuucgugcggaucaucaugcgccuguggcucugcuccaagugccggagcaagaacccgcugcuguacgacgccaacuacuuccucugcuggcacaccaacugcuacgacuacugcauccccuacaacuccgugaccagcuccaucgucaucacgagcggcgacggcaccaccucccccaucagcgagcacgacuaccagaucgggggcuacaccgagaagugggaguccggggugaaggacugcgugguccugcacagcuacuucacguccgacuacuaccagcuguacagcacccagcucuccaccgacaccggcguggagcacgugacguucuucaucuacaacaagaucgucgacgagcccgaggagcacgugcagauccacaccaucgacgggagcagcggcguggucaacccggugauggagcccaucuacgacgagcccaccaccacgaccuccgugccccugugaggacuagucccuguucccagagcccacuuuuuuuucuuuuuuugaaauaaaauagccugucuuucagaucucaaaggcucuuuucagagccaccaaaaaaaaaaaaaaaaaaaaaaaaaaaaaaaaaaaaaaaaaaaaaaaaaaaaaaaaaaaaaaaaaaaaaaaaaaaaaaaaaaaaaaaaaaaaaaaaaaaaa

SEQ ID NO: 20686 - RNA, 1100 nt, Artificial Sequence
  SARS-CoV-2__MT559801.1__ORF3a protein mRNA gc
aggagagucccgcagucggcguccagcggcucugcuuguucgugugugugucguugcaggccuuauucaagcuuaccauggaccuguucaugcgcaucuucaccaucggcaccgugacgcucaagcagggggagaucaaggacgccacccccagcgacuucguccgggccaccgcgaccaucccgauccaggccucccugcccuucggcuggcugaucguggggguggcccuccuggccgucuuccacagcgccuccaagaucaucacgcugaagaagcgcuggcagcucgcgcugagcaagggcgugcacuucgugugcaaccugcuccugcuguucgucaccguguacucccaccuccugcugguggccgccgggcucgaggcccccuuccuguaccuguacgcgcucgucuacuuccugcagagcaucaacuucgugcggaucaucaugcgccuguggcucugcuggaagugccgguccaagaacccccugcuguacgacgccaacuacuuccucugcuggcacaccaacugcuacgacuacugcaucccguacaacagcgugaccuccagcaucgucaucacguccggcgacggcaccaccagccccaucuccgagcacgacuaccagaucgggggcuacaccgagaagugggagagcggggugaaggacugcgugguccugcacuccuacuucacgagcgacuacuaccagcuguacuccacccagcucagcaccgacaccggcguggagcacgugacguucuucaucuacaacaagaucgucgacgagcccgaggagcacgugcugauccacaccaucgacggguccagcggcguggucaaccccgugauggagccgaucuacgacgagcccaccaccacgaccagcgugccccugugaggacuagucccuguucccagagcccacuuuuuuuucuuuuuuugaaauaaaauagccugucuuucagaucucaaaggcucuuuucagagccaccaaaaaaaaaaaaaaaaaaaaaaaaaaaaaaaaaaaaaaaaaaaaaaaaaaaaaaaaaaaaaaaaaaaaaaaaaaaaaaaaaaaaaaaaaaaaaaaaaaaaa

SEQ ID NO: 20687 - RNA, 1100 nt, Artificial Sequence
  SARS-CoV-2__MT528627.1__ORF3a protein mRNA gc
aggagagucccgcagucggcguccagcggcucugcuuguucgugugugugucguugcaggccuuauucaagcuuaccauggaccuguucaugcgcaucuucaccaucggcaccgugacgcucaagcagggggagaucaaggacgccacccccagcgacuucguccgggccaccgcgaccaucccgauccaggccucccugcccuucggcuggcugaucguggggguggcccuccuggccgucuuccagagcgccuccaagaucaucacgcugaagaagcgcuggcagcucgcgcugagcaagggcgugcacuucgugugcaaccugcuccugcuguucgucaccguguacucccacccccuccuggccgccgccgggcuggaggcgcccuuccucuaccuguacgcccugguguacuuccuccagagcaucaaccugguccggaucaucaugcgccuguggcucugcuggaagugccgguccaagaacccgcugcuguacgacgccaacuacuuccucugcuggcacaccaacugcuacgacuacugcauccccuacaacagcgugaccuccagcaucgugaucacguccggcgacggcaccaccagccccaucuccgagcacgacuaccagaucgggggcuacaccgagaagugggagagcggggucaaggacugcguggugcugcacuccuacuucacgagcgacuacuaccagcuguacuccacccagcucagcaccgacaccggcgucgagcacgugacguucuucaucuacaacaagaucguggacgagcccgaggagcacguccagauccacaccaucgacggguccagcggcguggugaacccggucauggagcccaucuacgacgagcccaccaccacgaccagcgugccccugugaggacuagucccuguucccagagcccacuuuuuuuucuuuuuuugaaauaaaauagccugucuuucagaucucaaaggcucuuuucagagccaccaaaaaaaaaaaaaaaaaaaaaaaaaaaaaaaaaaaaaaaaaaaaaaaaaaaaaaaaaaaaaaaaaaaaaaaaaaaaaaaaaaaaaaaaaaaaaaaaaaaaa

SEQ ID NO: 20688 - RNA, 1100 nt, Artificial Sequence
  SARS-CoV-2__MT533223.1__ORF3a protein mRNA gc
aggagagucccgcagucggcguccagcggcucugcuuguucgugugugugucguugcaggccuuauucaagcuuaccauggaccuguucaugcgcaucuucaccaucggcaccgugacgcucaagcagggggagaucaaggacgccacccccagcgacuucguccgggccaccgcgaccaucccgauccaggccucccugcccuucggcuggcugaucguggggguggcccuccuggccgucuuccagagcgccuccaagaucaucacgcugaagaagcgcuggcagcucgcgcugagcaagggcgugcacuucgugugcaaccugcuccugcuguucgucaccguguacucccaccuccugcugguggccgccgggcucgaggcccccuuccuguaccuguacgcgcucgucuacuuccugcagagcaucaacuucgugcggaucaucaugcgccugcuccugugcuggaagugccgguccaagaacccccugcucuacgacgccaacuacuuccugugcuggcacaccaacugcuacgacuacugcaucccguacaacagcgugaccuccagcaucgucaucacguccggcgacggcaccaccagccccaucuccgagcacgacuaccagaucgggggcuacaccgagaagugggagagcggggugaaggacugcgugguccugcacuccuacuucacgagcgacuacuaccagcucuacuccacccagcugagcaccgacaccggcguggagcacgugacguucuucaucuacaacaagaucgucgacgagcccgaggagcacgugcagauccacaccaucgacggguccagcggcguggucaaccccgugauggagccgaucuacgacgagcccaccaccacgaccagcgugccccugugaggacuagucccuguucccagagcccacuuuuuuuucuuuuuuugaaauaaaauagccugucuuucagaucucaaaggcucuuuucagagccaccaaaaaaaaaaaaaaaaaaaaaaaaaaaaaaaaaaaaaaaaaaaaaaaaaaaaaaaaaaaaaaaaaaaaaaaaaaaaaaaaaaaaaaaaaaaaaaaaaaaaa

SEQ ID NO: 20689 - RNA, 1100 nt, Artificial Sequence
  SARS-CoV-2__MT533225.1__ORF3a protein mRNA gc
aggagagucccgcagucggcguccagcggcucugcuuguucgugugugugucguugcaggccuuauucaagcuuaccauggaccuguucaugcgcaucuucaccaucggcaccgugacgcucaagcagggggagaucaaggacgccacccccagcgacuucguccgggccaccgcgaccaucccgauccaggccucccugcccuucggcuggcugaucguggggguggccauccucgccgucuuccacagcgccuccaagaucaucacgcugaagaagcgcuggcagcuggcgcucagcaagggcgugcacuucgugugcaaccugcugcuccuguucgucaccguguacucccaccuccugcugguggccgccgggcuggaggcccccuuccucuaccuguacgcgcuggucuacuuccuccagagcaucaacuucgugcggaucaucaugcgccuguggcugugcuggaagugccgguccaagaacccccuccuguacgacgccaacuacuuccugugcuggcacaccaacugcuacgacuacugcaucccguacaacagcgugaccuccagcaucgucaucacguccggcgacggcaccaccagccccaucuccgagcacgacuaccagaucgggggcuacaccgagaagugggagagcggggugaaggacugcgugguccuccacuccuacuucacgagcgacuacuaccagcuguacuccacccagcugagcaccgacaccggcguggagcacgugacguucuucaucuacaacaagaucgucgacgagcccgaggagcacgugcagauccacaccaucgacggguccagcggcguggucaaccccgugauggagccgaucuacgacgagcccaccaccacgaccagcgugccccucugaggacuagucccuguucccagagcccacuuuuuuuucuuuuuuugaaauaaaauagccugucuuucagaucucaaaggcucuuuucagagccaccaaaaaaaaaaaaaaaaaaaaaaaaaaaaaaaaaaaaaaaaaaaaaaaaaaaaaaaaaaaaaaaaaaaaaaaaaaaaaaaaaaaaaaaaaaaaaaaaaaaaa

SEQ ID NO: 20690 - RNA, 1100 nt, Artificial Sequence
  SARS-CoV-2__MT517425.1__ORF3a protein mRNA gc
aggagagucccgcagucggcguccagcggcucugcuuguucgugugugugucguugcaggccuuauucaagcuuaccauggaccuguucaugcgcaucuucaccaucggcaccgugacgcucaagcagggggagaucaaggacgccacccccagcgacuucguccgggccaccgcgaccaucccgauccaggccucccugcccuucggcuggcugaucguggggguggcccuccuggccgucuuccagagcgccuccaagaucaucacgcugaagaagcgcuggcagcucgcgcugagcaagggcgugcacuucgugugcaaccugcuccugcuguucgucaccguguacucccaccuccugcugguggccgccgggcucgaggcccccuuccuguaccuguacgcgcucgucuacuuccugcagagcaucaacuucgugcggaucaucaugcgccuguggcucugcuggaagugccgguccaagaacccccugcuguacgacgccaacuacuuccucugcuggcacaccaacugcuacgacuacugcaucccguacaacagcgugaccuccagcaucgucaucacguccggcgacggcaccaccagccccaucuccgagcacgacuaccagaucgggggcuacaccgagaagugcgagagcggggugaaggacugcgugguccugcacuccuacuucacgagcgacuacuaccagcuguacuccacccagcucagcaccgacaccggcguggagcacgugacguucuucaucuacaacaagaucgucgacgagcccgaggagcacgugcagauccacaccaucgacggguccagcggcguggucaaccccgugauggagccgaucuacgacgagcccaccaccacgaccagcgugccccugugaggacuagucccuguucccagagcccacuuuuuuuucuuuuuuugaaauaaaauagccugucuuucagaucucaaaggcucuuuucagagccaccaaaaaaaaaaaaaaaaaaaaaaaaaaaaaaaaaaaaaaaaaaaaaaaaaaaaaaaaaaaaaaaaaaaaaaaaaaaaaaaaaaaaaaaaaaaaaaaaaaaaa

SEQ ID NO: 20691 - RNA, 1100 nt, Artificial Sequence
  SARS-CoV-2__MT512443.1__ORF3a protein mRNA gc
aggagagucccgcagucggcguccagcggcucugcuuguucgugugugugucguugcaggccuuauucaagcuuaccauggaccuguucaugcgcaucuucaccaucggcaccgugacgcucaagcagggggagaucaaggacgccacccccagcgacuucguccgggccaccgcgaccaucccgauccaggccucccugcccuucggcuggcugaucguggggguggcccuccuggccgucuuccagagcgccuccaagaucaucacgcugaagaagcgcuggcagcucgcgcugagcaagggcgugcacuucgugugcaaccugcuccugcuguucgucaccguguacucccaccuccugcugguggccgccgggcucgaggcccccuuccuguaccuguacgcgcucgucuacuuccugcagagcaucaacuucgugcggaucaucaugcgccuguggcucugcuggaagugccgguccaagaacccccugcuguacgacgccaacuacuuccucugcuggcacaccaacugcuacgacuacugcaucccguacaacagcgugaccuccagcaucgucaucacguccggcgacggcaccaccagccccaucuccgagcacgacuaccagaucgggggcuacaccgagaagugggagagcggggugaaggacugcgugguccugcacuccuacuucacgagcgacuacuaccagcuguacuccacccagcucagcaccgacaccggcguggagcacgugacguucuucaucuacaacaagaucgucgacgagcccgaggagcacgugcagauccacaccaucgacggguccagcggcguggucaaccccgugauggagccgaucuacgacgagcccaccaccacgaucagcgugccccugugaggacuagucccuguucccagagcccacuuuuuuuucuuuuuuugaaauaaaauagccugucuuucagaucucaaaggcucuuuucagagccaccaaaaaaaaaaaaaaaaaaaaaaaaaaaaaaaaaaaaaaaaaaaaaaaaaaaaaaaaaaaaaaaaaaaaaaaaaaaaaaaaaaaaaaaaaaaaaaaaaaaaa

SEQ ID NO: 20692 - RNA, 1100 nt, Artificial Sequence
  SARS-CoV-2__MT509471.1__ORF3a protein mRNA gc
aggagagucccgcagucggcguccagcggcucugcuuguucgugugugugucguugcaggccuuauucaagcuuaccauggaccuguucaugcgcaucuucaccaucggcaccgugacgcucaagcagggggagaucaaggacgccacccccagcgacuucguccgggccaccgcgaccaucccgauccaggccucccugcccuucggcuggcugaucguggggguggcccuccuggccgucuuccacagcgccuccaagaucaucacgcugaagaagcgcuggcagcucgcgcugagcaagggcgugcacuucgugugcaaccugcuccugcuguucgucaccguguacucccaccuccugcugguggccgccgggcucgaggcccccuuccuguaccuguacgcccucuucuacuuccugcagagcaucaacuucguccggaucaucaugcgccuguggcucugcuggaagugccgguccaagaacccccugcuguacgacgcgaacuacuuccucugcuggcacaccaacugcuacgacuacugcaucccguacaacagcgugaccuccagcaucgugaucacguccggcgacggcaccaccagccccaucuccgagcacgacuaccagaucgggggcuacaccgagaagugggagagcggggucaaggacugcguggugcugcacuccuacuucacgagcgacuacuaccagcuguacuccacccagcucagcaccgacaccggcgucgagcacgugacguucuucaucuacaacaagaucguggacgagcccgaggagcacguccagauccacaccaucgacggguccagcggcguggugaaccccgucauggagccgaucuacgacgagcccaccaccacgaccagcgugccccugugaggacuagucccuguucccagagcccacuuuuuuuucuuuuuuugaaauaaaauagccugucuuucagaucucaaaggcucuuuucagagccaccaaaaaaaaaaaaaaaaaaaaaaaaaaaaaaaaaaaaaaaaaaaaaaaaaaaaaaaaaaaaaaaaaaaaaaaaaaaaaaaaaaaaaaaaaaaaaaaaaaaaa

SEQ ID NO: 20693 - RNA, 1100 nt, Artificial Sequence
  SARS-CoV-2__MT509503.1__ORF3a protein mRNA gc
aggagagucccgcagucggcguccagcggcucugcuuguucgugugugugucguugcaggccuuauucaagcuuaccauggaccuguucaugcgcaucuucaccaucggcaccgugacgcucaagcagggggagaucaaggacgccacccccagcgacuucguccgggccaccgcgaccacgccgauccaggccucccugcccuucggcuggcugaucguggggguggcccucuucgccgucuuccagagcgccuccaagaucaucacccugaagaagcgcuggcagcuggcgcucagcaagggcgugcacuucgugugcaaccugcugcuccuguucgucaccguguacucccaccuccugcugguggccgccgggcuggaggcccccuuccucuaccuguacgcgcuggucuacuuccuccagagcaucaacuucgugcggaucaucaugcgccuguggcugugcuggaagugccgguccaagaacccccuccuguacgacgccaacuacuuccugugcuggcacaccaacugcuacgacuacugcaucccguacaacagcgugacguccagcaucgucaucaccuccggcgacggcaccaccagccccaucuccgagcacgacuaccagaucgggggcuacacggagaagugggagagcggggugaaggacugcgugguccuccacuccuacuucaccagcgacuacuaccagcuguacuccacccagcugagcaccgacacgggcguggagcacgugaccuucuucaucuacaacaagaucgucgacgagcccgaggagcacgugcagauccacaccaucgacggguccagcggcguggucaaccccgugauggagccgaucuacgacgagcccaccacgaccaccagcgugccccucugaggacuagucccuguucccagagcccacuuuuuuuucuuuuuuugaaauaaaauagccugucuuucagaucucaaaggcucuuuucagagccaccaaaaaaaaaaaaaaaaaaaaaaaaaaaaaaaaaaaaaaaaaaaaaaaaaaaaaaaaaaaaaaaaaaaaaaaaaaaaaaaaaaaaaaaaaaaaaaaaaaaaa

SEQ ID NO: 20694 - RNA, 1100 nt, Artificial Sequence
  SARS-CoV-2__MT506535.1__ORF3a protein mRNA gc
aggagagucccgcagucggcguccagcggcucugcuuguucgugugugugucguugcaggccuuauucaagcuuaccauggaccuguucaugcgcaucuucaccaucggcaccgugacgcucaagcagggggagaucaaggacgccacccccagcgacuucguccgggccaccgcgaccaucccgauccaggccucccugcccuucggcuggcugaucguggggguggcccuccuggccgucuuccacagcgccuccaagaucaucacgcugaagaagcgcuggcagcucgcgcugagcaagggcgugcacuucgugugcaaccugcuccugcuguucgucaccguguacucccaccuccugcugguggccgccgggcucgaggcccccuuccuguaccuguacgcgcucgucuacuuccugcagagcaucaacuucgugcggaucaucaugcgccuguggcucugcuggaagugccgguccaagaacccccugcuguacgacgccaacuacuuccucugcuggcacaccaacugcuacgacuacugcaucccguacaacagcgugaccuccagcaucgucaucacguccggcgacggcaccaccagccccaucuccgagcacgacuaccagaucgggggcuacaccgagaagugggaguacggggugaaggacugcgugguccugcacagcuacuucacguccgacuacuaccagcuguacagcacccagcucuccaccgacaccggcguggagcacgugacguucuucaucuacaacaagaucgucgacgagcccgaggagcacgugcagauccacaccaucgacgggagcuccggcguggucaaccccgugauggagccgaucuacgacgagcccaccaccacgaccagcgugccccugugaggacuagucccuguucccagagcccacuuuuuuuucuuuuuuugaaauaaaauagccugucuuucagaucucaaaggcucuuuucagagccaccaaaaaaaaaaaaaaaaaaaaaaaaaaaaaaaaaaaaaaaaaaaaaaaaaaaaaaaaaaaaaaaaaaaaaaaaaaaaaaaaaaaaaaaaaaaaaaaaaaaaa

SEQ ID NO: 20695 - RNA, 1100 nt, Artificial Sequence
  SARS-CoV-2__MT506907.1__ORF3a protein mRNA gc
aggagagucccgcagucggcguccagcggcucugcuuguucgugugugugucguugcaggccuuauucaagcuuaccauggaccuguucaugcgcaucuucaccaucggcaccgugacgcucaagcagggggagaucaaggacgccacccccagcgacuucguccgggccaccgcgaccaucccgauccaggccucccugcccuucggcuggcugaucguggggguggcccuccuggccgucuuccagagcgccuccaagaucaucacgcugaagaagcgcuggcagcucgcgcugagcaagggcgugcacuucgugugcaaccugcuccugcuguucgucaccguguacucccaccuccugcugguggccgccgggcucgaggcccccuuccuguaccuguacgcgcucgucuacuuccugcagagcaucaacuucgugcggaucaucaugcgccuguggcucugcuggaagugccgguccaagaacccccugcuguacgacgccaacuacuuccucugcuggcacaccaacugcuacgacuacugcaucccguacaacagcgugaccuccagcaucgucaucacguccggcgacggcaccaccagccccaucuccgagcacgacuaccagaucgggggcuacaccgagaagugggagagcggggugaaggacugcgugguccugcacuccuacuucacgagcgacuacuaccagcuguacuccacccagcucagcaccgacaccggcguggagcacgugacguucuucaucuacaacaagaucgucgacgagcccgaggagcacgugcagauccacaccaucgacggguccagcggcguggucaaccccgugauggagccgaucugcgacgagcccaccaccacgaccagcgugccccugugaggacuagucccuguucccagagcccacuuuuuuuucuuuuuuugaaauaaaauagccugucuuucagaucucaaaggcucuuuucagagccaccaaaaaaaaaaaaaaaaaaaaaaaaaaaaaaaaaaaaaaaaaaaaaaaaaaaaaaaaaaaaaaaaaaaaaaaaaaaaaaaaaaaaaaaaaaaaaaaaaaaaa

SEQ ID NO: 20696 - RNA, 1100 nt, Artificial Sequence
  SARS-CoV-2__MT481905.1__ORF3a protein mRNA gc
aggagagucccgcagucggcguccagcggcucugcuuguucgugugugugucguugcaggccuuauucaagcuuaccauggaccuguucaugcgcaucuucaccaucggcaccgugacgcucaagcagggggagaucaaggacgccacccccagcgacuucguccgggccaccgcgaccaucccgauccaggccucccugcccuucggcuggcugaucguggggguggcccuccuggccgucuuccacagcgccuccaagaucaucacgcugaagaagcgcuggcagcucgcgcugagcaagggcgugcacuucgugugcaaccugcuccugugguucgucaccguguacucccaccuccugcugguggccgccgggcuggaggcccccuuccucuaccuguacgcgcuggucuacuuccuccagagcaucaacuucgugcggaucaucaugcgccuguggcugugcuggaagugccgguccaagaacccccuccuguacgacgccaacuacuuccugugcuggcacaccaacugcuacgacuacugcaucccguacaacagcgugaccuccagcaucgucaucacguccggcgacggcaccaccagccccaucuccgagcacgacuaccagaucgggggcuacaccgagaagugggagagcggggugaaggacugcgugguccuccacuccuacuucacgagcgacuacuaccagcuguacuccacccagcugagcaccgacaccggcguggagcacgugacguucuucaucuacaacaagaucgucgacgagcccgaggagcacgugcagauccacaccaucgacggguccagcggcguggucaaccccgugauggagccgaucuacgacgagcccaccaccacgaccagcgugccccucugaggacuagucccuguucccagagcccacuuuuuuuucuuuuuuugaaauaaaauagccugucuuucagaucucaaaggcucuuuucagagccaccaaaaaaaaaaaaaaaaaaaaaaaaaaaaaaaaaaaaaaaaaaaaaaaaaaaaaaaaaaaaaaaaaaaaaaaaaaaaaaaaaaaaaaaaaaaaaaaaaaaaa

SEQ ID NO: 20697 - RNA, 1100 nt, Artificial Sequence
  SARS-CoV-2__MT496972.1__ORF3a protein mRNA gc
aggagagucccgcagucggcguccagcggcucugcuuguucgugugugugucguugcaggccuuauucaagcuuaccauggaccuguucaugcgcaucuucaccaucggcaccgugacgcucaagcagggggagaucaaggacgccacccccagcgacuucguccgggccaccgcgaccaucccgauccaggccucccugcccuucggcuggcugaucguggggguggcccuccuggccgucuuccacagcgccuccaagaucaucacgcugaagaagcgcuggcagcucgcgcugagcaagggcuuccacuucgugugcaaccugcuccugcuguucgugaccgucuacucccaccuccugcugguggccgccgggcucgaggcccccuuccuguaccuguacgcgcucguguacuuccugcagagcaucaacuucguccggaucaucaugcgccuguggcucugcuggaagugccgguccaagaacccccugcuguacgacgccaacuacuuccucugcuggcacaccaacugcuacgacuacugcaucccguacaacagcgugaccuccagcaucgugaucacguccggcgacggcaccaccagccccaucuccgagcacgacuaccagaucgggggcuacaccgagaagugggagagcggggucaaggacugcguggugcugcacuccuacuucacgagcgacuacuaccagcuguacuccacccagcucagcaccgacaccggcgucgagcacgugacguucuucaucuacaacaagaucguggacgagcccgaggagcacguccagauccacaccaucgacggguccagcggcguggugaaccccgucauggagccgaucuacgacgagcccaccaccacgaccagcgugccccugugaggacuagucccuguucccagagcccacuuuuuuuucuuuuuuugaaauaaaauagccugucuuucagaucucaaaggcucuuuucagagccaccaaaaaaaaaaaaaaaaaaaaaaaaaaaaaaaaaaaaaaaaaaaaaaaaaaaaaaaaaaaaaaaaaaaaaaaaaaaaaaaaaaaaaaaaaaaaaaaaaaaaa

SEQ ID NO: 20698 - RNA, 1100 nt, Artificial Sequence
  SARS-CoV-2__MT496974.1__ORF3a protein mRNA gc
aggagagucccgcagucggcguccagcggcucugcuuguucgugugugugucguugcaggccuuauucaagcuuaccauggaccuguucaugcgcaucuucaccaucggcaccgugacgcucaagcagggggagaucaaggacgccacccccagcgacuucguccgggccaccgcgaccaucccgauccaggccucccugcccuucggcuggcugaucguggggguggcccuccuggccgucuuccacagcgccuccaagaucaucacgcugaagaagcgcuggcagcucgcgcugagcaagggcgugcacuucgugugcaaccugcuccugcuguucgucaccguguacucccaccuccugcugguggccgccgggcucgaggcccccuuccuguaccuguacgcgcucgucuacuuccugcagagcaucaacuucgugcggaucaucaugcgccuguggcucugcuggaagugccgguccaagaacccccugcuguacgacagcaacuacuuccucugcuggcacaccaacugcuacgacuacugcaucccguacaacuccgugaccagcuccaucgucaucacgagcggcgacggcaccaccucccccaucagcgagcacgacuaccagaucgggggcuacaccgagaagugggaguccggggugaaggacugcgugguccugcacagcuacuucacguccgacuacuaccagcuguacagcacccagcucuccaccgacaccggcguggagcacgugacguucuucaucuacaacaagaucgucgacgagcccgaggagcacgugcagauccacaccaucgacgggagcagcggcguggucaaccccgugauggagccgaucuacgacgagcccaccaccacgaccuccgugccccugugaggacuagucccuguucccagagcccacuuuuuuuucuuuuuuugaaauaaaauagccugucuuucagaucucaaaggcucuuuucagagccaccaaaaaaaaaaaaaaaaaaaaaaaaaaaaaaaaaaaaaaaaaaaaaaaaaaaaaaaaaaaaaaaaaaaaaaaaaaaaaaaaaaaaaaaaaaaaaaaaaaaaa

SEQ ID NO: 20699 - RNA, 1100 nt, Artificial Sequence
  SARS-CoV-2__MT270114.1__ORF3a protein mRNA gc
aggagagucccgcagucggcguccagcggcucugcuuguucgugugugugucguugcaggccuuauucaagcuuaccauggaccuguucaugcgcaucuucaccaucggcaccgugacgcucaagcagggggagaucaaggacgccacccugagcgacuucguccgggccaccgcgaccauccccauccaggccucccugccguucggcuggcucaucguggggguggcccugcuggccgucuuccagagcgccuccaagaucaucacgcucaagaagcgcuggcagcuggcgcugagcaagggcgugcacuucgugugcaaccuccugcugcuguucgucaccguguacucccaccuccugcucguggccgccgggcuggaggcccccuuccuguaccucuacgcgcuggucuacuuccugcagagcaucaacuucgugcggaucaucaugcgccucuggcugugcuggaagugccgguccaagaacccccugcucuacgacgccaacuacuuccugugcuggcacaccaacugcuacgacuacugcauccccuacaacagcgugaccuccagcaucgucaucacguccggcgacggcaccaccagcccgaucuccgagcacgacuaccagaucgggggcuacaccgagaagugggagagcggggugaaggacugcgugguccugcacuccuacuucacgagcgacuacuaccagcucuacuccacccagcugagcaccgacaccggcguggagcacgugacguucuucaucuacaacaagaucgucgacgagcccgaggagcacgugcagauccacaccaucgacggguccagcggcguggucaaccccgugauggagcccaucuacgacgagccgaccaccacgaccagcgugccccugugaggacuagucccuguucccagagcccacuuuuuuuucuuuuuuugaaauaaaauagccugucuuucagaucucaaaggcucuuuucagagccaccaaaaaaaaaaaaaaaaaaaaaaaaaaaaaaaaaaaaaaaaaaaaaaaaaaaaaaaaaaaaaaaaaaaaaaaaaaaaaaaaaaaaaaaaaaaaaaaaaaaaa

SEQ ID NO: 20700 - RNA, 1100 nt, Artificial Sequence
  SARS-CoV-2__MT477842.1__ORF3a protein mRNA gc
aggagagucccgcagucggcguccagcggcucugcuuguucgugugugugucguugcaggccuuauucaagcuuaccauggaccuguucaugcgcaucuucaccaucggcaccgugacgcucaagcagggggagaucaaggacgccacccccagcgacuucguccgggccaccgcgaccaucccgauccaggccucccugcccuucggcuggcugaucguggggguggcccuccuggccgucuuccacagcgccuccaagaucaucacgcugaagaagcgcuggcagcucgcgcugagcaagggcgugcacuucgugugcaaccugcuccugcuguucgucaccguguacucccaccuccugcugguggccgccgggcucgaggcccccuuccuguaccuguacgcgcucgucuacuuccugcagagcaucaacuucgugcggaucaucaugcgccuguggcucugcuggaagugccgguccaagaacccccugcuguacgacgccaacuacuuccucugcuggcacaccaacugcuacgacuacugcaucccguacaacagcgugaccuccagcaucgucaucacguccggcgacggcaccaccagccccaucuccgagcacgacuaccagaucgggggcuacaccgagaagugggagagcggggugaaggacugcgugguccugcacuccuacuucacgagcgacuacuaccagcuguacuccacccagcucagcaccgacacgugcguggagcacgugaccuucuucaucuacaacaagaucgucgacgagcccgaggagcacgugcagauccacaccaucgacggcuccagcgggguggucaaccccgugauggagccgaucuacgacgagcccaccaccacgaccagcgugccccugugaggacuagucccuguucccagagcccacuuuuuuuucuuuuuuugaaauaaaauagccugucuuucagaucucaaaggcucuuuucagagccaccaaaaaaaaaaaaaaaaaaaaaaaaaaaaaaaaaaaaaaaaaaaaaaaaaaaaaaaaaaaaaaaaaaaaaaaaaaaaaaaaaaaaaaaaaaaaaaaaaaaaa

SEQ ID NO: 20701 - RNA, 1100 nt, Artificial Sequence
  SARS-CoV-2__MT481929.1__ORF3a protein mRNA gc
aggagagucccgcagucggcguccagcggcucugcuuguucgugugugugucguugcaggccuuauucaagcuuaccauggaccuguucaugcgcaucuucaccaucggcaccgugacgcucaagcagggggagaucaaggacgccacccccagcgacuucguccgggccaucgcgaccaucccgauccaggccucccugcccuucggcuggcugaucguggggguggcccuccuggccgucuuccacagcgccuccaagaucaucacccugaagaagcgcuggcagcucgcgcugagcaagggcgugcacuucgugugcaaccugcuccugcuguucgucacgguguacucccaccuccugcugguggccgccgggcucgaggcccccuuccuguaccuguacgcgcucgucuacuuccugcagagcaucaacuucgugcggaucaucaugcgccuguggcucugcuggaagugccgguccaagaacccccugcuguacgacgccaacuacuuccucugcuggcacaccaacugcuacgacuacugcaucccguacaacagcgugaccuccagcaucgucaucaccuccggcgacggcacgaccagccccaucuccgagcacgacuaccagaucgggggcuacaccgagaagugggagagcggggugaaggacugcgugguccugcacuccuacuucaccagcgacuacuaccagcuguacuccacgcagcucagcaccgacaccggcguggagcacgugaccuucuucaucuacaacaagaucgucgacgagcccgaggagcacgugcagauccacacgaucgacggguccagcggcguggucaaccccgugauggagccgaucuacgacgagcccaccaccaccacgagcgugccccugugaggacuagucccuguucccagagcccacuuuuuuuucuuuuuuugaaauaaaauagccugucuuucagaucucaaaggcucuuuucagagccaccaaaaaaaaaaaaaaaaaaaaaaaaaaaaaaaaaaaaaaaaaaaaaaaaaaaaaaaaaaaaaaaaaaaaaaaaaaaaaaaaaaaaaaaaaaaaaaaaaaaaa

SEQ ID NO: 20702 - RNA, 1100 nt, Artificial Sequence
  SARS-CoV-2__MT482131.1__ORF3a protein mRNA gc
aggagagucccgcagucggcguccagcggcucugcuuguucgugugugugucguugcaggccuuauucaagcuuaccauggaccuguucaugcgcaucuucaccaucggcaccgugacgcucaagcagggggagaucaaggacgccacccccagcgacuucguccgggccaccgcgaccaucccgauccaggccucccugcccuucggcuggcugaucguggggguggcccuccuggccgucuuccacagcgccuccaagaucaucacgcugaagaagcgcuggcagcucgcgcugagcaagggcgugcacuucgugugcaaccugcuccugcuguucgucaccguguacucccaccuccugcugguggccgacgggcucgaggcccccuuccuguaccuguacgcccucgucuacuuccugcagagcaucaacuucgugcggaucaucaugcgccuguggcucugcuggaagugccgguccaagaacccccugcuguacgacgcgaacuacuuccucugcuggcacaccaacugcuacgacuacugcaucccguacaacagcgugaccuccagcaucgucaucacguccggcgacggcaccaccagccccaucuccgagcacgacuaccagaucgggggcuacaccgagaagugggagagcggggugaaggacugcgugguccugcacuccuacuucacgagcgacuacuaccagcuguacuccacccagcucagcaccgacaccggcguggagcacgugacguucuucaucuacaacaagaucgucgacgagcccgaggagcacgugcagauccacaccaucgacggguccagcggcguggucaaccccgugauggagccgaucuacgacgagcccaccaccacgaccagcgugccccugugaggacuagucccuguucccagagcccacuuuuuuuucuuuuuuugaaauaaaauagccugucuuucagaucucaaaggcucuuuucagagccaccaaaaaaaaaaaaaaaaaaaaaaaaaaaaaaaaaaaaaaaaaaaaaaaaaaaaaaaaaaaaaaaaaaaaaaaaaaaaaaaaaaaaaaaaaaaaaaaaaaaaa

SEQ ID NO: 20703 - RNA, 1100 nt, Artificial Sequence
  SARS-CoV-2__MT482149.1__ORF3a protein mRNA gc
aggagagucccgcagucggcguccagcggcucugcuuguucgugugugugucguugcaggccuuauucaagcuuaccauggaccuguucaugcgcaucuucaccaucggcaccgugacgcucaagcagggggagaucaaggacgccacccccagcgacuucguccgggccaccgcgaccaucccgauccaggccucccugcccuucggcuggcugaucguggggguggcccuccuggccgucuuccacagcgccuccaagaucaucacguucaagaagcgcuggcagcuggcgcucagcaagggcgugcacuucgugugcaaccugcugcuccuguucgucaccguguacucccaccuccugcugguggccgccgggcuggaggcccccuuccucuaccuguacgcgcuggucuacuuccuccagagcaucaacuucgugcggaucaucaugcgccuguggcugugcuggaagugccgguccaagaacccccuccuguacgacgccaacuacuuccugugcuggcacaccaacugcuacgacuacugcaucccguacaacagcgugaccuccagcaucgucaucacguccggcgacggcaccaccagccccaucuccgagcacgacuaccagaucgggggcuacaccgagaagugggagagcggggugaaggacugcgugguccuccacuccuacuucacgagcgacuacuaccagcuguacuccacccagcugagcaccgacacgugcguggagcacgugaccuucuucaucuacaacaagaucgucgacgagcccgaggagcacgugcagauccacaccaucgacggcuccagcgggguggucaaccccgugauggagccgaucuacgacgagcccaccaccacgaccagcgugccccucugaggacuagucccuguucccagagcccacuuuuuuuucuuuuuuugaaauaaaauagccugucuuucagaucucaaaggcucuuuucagagccaccaaaaaaaaaaaaaaaaaaaaaaaaaaaaaaaaaaaaaaaaaaaaaaaaaaaaaaaaaaaaaaaaaaaaaaaaaaaaaaaaaaaaaaaaaaaaaaaaaaaaa

SEQ ID NO: 20704 - RNA, 1100 nt, Artificial Sequence
  SARS-CoV-2__MT470120.1__ORF3a protein mRNA gc
aggagagucccgcagucggcguccagcggcucugcuuguucgugugugugucguugcaggccuuauucaagcuuaccauggaccuguucaugcgcaucuucaccaucggcaccgugacgcucaagcagggggagaucaaggacgccacccccagcgacuucguccgggccaccgcgaccaucccgauccaggccucccugcccuucggcuggcugaucguggggguggcccuccuggccgucuuccacagcgccuccaagaucaucacgcugaagaagcgcuggcagcucgcgcugagcaagggcgugcacuucgugugcaaccugcuccugcuguucgucaccguguacucccaccuccugcugguggccgccgggcucgaggcccccuuccuguaccuguacgcgcucgucuacuuccugcagagcaucaacuucgugcggaucaucaugcgccuguggcucugcuggaagugccgguccaagaacccccugcuguacgacgccaacuacuuccucugcuggcacaccaacugcuacgacuacugcaucccguacaacagcgugaccuccagcaucgucaucacguccggcgacggcaccaccagccccaucuccgagcacgacuaccagaucgggggcuacaccgagaagugggagagcggggugaaggacugcgugguccugcacuccuacuucacgagcgacuacuaccagcuguacuccacccagcucagcaccgacaccggcguggagcacgugacguucuucaucuacaacaagaucuucgacgagcccgaggagcacguccagauccacaccaucgacggguccagcggcguggugaaccccgucauggagccgaucuacgacgagcccaccaccacgaccagcgugccccugugaggacuagucccuguucccagagcccacuuuuuuuucuuuuuuugaaauaaaauagccugucuuucagaucucaaaggcucuuuucagagccaccaaaaaaaaaaaaaaaaaaaaaaaaaaaaaaaaaaaaaaaaaaaaaaaaaaaaaaaaaaaaaaaaaaaaaaaaaaaaaaaaaaaaaaaaaaaaaaaaaaaaa

SEQ ID NO: 20705 - RNA, 1100 nt, Artificial Sequence
  SARS-CoV-2__MT470125.1__ORF3a protein mRNA gc
aggagagucccgcagucggcguccagcggcucugcuuguucgugugugugucguugcaggccuuauucaagcuuaccauggaccuguucaugcgcaucuucaccaucggcaccgugacgcucaagcagggggagaucaaggacgccacccccagcgacuucguccgggccaccgcgaccaucccgauccaggccucccugcccuucggcuggcugaucguggggguggcccuccuggccgucuuccagagcgccuccaagaucaucacgcugaagaagcgcuggcagcucgcguucagcaagggcgugcacuucgugugcaaccugcugcuccuguucgucaccguguacucccaccuccugcugguggccgccgggcuggaggcccccuuccucuaccuguacgcgcuggucuacuuccuccagagcaucaacuucgugcggaucaucaugcgccuguggcugugcuggaagugccgguccaagaacccccuccuguacgacgccaacuacuuccugugcuggcacaccaacugcuacgacuacugcaucccguacaacagcgugaccuccagcaucgucaucacguccggcgacggcaccaccagccccaucuccgagcacgacuaccagaucgggggcuacaccgagaagugggagagcggggugaaggacugcgugguccuccacuccuacuucacgagcgacuacuaccagcuguacuccacccagcugagcaccgacaccggcguggagcacgugacguucuucaucuacaacaagaucgucgacgagcccgaggagcacgugcagauccacaccaucgacggguccagcggcguggucaaccccgugauggagccgaucuacgacgagcccaccaccacgaccagcgugccccucugaggacuagucccuguucccagagcccacuuuuuuuucuuuuuuugaaauaaaauagccugucuuucagaucucaaaggcucuuuucagagccaccaaaaaaaaaaaaaaaaaaaaaaaaaaaaaaaaaaaaaaaaaaaaaaaaaaaaaaaaaaaaaaaaaaaaaaaaaaaaaaaaaaaaaaaaaaaaaaaaaaaaa

SEQ ID NO: 20706 - RNA, 1100 nt, Artificial Sequence
  SARS-CoV-2__MT470132.1__ORF3a protein mRNA gc
aggagagucccgcagucggcguccagcggcucugcuuguucgugugugugucguugcaggccuuauucaagcuuaccauggaccuguucaugcgcaucuucaccaucggcaccgugacgcucaagcagggggagaucaaggacgccacccccagcgacuucguccgggccaccgcgaccaucccgauccaggccucccugcccuucggcuggcugaucguggggguggcccuccuggccgucuuccacagcgccuccaagaucaucacgcugaagaagcgcuggcagcucgcgcugagcaagggcgugcacuucgugugcaaccugcuccugcuguucgucaccguguacucccaccuccugcugguggccgucgggcucgaggcccccuuccuguaccuguacgcccucguguacuuccugcagagcaucaacuucgugcggaucaucaugcgccuguggcucugcuggaagugccgguccaagaacccccugcuguacgacgcgaacuacuuccucugcuggcacaccaacugcuacgacuacugcaucccguacaacagcgucaccuccagcaucgugaucacguccggcgacggcaccaccagccccaucuccgagcacgacuaccagaucgggggcuacaccgagaagugggagagcggggugaaggacugcgucgugcugcacuccuacuucacgagcgacuacuaccagcuguacuccacccagcucagcaccgacaccggcguggagcacgucacguucuucaucuacaacaagaucguggacgagcccgaggagcacgugcagauccacaccaucgacggguccagcggcgucgugaaccccgugauggagccgaucuacgacgagcccaccaccacgaccagcgucccccugugaggacuagucccuguucccagagcccacuuuuuuuucuuuuuuugaaauaaaauagccugucuuucagaucucaaaggcucuuuucagagccaccaaaaaaaaaaaaaaaaaaaaaaaaaaaaaaaaaaaaaaaaaaaaaaaaaaaaaaaaaaaaaaaaaaaaaaaaaaaaaaaaaaaaaaaaaaaaaaaaaaaaa

SEQ ID NO: 20707 - RNA, 1100 nt, Artificial Sequence
  SARS-CoV-2__MT470135.1__ORF3a protein mRNA gc
aggagagucccgcagucggcguccagcggcucugcuuguucgugugugugucguugcaggccuuauucaagcuuaccauggaccuguucaugcgcaucuucaccaucggcaccgugacgcucaagcagggggagaucaaggacgccacccccagcgacuucguccgggccaccgcgaccaucccgauccaggccucccugcccuucggcuggcugaucguggggguggcccuccuggccgucuuccacagcgccuccaagaucaucacgcugaagaagcgcuggcagcucgcgcugagcaagggcgugcacuucgugugcaaccugcuccugcuguucgucaccguguacucccaccuccugcugguggccgccgggcucgaggcccccuuccuguaccuguacgcgcucgucuacuuccugcagagcaucaacuucgugcggaucaucaugcgccuguggcucugcuggaagugccgguccaagaacccccugcuguacgacgccaacuacuuccucugcuggcacaccaacugcugcgacuacugcaucccguacaacagcgugaccuccagcaucgucaucacguccggcgacggcaccaccagccccaucuccgagcacgacuaccagaucgggggcuacaccgagaagugggagagcggggugaaggacugcgugguccugcacuccuacuucacgagcgacuacuaccagcuguacuccacccagcucagcaccgacaccggcguggagcacgugacguucuucaucuacaacaagaucgucgacgagcccgaggagcacgugcagauccacaccaucgacggguccagcggcguggucaaccccgugauggagccgaucuacgacgagcccaccaccacgaccagcgugccccugugaggacuagucccuguucccagagcccacuuuuuuuucuuuuuuugaaauaaaauagccugucuuucagaucucaaaggcucuuuucagagccaccaaaaaaaaaaaaaaaaaaaaaaaaaaaaaaaaaaaaaaaaaaaaaaaaaaaaaaaaaaaaaaaaaaaaaaaaaaaaaaaaaaaaaaaaaaaaaaaaaaaaa

SEQ ID NO: 20708 - RNA, 1100 nt, Artificial Sequence
  SARS-CoV-2__MT470172.1__ORF3a protein mRNA gc
aggagagucccgcagucggcguccagcggcucugcuuguucgugugugugucguugcaggccuuauucaagcuuaccauggaccuguucaugcgcaucuucaccaucggcaccgugacgcucaagcagggggagaucaaggacgccacccccagcgacuucguccgggccaccuccaccaucccgauccaggcgagccugcccuucggcuggcugaucguggggguggcccuccuggccgucuuccacuccgccagcaagaucaucacgcugaagaagcgcuggcagcucgcccuguccaagggcgugcacuucgugugcaaccugcuccugcuguucgucaccguguacagccaccuccugcugguggcggccgggcucgaggcccccuuccuguaccuguacgcccucgucuacuuccugcaguccaucaacuucgugcggaucaucaugcgccuguggcucugcuggaagugccggagcaagaacccccugcuguacgacgcgaacuacuuccucugcuggcacaccaacugcuacgacuacugcaucccguacaacuccgugaccagcuccaucgucaucacgagcggcgacggcaccaccucccccaucagcgagcacgacuaccagaucgggggcuacaccgagaagugggaguccggggugaaggacugcgugguccugcacagcuacuucacguccgacuacuaccagcuguacagcacccagcucuccaccgacaccggcguggagcacgugacguucuucaucuacaacaagaucgucgacgagcccgaggagcacgugcagauccacaccaucgacgggagcagcggcguggucaaccccgugauggagccgaucuacgacgagcccaccaccacgaccuccgugccccugugaggacuagucccuguucccagagcccacuuuuuuuucuuuuuuugaaauaaaauagccugucuuucagaucucaaaggcucuuuucagagccaccaaaaaaaaaaaaaaaaaaaaaaaaaaaaaaaaaaaaaaaaaaaaaaaaaaaaaaaaaaaaaaaaaaaaaaaaaaaaaaaaaaaaaaaaaaaaaaaaaaaaa

SEQ ID NO: 20709 - RNA, 1100 nt, Artificial Sequence
  SARS-CoV-2__MT459865.1__ORF3a protein mRNA gc
aggagagucccgcagucggcguccagcggcucugcuuguucgugugugugucguugcaggccuuauucaagcuuaccauggaccuguucaugcgcaucuucaccaucggcaccgugacgcucaagcagggggagaucaaggacgccacccccagcgacuucguccgggccaccgcgaccaucccgauccaggccucccugcccuucggcuggcugaucguggggguggcccuccuggccgucuuccagagcgccuccaagaucaucacgcugaagaagcgcuggcagcucgcgcugagcaagggcgugcacuucgugugcaaccugcuccugcuguucgucaccguguacucccaccuccugcugguggccgccgggcucgaggcccccuuccuguaccuguacgcgcucgucuacuuccugcagagcaucaacuucgugcggaucaucaugcgccuguggcucugcuggaagugccgguccaagaacccccugcuguacgacgccaacuacuuccucugcuggcacaccaacugcuacgacuacugcaucccguacaacagcgugaccuccagcaucgucaucacguccggcgacggcaccaccagccccaucuccgagcacgacuaccagaucgggggcuacaccgagaagugggagagcggggugaaggacugcgugguccugcacuccuacuucacgagcgacuacuaccagcuguacuccacccagcucagcaccgacaccggcguggagcacgugacguucuucaucuacaacaagaucgucgacgagcccgaggagcacgugcagauccacaccaucgacguguccagcggggucgugaaccccgugaucgagccgaucuacgacgagcccaccaccacgaccagcgucccccugugaggacuagucccuguucccagagcccacuuuuuuuucuuuuuuugaaauaaaauagccugucuuucagaucucaaaggcucuuuucagagccaccaaaaaaaaaaaaaaaaaaaaaaaaaaaaaaaaaaaaaaaaaaaaaaaaaaaaaaaaaaaaaaaaaaaaaaaaaaaaaaaaaaaaaaaaaaaaaaaaaaaaa

SEQ ID NO: 20710 - RNA, 1100 nt, Artificial Sequence
  SARS-CoV-2__MT459903.1__ORF3a protein mRNA gc
aggagagucccgcagucggcguccagcggcucugcuuguucgugugugugucguugcaggccuuauucaagcuuaccauggaccuguucaugcgcaucuucaccaucggcaccgugacgcucaagcagggggagaucaaggacgccacccccagcgacuucguccgggccaccgcgaccaucccgauccaggccucccugcccuucggcuggcugaucguggggguggcccuccuggccgucuuccagagcgccuccaagaucaucacgcugaagaagcgcuggcagcucgcgcugagcaagggcgugcacuucgugugcaaccugcuccugcuguucgucaccguguacucccaccuccugcugguggccgccgggcucgaggcccccuuccuguaccuguacgcgcucgucuacuuccugcagagcaucaacuucgugcggaucaucaugcgccuguggcucugcuggaagugccgguccaagaacccccugcuguacgacgccaacuacuuccucugcuggcacaccaacugcuacgacuacugcaucccguacaacagcgugaccuccagcaucgucaucacguccggcgacggcaccaccagccccaucuccgagcacgacuaccagaucgggggcuacaccgagaagugggagagcggggugaaggacugcgugguccugcacuccuacuucacgagcgacuacuaccagcuguacuccacccagcucagcaccgacaccggcguggagcacgugacguucuucaucuacaacaagaucgucgacgagcccguggagcacgugcagauccacaccaucgacggguccagcggcgucgugaaccccgugauggagccgaucuacgacgagcccaccaccacgaccagcgucccccugugaggacuagucccuguucccagagcccacuuuuuuuucuuuuuuugaaauaaaauagccugucuuucagaucucaaaggcucuuuucagagccaccaaaaaaaaaaaaaaaaaaaaaaaaaaaaaaaaaaaaaaaaaaaaaaaaaaaaaaaaaaaaaaaaaaaaaaaaaaaaaaaaaaaaaaaaaaaaaaaaaaaaa

SEQ ID NO: 20711 - RNA, 1100 nt, Artificial Sequence
  SARS-CoV-2__MT461646.1__ORF3a protein mRNA gc
aggagagucccgcagucggcguccagcggcucugcuuguucgugugugugucguugcaggccuuauucaagcuuaccauggaccuguucaugcgcaucuucaccaucggcaccgugacgcucaagcagggggagaucaaggacgccacccccagcgacuucguccgggccaccgcgaccaucccgauccaggccucccugcccuucggcuggcugaucguggggguggcccuccuggccgucuuccacagcgccuccaagaucaucacgcugaagaagcgcuggcagcucgcgcugagcaagggcgugcacuucgugugcaaccugcuccugcuguucgucaccguguacucccaccuccugcugguggccgccgggcucgaggcccccuuccuguaccuguacgcgagcgucuacuuccuccaguccaucaacuucgugcggaucaucaugcgccuguggcugugcuggaagugccggagcaagaacccccuccuguacgacgccaacuacuuccugugcuggcacaccaacugcuacgacuacugcaucccguacaacuccgugaccagcuccaucgucaucacgagcggcgacggcaccaccucccccaucagcgagcacgacuaccagaucgggggcuacaccgagaagugggaguccggggugaaggacugcgugguccuccacagcuacuucacguccgacuacuaccagcuguacagcacccagcuguccaccgacaccggcguggagcacgugacguucuucaucuacaacaagaucgucgacgagcccgaggagcacgugcagauccacaccaucgacgggagcagcggcguggucaaccccgugauggagccgaucuacgacgagcccaccaccacgaccuccgugccccucugaggacuagucccuguucccagagcccacuuuuuuuucuuuuuuugaaauaaaauagccugucuuucagaucucaaaggcucuuuucagagccaccaaaaaaaaaaaaaaaaaaaaaaaaaaaaaaaaaaaaaaaaaaaaaaaaaaaaaaaaaaaaaaaaaaaaaaaaaaaaaaaaaaaaaaaaaaaaaaaaaaaaa

SEQ ID NO: 20712 - RNA, 1100 nt, Artificial Sequence
  SARS-CoV-2__MT457392.1__ORF3a protein mRNA gc
aggagagucccgcagucggcguccagcggcucugcuuguucgugugugugucguugcaggccuuauucaagcuuaccauggaccuguucaugcgcaucuucaccaucggcaccgugacgcucaagcagggggagaucaaggacgccacccccagcgacuucguccgggccaccgcgaccaucccgauccaggccucccugcccuucggcuggcugaucguggggguggcccuccuggccgucuuccagagcgccuccaagaucaucacgcugaagaagcgcuggcagcucgcgcugagcaagggcgugcacuucgugugcaaccugcuccugcuguucgucaccguguacucccaccuccugcugguggccgccgggcucgaggcccccuuccuguaccuguacgcgcucgucuacuuccugcagagcaucaacuucgugcggaucaucaugcgccuguggcucugcuggaagugccgguccaagaacccccugcuguacgacgccaacuacuuccucugcuggcacaccaacugcuacgacuacugcaucccguacaacagcgugaccuccagcaucgucaucacguccggcgacggcaccaccagccccaucuccgagcacgacuaccagaucgggggcuacaccgagaagugggagagcggggugaaggacugcgugguccugcacuccuacuucacgagcgacuacuaccagcuguacuccacccaggugagcaccgacaccggcguggagcacgucacguucuucaucuacaacaagaucguggacgagcccgaggagcacgugcagauccacaccaucgacggguccagcggcgucgugaaccccgugauggagccgaucuacgacgagcccaccaccacgaccagcgucccccucugaggacuagucccuguucccagagcccacuuuuuuuucuuuuuuugaaauaaaauagccugucuuucagaucucaaaggcucuuuucagagccaccaaaaaaaaaaaaaaaaaaaaaaaaaaaaaaaaaaaaaaaaaaaaaaaaaaaaaaaaaaaaaaaaaaaaaaaaaaaaaaaaaaaaaaaaaaaaaaaaaaaaa

SEQ ID NO: 20713 - RNA, 1100 nt, Artificial Sequence
  SARS-CoV-2__MT457396.1__ORF3a protein mRNA gc
aggagagucccgcagucggcguccagcggcucugcuuguucgugugugugucguugcaggccuuauucaagcuuaccauggaccuguucaugcgcaucuucaccaucggcaccgugacgcucaagcagggggagaucaaggacgccacccccagcgacuucguccgggccaccgcggccaucccgauccaggccucccugcccuucggcuggcugaucguggggguggcccuccuggccgucuuccagagcgcguccaagaucaucacccugaagaagcgcuggcagcucgcccugagcaagggcgugcacuucgugugcaaccugcuccugcuguucgucacgguguacucccaccuccugcugguggccgccgggcucgaggcgcccuuccuguaccuguacgcccucgucuacuuccugcagagcaucaacuucgugcggaucaucaugcgccuguggcucugcuggaagugccgguccaagaacccccugcuguacgacgccaacuacuuccucugcuggcacaccaacugcuacgacuacugcaucccguacaacagcgugaccuccagcaucgucaucaccuccggcgacggcacgaccagccccaucuccgagcacgacuaccagaucgggggcuacaccgagaagugggagagcggggugaaggacugcgugguccugcacuccuacuucaccagcgacuacuaccagcuguacuccacgcagcucagcaccgacaccggcguggagcacgugaccuucuucaucuacaacaagaucgucgacgagcccgaggagcacgugcagauccacacgaucgacggguccagcggcguggucaaccccgugauggagccgaucuacgacgagcccaccaccaccacgagcgugccccugugaggacuagucccuguucccagagcccacuuuuuuuucuuuuuuugaaauaaaauagccugucuuucagaucucaaaggcucuuuucagagccaccaaaaaaaaaaaaaaaaaaaaaaaaaaaaaaaaaaaaaaaaaaaaaaaaaaaaaaaaaaaaaaaaaaaaaaaaaaaaaaaaaaaaaaaaaaaaaaaaaaaaa

SEQ ID NO: 20714 - RNA, 1103 nt, Artificial Sequence
  SARS-CoV-2__MT449656.1__ORF3a protein mRNA gc
aggagagucccgcagucggcguccagcggcucugcuuguucgugugugugucguugcaggccuuauucaagcuuaccauggaccuguucaugcgcaucuucaccaucggcaccgugacgcucaagcagggggagaucaaggacgccacccccagcgacuucguccgggccaccgcgaccaucccgauccaggccucccugcccuucggcuggcugaucguggggguggcccuccuggccgucuuccagagcgccuccaagaucaucacgcugaagaagcgcuggcagcucgcgcugagcaagggcgugcacuucgugugcaaccugcuccugcuguucgucaccguguacucccaccuccugcugguggccgccgggcucgaggcccccuuccuguaccuguacgcgcucgucuacuuccugcagagcaucaacuucgugcggaucaucaugcgccuguggcucugcuggaagugccgguccaagaacccccugcuguacgacgccaacuacuuccucugcuggcacaccaacugcuacgacuacugcaucccguacaacagcgugaccuccagcaucgucaucacguccggcgacggcaccaccagccccaucuccgagcacgacuaccagaucgggggcuacaccgagaagugggagagcggggugaaggacugcgugguccugcacuccuacuucacgagcgacuacuaccagcuguacuccacccagcucagcaccgacaccggcguggagcacgugacguucuucuucaucuacaacaagaucgucgacgagcccgaggagcacgugcagauccacaccaucgacggguccagcggcguggucaaccccgugauggagccgaucuacgacgagcccaccaccacgaccagcgugccccugugaggacuagucccuguucccagagcccacuuuuuuuucuuuuuuugaaauaaaauagccugucuuucagaucucaaaggcucuuuucagagccaccaaaaaaaaaaaaaaaaaaaaaaaaaaaaaaaaaaaaaaaaaaaaaaaaaaaaaaaaaaaaaaaaaaaaaaaaaaaaaaaaaaaaaaaaaaaaaaaaaaaaa

SEQ ID NO: 20715 - RNA, 1100 nt, Artificial Sequence
  SARS-CoV-2__MT451195.1__ORF3a protein mRNA gc
aggagagucccgcagucggcguccagcggcucugcuuguucgugugugugucguugcaggccuuauucaagcuuaccauggaccuguucaugcgcaucuucaccaucggcacccucacgcugaagcagggggagaucaaggacgccacccccagcgacuucgugcgggccaccgcgaccaucccgauccaggccucccugcccuucggcuggcucaucgucgggguggcccugcuggccguguuccagagcgccuccaagaucaucacgcucaagaagcgcuggcagcuggcgcugagcaagggcguccacuucgugugcaaccuccugcugcuguucgugaccgucuacucccaccuccugcucguggccgccgggcuggaggcccccuuccuguaccucuacgcgcugguguacuuccugcagagcaucaacuucguccggaucaucaugcgccucuggcugugcuggaagugccgguccaagaacccccugcucuacgacgccaacuacuuccugugcuggcacaccaacugcuacgacuacugcaucccguacaacagcgugaccuccagcaucgugaucacguccggcgacggcaucaccagccccaucuccgagcacgacuaccagaucgggggcuacaccgagaagugggagagcggggucaaggacugcguggugcugcacuccuacuucaccagcgacuacuaccagcucuacuccacgcagcugagcaccgacaccggcgucgagcacgugaccuucuucaucuacaacaagaucguggacgagcccgaggagcacguccagauccacacgaucgacggguccagcggcguggugaaccccgucauggagccgaucuacgacgagcccaccaccaccacgagcgugccccugugaggacuagucccuguucccagagcccacuuuuuuuucuuuuuuugaaauaaaauagccugucuuucagaucucaaaggcucuuuucagagccaccaaaaaaaaaaaaaaaaaaaaaaaaaaaaaaaaaaaaaaaaaaaaaaaaaaaaaaaaaaaaaaaaaaaaaaaaaaaaaaaaaaaaaaaaaaaaaaaaaaaaa

SEQ ID NO: 20716 - RNA, 1100 nt, Artificial Sequence
  SARS-CoV-2__MT451231.1__ORF3a protein mRNA gc
aggagagucccgcagucggcguccagcggcucugcuuguucgugugugugucguugcaggccuuauucaagcuuaccauggaccuguucaugcgcaucuucaccaucggcacccucacgcugaagcagggggagaucaaggacgccacccccagcgacuucgugcgggccaccgcgaccaucccgauccaggccucccugcccuucggcuggcucaucgucgggguggcccugcuggccguguuccagagcgccuccaagaucaucacgcucaagaagcgcuggcagcuggcgcugagcaagggcgucuacuucgugugcaaccuccugcugcuguucgugaccgucuacucccaccuccugcucguggccgccgggcuggaggcccccuuccuguaccucuacgcgcugguguacuuccugcagagcaucaacuucguccggaucaucaugcgccucuggcugugcuggaagugccgguccaagaacccccugcucuacgacgccaacuacuuccugugcuggcacaccaacugcuacgacuacugcaucccguacaacagcgugaccuccagcaucgugaucacguccggcgacggcaccaccagccccaucuccgagcacgacuaccagaucgggggcuacaccgagaagugggagagcggggucaaggacugcguggugcugcacuccuacuucacgagcgacuacuaccagcucuacuccacccagcugagcaccgacaccggcgucgagcacgugacguucuucaucuacaacaagaucguggacgagcccgaggagcacguccagauccacaccaucgacggguccagcggcguggugaaccccgucauggagccgaucuacgacgagcccaccaccacgaccagcgugccccugugaggacuagucccuguucccagagcccacuuuuuuuucuuuuuuugaaauaaaauagccugucuuucagaucucaaaggcucuuuucagagccaccaaaaaaaaaaaaaaaaaaaaaaaaaaaaaaaaaaaaaaaaaaaaaaaaaaaaaaaaaaaaaaaaaaaaaaaaaaaaaaaaaaaaaaaaaaaaaaaaaaaaa

SEQ ID NO: 20717 - RNA, 1100 nt, Artificial Sequence
  SARS-CoV-2__MT451255.1__ORF3a protein mRNA gc
aggagagucccgcagucggcguccagcggcucugcuuguucgugugugugucguugcaggccuuauucaagcuuaccauggaccuguucaugcgcaucuucaccaucggcaccgugacgcucaagcagggggagaucaaggacgccacccccagcgacuucguccgggccaccgcgaccaucccgauccaggccucccugcccuucggcuggcugaucguggggguggccauccucgccgucuuccagagcgccuccaagaucaucacgcugaagaagcgcuggcagcuggcgcucagcaagggcgugcacuucgugugcaaccugcugcuccuguucgucaccguguacucccaccuccugcugguggccgccgggcuggaggcccccuuccucuaccuguacgcgcuggucuacuuccuccagagcaucaacuucgugcggaucaucaugcgccuguggcugugcuggaagugccgguccaagaacccccuccuguacgacgccaacuacuuccugugcuggcacaccaacugcuacgacuacugcaucccguacaacagcgugaccuccagcaucgucaucacguccggcgacggcaccaccagccccaucuccgagcacgacuaccagaucgggggcuacaccgagaagugggagagcggggugaaggacugcgugguccuccacuccuacuucacgagcgacuacuaccagcuguacuccacccagcugagcaccgacaccggcguggagcacgugacguucuucaucuacaacaagaucgucgacgagcccgaggagcacgugcagauccacaccaucgacggguccagcggcguggucaaccccgugauggagccgaucuacgacgagcccaccaccacgaccagcgugccccucugaggacuagucccuguucccagagcccacuuuuuuuucuuuuuuugaaauaaaauagccugucuuucagaucucaaaggcucuuuucagagccaccaaaaaaaaaaaaaaaaaaaaaaaaaaaaaaaaaaaaaaaaaaaaaaaaaaaaaaaaaaaaaaaaaaaaaaaaaaaaaaaaaaaaaaaaaaaaaaaaaaaaa

SEQ ID NO: 20718 - RNA, 1100 nt, Artificial Sequence
  SARS-CoV-2__MT451755.1__ORF3a protein mRNA gc
aggagagucccgcagucggcguccagcggcucugcuuguucgugugugugucguugcaggccuuauucaagcuuaccauggaccuguucaugcgcaucuucaccaucggcaccgugacgcucaagcagggggagaucaaggacgccacccccagcgacuucguccgggccaccgcgaccaucccgauccaggccucccugcccuucggcuggcugaucguggggguggcccuccuggccgucuuccacagcgccuccaagaucaucacgcugaagaagcgcuggcagcucgcgcugagcaagggcgugcacuucgugugcaaccugcuccugcuguucgucaccguguacucccaccuccugcugguggccgccgggcucgaggcccccuuccuguaccuguacgcgcucgucuacuuccugcagagcaucaacuucgugcggaucaucaugcgccuguggcucugcuggaagugccgguccaagaacccccuguucuacgacgccaacuacuuccugugcuggcacaccaacugcuacgacuacugcaucccguacaacagcgugaccuccagcaucgucaucacguccggcgacggcaccaccagccccaucuccgagcacgacuaccagaucgggggcuacaccgagaagugggagagcggggugaaggacugcgugguccuccacuccuacuucacgagcgacuacuaccagcuguacuccacccagcugagcaccgacaccggcguggagcacgugacguucuucaucuacaacaagaucgucgacgagcccgaggagcacgugcagauccacaccaucgacggguccagcggcguggucaaccccgugauggagccgaucuacgacgagcccaccaccacgaccagcgugccccucugaggacuagucccuguucccagagcccacuuuuuuuucuuuuuuugaaauaaaauagccugucuuucagaucucaaaggcucuuuucagagccaccaaaaaaaaaaaaaaaaaaaaaaaaaaaaaaaaaaaaaaaaaaaaaaaaaaaaaaaaaaaaaaaaaaaaaaaaaaaaaaaaaaaaaaaaaaaaaaaaaaaaa

SEQ ID NO: 20719 - RNA, 1100 nt, Artificial Sequence
  SARS-CoV-2__MT446345.1__ORF3a protein mRNA gc
aggagagucccgcagucggcguccagcggcucugcuuguucgugugugugucguugcaggccuuauucaagcuuaccauggaccuguucaugcgcaucuucaccaucggcaccgugacgcucaagcagggggagaucaaggacgccacccccagcgacuucguccgggccaccgcgaccaucccgauccaggccucccugcccuucggcuggcugaucguggggguggcccuccuggccgucuuccacagcgccuccaagaucaucacgcugaagaagcgcuggcagcucgcgcugagcaagggcgugcacuucgugugcaaccugcuccugcuguucgucaccguguacucccaccuccugcugguggccgccgggcucgaggcccccuucuucuaccuguacgcgcuggucuacuuccuccagagcaucaacuucgugcggaucaucaugcgccuguggcugugcuggaagugccgguccaagaacccccuccuguacgacgccaacuacuuccugugcuggcacaccaacugcuacgacuacugcaucccguacaacagcgugaccuccagcaucgucaucacguccggcgacggcaccaccagccccaucuccgagcacgacuaccagaucgggggcuacaccgagaagugggagagcggggugaaggacugcgugguccuccacuccuacuucacgagcgacuacuaccagcuguacuccacccagcugagcaccgacaccggcguggagcacgugacguucuucaucuacaacaagaucgucgacgagcccgaggagcacgugcagauccacaccaucgacggguccagcggcguggucaaccccgugauggagccgaucuacgacgagcccaccaccacgaccagcgugccccucugaggacuagucccuguucccagagcccacuuuuuuuucuuuuuuugaaauaaaauagccugucuuucagaucucaaaggcucuuuucagagccaccaaaaaaaaaaaaaaaaaaaaaaaaaaaaaaaaaaaaaaaaaaaaaaaaaaaaaaaaaaaaaaaaaaaaaaaaaaaaaaaaaaaaaaaaaaaaaaaaaaaaa

SEQ ID NO: 20720 - RNA, 1100 nt, Artificial Sequence
  SARS-CoV-2__MT439244.1__ORF3a protein mRNA gc
aggagagucccgcagucggcguccagcggcucugcuuguucgugugugugucguugcaggccuuauucaagcuuaccauggaccuguucaugcgcaucuucaccaucggcaccgugacgcucaagcagggggagaucaaggacgccacccccagcgacuucguccgggccaccgcgaccaucccgauccaggccucccugcccuucggcuggcugaucguggggguggcccuccuggccgucuuccacagcgccuccaagaucaucacgcugaagaagcgcuggcagcucgcgcugagcaagggcgugcacuucgugugcaaccugcuccugcuguucgucaccguguacucccaccuccugcugguggccgccgggcucgaggcccccuuccuguaccuguacgcgcucgucuacuuccugcagagcaucaacuucgugcggaucaucaugcgccuguggcucugcuggaagugccgguccaagaacccccugcuguacgacgccaacuacuuccucugcuggcacaccaacugcuacgacuacugcaucccguacaacagcgugaccuccagcaucgucaucacguccggcgacggcaccaccagccccaucuccgagcacgacuaccagaucgggggcuacaccgagaagugggagagcggggugaaggacugcgugguccugcacuccuacuucacgagcgacuacuaccagcuguacuccacccagcucagcaccgacaucggcguggagcacgugaccuucuucaucuacaacaagaucgucgacgagcccgaggagcacgugcagauccacacgaucgacggguccagcggcguggucaaccccgugauggagccgaucuacgacgagcccaccaccaccacgagcgugccccugugaggacuagucccuguucccagagcccacuuuuuuuucuuuuuuugaaauaaaauagccugucuuucagaucucaaaggcucuuuucagagccaccaaaaaaaaaaaaaaaaaaaaaaaaaaaaaaaaaaaaaaaaaaaaaaaaaaaaaaaaaaaaaaaaaaaaaaaaaaaaaaaaaaaaaaaaaaaaaaaaaaaaa

SEQ ID NO: 20721 - RNA, 1100 nt, Artificial Sequence
  SARS-CoV-2__MT418882.1__ORF3a protein mRNA gc
aggagagucccgcagucggcguccagcggcucugcuuguucgugugugugucguugcaggccuuauucaagcuuaccauggaccuguucaugcgcaucuucaccaucggcaccgugacgcucaagcagggggagaucaaggacgccacccccagcgacuucguccgggccaccgcgaccaucccgauccaggccucccugcccuucggcuggcugaucguggggguggcccuccuggccgucuuccacagcgccuccaagaucaucacgcugaagaagcgcuggcagcucgcgcugagcaagggcgugcacuucgugugcaaccugcuccugcuguucgucaccguguacucccaccuccugcugguggccgccgggcucgaggcccccuuccuguaccuguacgcgcucgucuacuuccugcagagcaucaacuucgugcggaucaucaugcgccuguggcucugcuggaagugccgguccaagaacccccugcuguacgacgccaacuacuuccucugcuggcacaccaacugcuacgacuacugcaucccguacaacagcgugaccuccagcaucgucaucacguccggcgacggcaccaucagccccaucuccgagcacgacuaccagaucgggggcuacaccgagaagugggagagcggggugaaggacugcgugguccugcacuccuacuucaccagcgacuacuaccagcuguacuccacgcagcucagcaccgacaccggcguggagcacgugaccuucuucaucuacaacaagaucgucgacgagcccgaggagcacgugcagauccacacgaucgacggguccagcggcguggucaaccccgugauggagccgaucuacgacgagcccaccaccaccacgagcgugccccugugaggacuagucccuguucccagagcccacuuuuuuuucuuuuuuugaaauaaaauagccugucuuucagaucucaaaggcucuuuucagagccaccaaaaaaaaaaaaaaaaaaaaaaaaaaaaaaaaaaaaaaaaaaaaaaaaaaaaaaaaaaaaaaaaaaaaaaaaaaaaaaaaaaaaaaaaaaaaaaaaaaaaa

SEQ ID NO: 20722 - RNA, 1100 nt, Artificial Sequence
  SARS-CoV-2__MT412323.1__ORF3a protein mRNA gc
aggagagucccgcagucggcguccagcggcucugcuuguucgugugugugucguugcaggccuuauucaagcuuaccauggaccuguucaugcgcaucuucaccaucggcaccgugacgcucaagcagggggagaucaaggacgccacccccagcgacuucguccgggccaccgcgaccaucccgauccaggccucccugcccuucggcuggcugaucguggggguggcccuccuggccgucuuccagagcgccuccaagaucaucacgcugaagaagcgcuggcagcucgcgcugagcaagggcgugcacuucgugugcaaccugcuccugcuguucgucaccguguacucccaccuccugcugguggccgccgggcucgaggcccccuuccuguaccuguacgcgcucgucuacuuccugcagagcaucaacuucgugcggaucaucaugcgccuguggcucugcuggaagugccgguccaagaacccccugcuguacgacgccaacuacuuccucuacuggcacaccaacugcuacgacuacugcaucccguacaacagcgugaccuccagcaucgucaucacguccggcgacggcaccaccagccccaucuccgagcacgacuaccagaucgggggcuacaccgagaagugggagagcggggugaaggacugcgugguccugcacuccuacuucacgagcgacuacuaccagcuguacuccacccagcucagcaccgacaccggcguggagcacgugacguucuucaucuacaacaagaucgucgacgagcccgaggagcacgugcagauccacaccaucgacggguccagcggcguggucaaccccgugauggagccgaucuacgacgagcccaccaccacgaccagcgugccccugugaggacuagucccuguucccagagcccacuuuuuuuucuuuuuuugaaauaaaauagccugucuuucagaucucaaaggcucuuuucagagccaccaaaaaaaaaaaaaaaaaaaaaaaaaaaaaaaaaaaaaaaaaaaaaaaaaaaaaaaaaaaaaaaaaaaaaaaaaaaaaaaaaaaaaaaaaaaaaaaaaaaaa

SEQ ID NO: 20723 - RNA, 1100 nt, Artificial Sequence
  SARS-CoV-2__MT385434.1__ORF3a protein mRNA gc
aggagagucccgcagucggcguccagcggcucugcuuguucgugugugugucguugcaggccuuauucaagcuuaccauggaccuguucaugcgcaucuucaccaucggcaccgugacgcucaagcagggggagaucaaggacgccacccccagcgacuucguccgggccaccgcgaccaucccgauccaggccucccugcccuucggcuggcugaucguggggguggcccuccuggccgucuuccagagcgccuccaagaucaucacgcugaagaagcgcuggcagcucgcgcugagcaagggcgugcacuucgugugcaaccugcuccugcuguucgucaccguguacucccaccuccugcugguggccgccgggcucgaggcccccuuccuguaccuguacgcgcucgucuacuuccugcagagcaucaacuucgugcggaucaucaugucccuguggcucugcuggaagugccgcagcaagaacccccugcuguacgacgccaacuacuuccucugcuggcacaccaacugcuacgacuacugcaucccguacaacuccgugaccagcuccaucgucaucacgagcggcgacggcaccaccucccccaucagcgagcacgacuaccagaucgggggcuacaccgagaagugggaguccggggugaaggacugcgugguccugcacagcuacuucacguccgacuacuaccagcuguacagcacccagcucuccaccgacaccggcguggagcacgugacguucuucaucuacaacaagaucgucgacgagcccgaggagcacgugcagauccacaccaucgacgggagcagcggcguggucaaccccgugauggagccgaucuacgacgagcccaccaccacgaccuccgugccccugugaggacuagucccuguucccagagcccacuuuuuuuucuuuuuuugaaauaaaauagccugucuuucagaucucaaaggcucuuuucagagccaccaaaaaaaaaaaaaaaaaaaaaaaaaaaaaaaaaaaaaaaaaaaaaaaaaaaaaaaaaaaaaaaaaaaaaaaaaaaaaaaaaaaaaaaaaaaaaaaaaaaaa

SEQ ID NO: 20724 - RNA, 1100 nt, Artificial Sequence
  SARS-CoV-2__MT375441.1__ORF3a protein mRNA gc
aggagagucccgcagucggcguccagcggcucugcuuguucgugugugugucguugcaggccuuauucaagcuuaccauggaccuguucaugcgcaucuucaccaucggcaccgugacgcucaagcagggggagaucaaggacgccacccccagcgacuucguccgggccaccgcgaccaucccgauccaggccucccugcccuucggcuggcugaucguggggguggcccuccuggccgucuuccagagcgccuccaagaucaucacgcugaagaagcgcuggcagcucgcgcugagcaagggcgugcacuucgugugcaaccugcuccugcuguucgucaccguguacucccaccucuuccugguggccgccgggcuggaggcccccuuccucuaccuguacgcgcuggucuacuuccuccagagcaucaacuucgugcggaucaucaugcgccuguggcugugcuggaagugccgguccaagaacccccuccuguacgacgccaacuacuuccugugcuggcacaccagcugcuacgacuacugcaucccguacaacuccgugaccagcuccaucgucaucacgagcggcgacggcaccaccucccccaucagcgagcacgacuaccagaucgggggcuacaccgagaagugggaguccggggugaaggacugcgugguccuccacagcuacuucacguccgacuacuaccagcuguacagcacccagcuguccaccgacaccggcguggagcacgugacguucuucaucuacaacaagaucgucgacgagcccgaggagcacgugcagauccacaccaucgacgggagcagcggcguggucaaccccgugauggagccgaucuacgacgagcccaccaccacgaccuccgugccccucugaggacuagucccuguucccagagcccacuuuuuuuucuuuuuuugaaauaaaauagccugucuuucagaucucaaaggcucuuuucagagccaccaaaaaaaaaaaaaaaaaaaaaaaaaaaaaaaaaaaaaaaaaaaaaaaaaaaaaaaaaaaaaaaaaaaaaaaaaaaaaaaaaaaaaaaaaaaaaaaaaaaaa

SEQ ID NO: 20725 - RNA, 1100 nt, Artificial Sequence
  SARS-CoV-2__MT375459.1__ORF3a protein mRNA gc
aggagagucccgcagucggcguccagcggcucugcuuguucgugugugugucguugcaggccuuauucaagcuuaccauggaccuguucaugcgcaucuucaucaucggcaccgugacccucaagcagggggagaucaaggacgccacgcccagcgacuucguccgggccaccgcgaccaucccgauccaggccucccugcccuucggcuggcugaucguggggguggcccuccuggccgucuuccagagcgccuccaagaucaucacccugaagaagcgcuggcagcucgcgcugagcaagggcgugcacuucgugugcaaccugcuccugcuguucgucacgguguacucccaccuccugcugguggccgccgggcucgaggcccccuuccuguaccuguacgcgcucgucuacuuccugcagagcaucaacuucgugcggaucaucaugcgccuguggcucugcuggaagugccgguccaagaacccccugcuguacgacgccaacuacuuccucugcuggcacaccaacugcuacgacuacugcaucccguacaacagcgugaccuccagcaucgucaucaccuccggcgacggcacgaccagccccaucuccgagcacgacuaccagaucgggggcuacaccgagaagugggagagcggggugaaggacugcgugguccugcacuccuacuucaccagcgacuacuaccagcuguacuccacgcagcucagcaccgacaccggcguggagcacgugaccuucuucaucuacaacaagaucgucgacgagcccgaggagcacgugcagauccacacgaucgacggguccagcggcguggucaaccccgugauggagccgaucuacgacgagcccaccaccaccacgagcgugccccugugaggacuagucccuguucccagagcccacuuuuuuuucuuuuuuugaaauaaaauagccugucuuucagaucucaaaggcucuuuucagagccaccaaaaaaaaaaaaaaaaaaaaaaaaaaaaaaaaaaaaaaaaaaaaaaaaaaaaaaaaaaaaaaaaaaaaaaaaaaaaaaaaaaaaaaaaaaaaaaaaaaaaa

SEQ ID NO: 20726 - RNA, 1100 nt, Artificial Sequence
  SARS-CoV-2__MT375470.1__ORF3a protein mRNA gc
aggagagucccgcagucggcguccagcggcucugcuuguucgugugugugucguugcaggccuuauucaagcuuaccauggaccuguucaugcgcaucuucaccaucggcaccgugacgcucaagcagggggagaucaaggacgccacccccagcgacuucguccgggccaccgcgaccaucccgauccaggccucccugcccuucggcuggcugaucguggggguggcccuccuggccgucuuccacagcgccuccaagaucaucacgcugaagaagcgcuggcagcucgcgcugagcaagggcgugcacuucgugugcaaccugcuccugcuguucgucaccguguacucccaccuccugcugguggccgccgggcucgaggcccccuuccuguaccuguacgcgcucgucuacugccugcagagcaucaacuucgugcggaucaucaugcgccuguggcucugcuggaagugccgguccaagaacccccugcuguacgacgccaacuacuuccucugcuggcacaccaacugcuacgacuacugcaucccguacaacagcgugaccuccagcaucgucaucacguccggcgacggcaccaccagccccaucuccgagcacgacuaccagaucgggggcuacaccgagaagugggagagcggggugaaggacugcgugguccugcacuccuacuucacgagcgacuacuaccagcuguacuccacccagcucagcaccgacaccggcguggagcacgugacguucuucaucuacaacaagaucgucgacgagcccgaggagcacgugcagauccacaccaucgacggguccagcggcguggucaaccccgugauggagccgaucuacgacgagcccaccaccacgaccagcgugccccugugaggacuagucccuguucccagagcccacuuuuuuuucuuuuuuugaaauaaaauagccugucuuucagaucucaaaggcucuuuucagagccaccaaaaaaaaaaaaaaaaaaaaaaaaaaaaaaaaaaaaaaaaaaaaaaaaaaaaaaaaaaaaaaaaaaaaaaaaaaaaaaaaaaaaaaaaaaaaaaaaaaaaa

SEQ ID NO: 20727 - RNA, 1100 nt, Artificial Sequence
  SARS-CoV-2__MT374112.1__ORF3a protein mRNA gc
aggagagucccgcagucggcguccagcggcucugcuuguucgugugugugucguugcaggccuuauucaagcuuaccauggaccuguucaugcgcaucuucaccaucggcaccgugacgcucaagcagggggagaucaaggacgccacccccagcgacuucguccgggccaccgcgaccaucccgauccaggccucccugcccuucggcuggcugaucguggggguggcccuccuggccgucuuccacagcgccuccaagaucaucacgcugaagaagcgcuggcagcucgcgcugagcaagggcgugcacuucgugugcaaccugcuccugcuguucgucaccguguacucccaccuccugcugguggccgccgggcucgaggcccccuuccuguaccuguacgcgcucgucuacuuccugcagagcaucaacuucgugcggaucaucauccgccuguggcucugcuggaagugccgguccaagaacccccugcuguacgacgccaacuacuuccucugcuggcacaccaacugcuacgacuacugcaucccguacaacagcgugaccuccagcaucgucaucacguccggcgacggcaccaccagccccaucuccgagcacgacuaccagaucgggggcuacaccgagaagugggagagcggggugaaggacugcgugguccugcacuccuacuucacgagcgacuacuaccagcuguacuccacccagcucagcaccgacaccggcguggagcacgugacguucuucaucuacaacaagaucgucgacgagcccgaggagcacgugcagauccacaccaucgacggguccagcggcguggucaaccccgugauggagccgaucuacgacgagcccaccaccacgaccagcgugccccugugaggacuagucccuguucccagagcccacuuuuuuuucuuuuuuugaaauaaaauagccugucuuucagaucucaaaggcucuuuucagagccaccaaaaaaaaaaaaaaaaaaaaaaaaaaaaaaaaaaaaaaaaaaaaaaaaaaaaaaaaaaaaaaaaaaaaaaaaaaaaaaaaaaaaaaaaaaaaaaaaaaaaa

SEQ ID NO: 20728 - RNA, 1100 nt, Artificial Sequence
  SARS-CoV-2__MT252680.1__ORF3a protein mRNA gc
aggagagucccgcagucggcguccagcggcucugcuuguucgugugugugucguugcaggccuuauucaagcuuaccauggaccuguucaugcgcaucuucaccaucggcaccgugacgcucaagcagggggagaucaaggacgccacccccagcgacuucguccgggccaccgcgaccaucccgauccaggccucccugcccuucggcuggcugaucguggggguggcccuccuggccgucuuccagagcgccuccaagaucaucacgcugaagaagcgcuggcagcucgcgcugagcaagggcgugcacuucgugugcaaccugcuccugcuguucgucaccguguacucccaccuccugcugguggccgccgggcucgaggcccccuuccuguaccuguacgcgcucgucuacuuccugcagagcaucaacuucgugcggaucaucaugcgccuguggcucugcuggaagugccgguccaagaacccccugcuguacgacgccaacuacuuccucugcuggcacaccaacugcuacgacuacugcaucccguacaacagcgugaccuccagcaucgucaucacguccggcgacggcaccaccagccccaucuccgagcacgacuaccagaucgggggcuacaccgagaagugggagagcggggugaaggacugcgugguccugcacuccuacuucacgagcgacuacuaccagcuguacuccacccagcucagcaccgacaccgugguggagcacgucacguucuucaucuacaacaagaucguggacgagcccgaggagcacgugcagauccacaccaucgacggcuccagcggggucgugaaccccgugauggagccgaucuacgacgagcccaccaccacgaccagcgucccccugugaggacuagucccuguucccagagcccacuuuuuuuucuuuuuuugaaauaaaauagccugucuuucagaucucaaaggcucuuuucagagccaccaaaaaaaaaaaaaaaaaaaaaaaaaaaaaaaaaaaaaaaaaaaaaaaaaaaaaaaaaaaaaaaaaaaaaaaaaaaaaaaaaaaaaaaaaaaaaaaaaaaaa

SEQ ID NO: 20729 - RNA, 1100 nt, Artificial Sequence
  SARS-CoV-2__MT371047.1__ORF3a protein mRNA gc
aggagagucccgcagucggcguccagcggcucugcuuguucgugugugugucguugcaggccuuauucaagcuuaccauggaccuguucaugcgcaucuucaccaucggcaccgugacgcucaagcagggggagaucaaggacgccacccccagcgacuucguccgggccaccgcgaccaucccgauccaggccucccugcccuucggcuggcugaucguggggguggcccuccuggccgucuuccagagcgccuccaagaucaucacgcugaagaagcgcuggcagcucgcgcugagcaagggcgugcacuucgugugcaaccugcuccugcuguucgucaccguguacucccaccuccugcugguggccgccgggcucgaggcccccuuccuguaccuguacgcgcucgucuacuuccugcagagcaucaacuucgugcggaucaucaugcgccuguggcucugcuggaagugccgguccaagaacccccugcuguacgacgccaacuacuuccucugcuggcacaccaacugcuacgacuacugcaucccguacaacagcgugaccuccagcaucgucaucacguccggcgacggcaccaccagccccaucuccgagcacgacuaccagaucgggggcuacaccgagaagugggagagcggggugaaggacugcgugguccugcacuccuacuucacgagcgacuacuaccagcuguacuccacccagcucagcaccgacaccggcguggagcacgugacguucuucaucuacaacaagaucgucgacgagcccgaggagcacgugcagauccacaccaucgacggguccagcggcguggucaaccccgugauggagccgauguacgacgagcccaccaccacgaccagcgugccccugugaggacuagucccuguucccagagcccacuuuuuuuucuuuuuuugaaauaaaauagccugucuuucagaucucaaaggcucuuuucagagccaccaaaaaaaaaaaaaaaaaaaaaaaaaaaaaaaaaaaaaaaaaaaaaaaaaaaaaaaaaaaaaaaaaaaaaaaaaaaaaaaaaaaaaaaaaaaaaaaaaaaaa

SEQ ID NO: 20730 - RNA, 1100 nt, Artificial Sequence
  SARS-CoV-2__MT370848.1__ORF3a protein mRNA gc
aggagagucccgcagucggcguccagcggcucugcuuguucgugugugugucguugcaggccuuauucaagcuuaccauggaccuguucaugcgcaucuucaccaucggcaccgugacgcucaagcagggggagaucaaggacgccacccccagcgacuucguccgggccaccgcgaccaucccgauccaggccucccugcccuucggcuggcugaucgugggggccgcccuccuggccguguuccagagcgcguccaagaucaucacgcugaagaagcgcuggcagcucgcccugagcaagggcguccacuucgugugcaaccugcuccugcuguucgugaccgucuacucccaccuccugcugguggccgccgggcucgaggcgcccuuccuguaccuguacgcccucguguacuuccugcagagcaucaacuucguccggaucaucaugcgccuguggcucugcuggaagugccgguccaagaacccccugcuguacgacgccaacuacuuccucugcuggcacaccaacugcuacgacuacugcaucccguacaacagcgugaccuccagcaucgugaucacguccggcgacggcaccaccagccccaucuccgagcacgacuaccagaucgggggcuacaccgagaagugggagagcggggucaaggacugcguggugcugcacuccuacuucacgagcgacuacuaccagcuguacuccacccagcucagcaccgacaccggcgucgagcacgugacguucuucaucuacaacaagaucguggacgagcccgaggagcacguccagauccacaccaucgacggguccagcggcguggugaaccccgucauggagccgaucuacgacgagcccaccaccacgaccagcgugccccugugaggacuagucccuguucccagagcccacuuuuuuuucuuuuuuugaaauaaaauagccugucuuucagaucucaaaggcucuuuucagagccaccaaaaaaaaaaaaaaaaaaaaaaaaaaaaaaaaaaaaaaaaaaaaaaaaaaaaaaaaaaaaaaaaaaaaaaaaaaaaaaaaaaaaaaaaaaaaaaaaaaaaa

SEQ ID NO: 20731 - RNA, 1100 nt, Artificial Sequence
  SARS-CoV-2__MT370869.1__ORF3a protein mRNA gc
aggagagucccgcagucggcguccagcggcucugcuuguucgugugugugucguugcaggccuuauucaagcuuaccauggaccuguucaugcgcaucuucaccaucggcaccgugacgcucaagcagggggagaucaaggacgccacccccagcgacuucguccgggccaccgcgaccaucccgauccaggccucccugcccuucggcuggcugaucguggggguggcccuccuggccgucuuccagagcgccuccaacaucaucacgcugaagaagcgcuggcagcucgcgcugagcaagggcgugcacuucgugugcaaccugcuccugcuguucgucaccguguacucccaccuccugcugguggccgccgggcucgaggcccccuuccuguaccuguacgcgcucgucuacuuccugcagagcaucaacuucgugcggaucaucaugcgccuguggcucugcuggaagugccgguccaagaacccccugcuguacgacgccaacuacuuccucugcuggcacaccaacugcuacgacuacugcaucccguacaacagcgugaccuccagcaucgucaucacguccggcgacggcaccaccagccccaucuccgagcacgacuaccagaucgggggcuacaccgagaagugggagagcggggugaaggacugcgugguccugcacuccuacuucacgagcgacuacuaccagcuguacuccacccagcucagcaccgacaccggcguggagcacgugacguucuucaucuacaacaagaucgucgacgagcccgaggagcacgugcagauccacaccaucgacggguccagcggcguggucaaccccgugauggagccgaucuacgacgagcccaccaccacgaccagcgugccccugugaggacuagucccuguucccagagcccacuuuuuuuucuuuuuuugaaauaaaauagccugucuuucagaucucaaaggcucuuuucagagccaccaaaaaaaaaaaaaaaaaaaaaaaaaaaaaaaaaaaaaaaaaaaaaaaaaaaaaaaaaaaaaaaaaaaaaaaaaaaaaaaaaaaaaaaaaaaaaaaaaaaaa

SEQ ID NO: 20732 - RNA, 1100 nt, Artificial Sequence
  SARS-CoV-2__MT371038.1__ORF3a protein mRNA gc
aggagagucccgcagucggcguccagcggcucugcuuguucgugugugugucguugcaggccuuauucaagcuuaccauggaccuguucaugcgcaucuucaccaucggcaccgugacgcucaagcagggggagaucaaggacgccacccccagcgacuucguccgggccaccgcgaccaucccgauccaggccucccugcccuucggcuggcugaucguggggguggcccuccuggccgucuuccacagcgccuccaagaucaucacgcugaagaagcgcuggcagcucgcgcugagcaagggcgugcacuucgugugcaaccugcuccugcuguucgucaccguguacucccaccuccugcugguggccgccgggcucgaggcccccuuccuguaccuguacgcgcucgucuacuuccugcacagcaucaacuucgugcggaucaucaugcgccuguggcucugcuggaagugccgguccaagaacccccugcuguacgacgccaacuacuuccucugcuggcacaccaacugcuacgacuacugcaucccguacaacagcgugaccuccagcaucgucaucacguccggcgacggcaccaccagccccaucuccgagcacgacuaccagaucgggggcuacaccgagaagugggagagcggggugaaggacugcgugguccugcacuccuacuucacgagcgacuacuaccagcuguacuccacccagcucagcaccgacaccggcguggagcacgugacguucuucaucuacaacaagaucgucgacgagcccgaggagcacgugcagauccacaccaucgacggguccagcggcguggucaaccccgugauggagccgaucuacgacgagcccaccaccacgaccagcgugccccugugaggacuagucccuguucccagagcccacuuuuuuuucuuuuuuugaaauaaaauagccugucuuucagaucucaaaggcucuuuucagagccaccaaaaaaaaaaaaaaaaaaaaaaaaaaaaaaaaaaaaaaaaaaaaaaaaaaaaaaaaaaaaaaaaaaaaaaaaaaaaaaaaaaaaaaaaaaaaaaaaaaaaa

SEQ ID NO: 20733 - RNA, 1100 nt, Artificial Sequence
  SARS-CoV-2__MT358656.1__ORF3a protein mRNA gc
aggagagucccgcagucggcguccagcggcucugcuuguucgugugugugucguugcaggccuuauucaagcuuaccauggaccuguucaugcgcaucuucaagaucggcaccgugacccucaagcagggggagaucaaggacgccacgcccagcgacuucguccgggccaccgcgaccaucccgauccaggccucccugcccuucggcuggcugaucguggggguggcccuccuggccgucuuccagagcgccuccaagaucaucacccugaagaagcgcuggcagcucgcgcugagcaagggcgugcacuucgugugcaaccugcuccugcuguucgucacgguguacucccaccuccugcugguggccgccgggcucgaggcccccuuccuguaccuguacgcgcucgucuacuuccugcagagcaucaacuucgugcggaucaucaugcgccuguggcucugcuggaagugccgguccaagaacccccugcuguacgacgccaacuacuuccucugcuggcacaccaacugcuacgacuacugcaucccguacaacagcgugaccuccagcaucgucaucaccuccggcgacggcacgaccagccccaucuccgagcacgacuaccagaucgggggcuacaccgagaagugggagagcggggugaaggacugcgugguccugcacuccuacuucaccagcgacuacuaccagcuguacuccacgcagcucagcaccgacaccggcguggagcacgugaccuucuucaucuacaacaagaucgucgacgagcccgaggagcacgugcagauccacacgaucgacggguccagccgcguggucaaccccgugauggagccgaucuacgacgagcccaccaccaccacgagcgugccccugugaggacuagucccuguucccagagcccacuuuuuuuucuuuuuuugaaauaaaauagccugucuuucagaucucaaaggcucuuuucagagccaccaaaaaaaaaaaaaaaaaaaaaaaaaaaaaaaaaaaaaaaaaaaaaaaaaaaaaaaaaaaaaaaaaaaaaaaaaaaaaaaaaaaaaaaaaaaaaaaaaaaaa

SEQ ID NO: 20734 - RNA, 1100 nt, Artificial Sequence
  SARS-CoV-2__MT344957.1__ORF3a protein mRNA gc
aggagagucccgcagucggcguccagcggcucugcuuguucgugugugugucguugcaggccuuauucaagcuuaccauggaccuguucaugcgcaucuucaccaucggcaccgugacgcucaagcagggggagaucaaggacgccacccccagcgacuucguccgggccaccgcgaccaucccgauccaggccucccugagcuucggcuggcugaucguggggguggcccuccuggccgucuuccacuccgccagcaagaucaucacgcugaagaagcgcuggcagcucgcgcuguccaagggcgugcacuucgugugcaaccugcuccugcuguucgucaccguguacagccaccuccugcugguggccgccgggcucgaggcccccuuccuguaccuguacgcgcucgucuacuuccugcaguccaucaacuucgugcggaucaucaugcgccuguggcucugcuggaagugccggagcaagaacccccugcuguacgacgccaacuacuuccucugcuggcacaccaacugcuacgacuacugcauccccuacaacuccgugaccagcuccaucgucaucacgagcggcgacggcaccaccuccccgaucagcgagcacgacuaccagaucgggggcuacaccgagaagugggaguccggggugaaggacugcgugguccugcacagcuacuucacguccgacuacuaccagcuguacagcacccagcucuccaccgacaccggcguggagcacgugacguucuucaucuacaacaagaucgucgacgagcccgaggagcacgugcagauccacaccaucgacgggagcagcggcguggucaaccccgugauggagcccaucuacgacgagccgaccaccacgaccuccgugccccugugaggacuagucccuguucccagagcccacuuuuuuuucuuuuuuugaaauaaaauagccugucuuucagaucucaaaggcucuuuucagagccaccaaaaaaaaaaaaaaaaaaaaaaaaaaaaaaaaaaaaaaaaaaaaaaaaaaaaaaaaaaaaaaaaaaaaaaaaaaaaaaaaaaaaaaaaaaaaaaaaaaaaa

SEQ ID NO: 20735 - RNA, 1100 nt, Artificial Sequence
  SARS-CoV-2__MT326054.1__ORF3a protein mRNA gc
aggagagucccgcagucggcguccagcggcucugcuuguucgugugugugucguugcaggccuuauucaagcuuaccauggaccuguucaugcgcaucuucaccaucggcaccgugacgcucaagcagggggagaucaaggacgccacccccagcgacuucguccgggccaccgcgaccaucccgauccaggccucccugcccuucggcuggcugaucguggggguggcccuccuggccgucuuccacagcgccuccaagaucaucacgcugaagaagcgcuggcagcucgcgcugagcaagggcgugcacuucgugugcaaccugcuccugcuguucgucaccguguacucccaccuccugcugguggccgccgggcucgaggcccccuuccuguaccuguacgcgcucgucuacuuccugcagagcaucaacuucgugcggaucaucaugcgccuguggcucugcuggaagugccgguccaagaacccccugcuguacgacgccaacuacuuccucugcuggcacaucaacugcuacgacuacugcaucccguacaacagcgugaccuccagcaucgucaucaccuccggcgacggcacgaccagccccaucuccgagcacgacuaccagaucgggggcuacaccgagaagugggagagcggggugaaggacugcgugguccugcacuccuacuucaccagcgacuacuaccagcuguacuccacgcagcucagcaccgacaccggcguggagcacgugaccuucuucaucuacaacaagaucgucgacgagcccgaggagcacgugcagauccacacgaucgacggguccagcggcguggucaaccccgugauggagccgaucuacgacgagcccaccaccaccacgagcgugccccugugaggacuagucccuguucccagagcccacuuuuuuuucuuuuuuugaaauaaaauagccugucuuucagaucucaaaggcucuuuucagagccaccaaaaaaaaaaaaaaaaaaaaaaaaaaaaaaaaaaaaaaaaaaaaaaaaaaaaaaaaaaaaaaaaaaaaaaaaaaaaaaaaaaaaaaaaaaaaaaaaaaaaa

SEQ ID NO: 20736 - RNA, 1100 nt, Artificial Sequence
  SARS-CoV-2__MT326096.1__ORF3a protein mRNA gc
aggagagucccgcagucggcguccagcggcucugcuuguucgugugugugucguugcaggccuuauucaagcuuaccauggaccuguucaugcgcaucuucaccaucggcaccgugacgcucaagcagggggagaucaaggacgccacccccagcgacuucguccgggccaccgcgaccaucccgauccaggccucccugcccuucggcuggcugaucguggggguggcccuccuggccgucuuccacagcgccuccaagaucaucacgcugaagaagcgcuggcagcucgcgcugagcaagggcgugcacuucgugugcaaccugcuccugcuguucgucaccguguacucccaccucuuccugguggccgccgggcuggaggcccccuuccucuaccuguacgcgcuggucuacuuccuccagagcaucaacuucgugcggaucaucaugcgccuguggcugugcuggaagugccgguccaagaacccccuccuguacgacgccaacuacuuccugugcuggcacaccaacugcuacgacuacugcaucccguacaacagcgugaccuccagcaucgucaucacguccggcgacggcaccaccagccccaucuccgagcacgacuaccagaucgggggcuacaccgagaagugggagagcggggugaaggacugcgugguccuccacuccuacuucacgagcgacuacuaccagcuguacuccacccagcugagcaccgacaccggcguggagcacgugacguucuucaucuacaacaagaucgucgacgagcccgaggagcacgugcagauccacaccaucgacggguccagcggcguggucaaccccgugauggagccgaucuacgacgagcccaccaccacgaccagcgugccccucugaggacuagucccuguucccagagcccacuuuuuuuucuuuuuuugaaauaaaauagccugucuuucagaucucaaaggcucuuuucagagccaccaaaaaaaaaaaaaaaaaaaaaaaaaaaaaaaaaaaaaaaaaaaaaaaaaaaaaaaaaaaaaaaaaaaaaaaaaaaaaaaaaaaaaaaaaaaaaaaaaaaaa

SEQ ID NO: 20737 - RNA, 1100 nt, Artificial Sequence
  SARS-CoV-2__MT326151.1__ORF3a protein mRNA gc
aggagagucccgcagucggcguccagcggcucugcuuguucgugugugugucguugcaggccuuauucaagcuuaccauggaccuguucaugcgcaucuucaccaucggcaccgugacgcucaagcagggggagaucaaggacgccacccccagcgacuucguccgggccaccgcgaccaucccgauccaggccucccugcccuucggcuggcugaucguggggguggcccuccuggccgucuuccagagcgccuccaagaucaucacgcugaagaagcgcuggcagcucagccuguccaagggcgugcacuucgugugcaaccugcuccugcuguucgucaccguguacagccaccuccugcugguggcggccgggcucgaggcccccuuccuguaccuguacgcccucgucuacuuccugcaguccaucaacuucgugcggaucaucaugcgccuguggcucugcuggaagugccggagcaagaacccccugcuguacgacgcgaacuacuuccucugcuggcacaccaacugcuacgacuacugcaucccguacaacuccgugaccagcuccaucgucaucacgagcggcgacggcaccaccucccccaucagcgagcacgacuaccagaucgggggcuacaccgagaagugggaguccggggugaaggacugcgugguccugcacagcuacuucacguccgacuacuaccagcuguacagcacccagcucuccaccgacaccggcguggagcacgugacguucuucaucuacaacaagaucgucgacgagcccgaggagcacgugcagauccacaccaucgacgggagcagcggcguggucaaccccgugauggagccgaucuacgacgagcccaccaccacgaccuccgugccccugugaggacuagucccuguucccagagcccacuuuuuuuucuuuuuuugaaauaaaauagccugucuuucagaucucaaaggcucuuuucagagccaccaaaaaaaaaaaaaaaaaaaaaaaaaaaaaaaaaaaaaaaaaaaaaaaaaaaaaaaaaaaaaaaaaaaaaaaaaaaaaaaaaaaaaaaaaaaaaaaaaaaaa

SEQ ID NO: 20738 - RNA, 1100 nt, Artificial Sequence
  SARS-CoV-2__MT325635.1__ORF3a protein mRNA gc
aggagagucccgcagucggcguccagcggcucugcuuguucgugugugugucguugcaggccuuauucaagcuuaccauggaccuguucaugcgcaucuucaccaucggcaccgugacgcucaagcagggggagaucaaggacgccacccccagcgacuucguccgggccaccgcgaccaucccgauccaggccucccugcccuucggcuggcugaucguggggguggcccuccuggccgucuuccacagcgccuccaagaucaucacgcugaagaagcgcuggcagcucgcgcugagcaagggcgugcacuucgugugcaaccugcuccugcuguucgucaccguguacucccaccuccugcugguggccgccgggcucgaggcccccuuccuguaccuguacgcgcucgucuacuuccugcagagcaucaacuucgugcggaucaucaugcgccuguggcucugcuggaagugccgguccaagaacccccugcuguacgacgccaacuacuuccucugcuggcacaccaacugcuacgacuacugcaucccguacaacagcgugaccuccagcaucgucaucacguccggcgacggcaccaccagccccaucuccgagcacgacuaccagaucgggggcuacaccgagaagugggagagcggggugaaggacugcgugguccugcacuccuacuucacgagcgacuacuaccagcuguacuccacccagcucagcaccgacaccggcguggagcacgugacguucuucaucuacaacaagaucgucgacgaccccgaggagcacgugcagauccacaccaucgacggguccagcggcguggucaaccccgugauggagccgaucuacgacgagcccaccaccacgaccagcgugccccugugaggacuagucccuguucccagagcccacuuuuuuuucuuuuuuugaaauaaaauagccugucuuucagaucucaaaggcucuuuucagagccaccaaaaaaaaaaaaaaaaaaaaaaaaaaaaaaaaaaaaaaaaaaaaaaaaaaaaaaaaaaaaaaaaaaaaaaaaaaaaaaaaaaaaaaaaaaaaaaaaaaaaa

SEQ ID NO: 20739 - RNA, 1100 nt, Artificial Sequence
  SARS-CoV-2__MT328033.1__ORF3a protein mRNA gc
aggagagucccgcagucggcguccagcggcucugcuuguucgugugugugucguugcaggccuuauucaagcuuaccauggaccuguucaugcgcaucuucaccaucggcaccgugacgcucaagcagggggagaucaaggacgccacccccagcgacuucguccgggccaccgcgaccaucccgauccaggccucccugcccuucggcuggcugaucguggggguggcccuccuggccgucuuccagagcgccuccaagaucaucacgcugaagaagcgcuggcagcucgcgcugagcaagggcgugcacuucgugugcaaccugcuccugcuguucgucaccguguacucccaccuccugcugguggccgccgggcucgaggcccccuuccuguaccuguacgcgcucgucuacuuccugcagagcaucaacuucgugcggaucaucaugcgcaucuggcugugcuggaagugccgguccaagaacccccuccuguacgacgccaacuacuuccugugcuggcacaccaacugcuacgacuacugcaucccguacaacagcgugaccuccagcaucgucaucacguccggcgacggcaccaccagccccaucuccgagcacgacuaccagaucgggggcuacaccgagaagugggagagcggggugaaggacugcgugguccuccacuccuacuucacgagcgacuacuaccagcuguacuccacccagcugagcaccgacaccggcguggagcacgugacguucuucaucuacaacaagaucgucgacgagcccgaggagcacgugcagauccacaccaucgacggguccagcggcguggucaaccccgugauggagccgaucuacgacgagcccaccaccacgaccagcgugccccucugaggacuagucccuguucccagagcccacuuuuuuuucuuuuuuugaaauaaaauagccugucuuucagaucucaaaggcucuuuucagagccaccaaaaaaaaaaaaaaaaaaaaaaaaaaaaaaaaaaaaaaaaaaaaaaaaaaaaaaaaaaaaaaaaaaaaaaaaaaaaaaaaaaaaaaaaaaaaaaaaaaaaa

SEQ ID NO: 20740 - RNA, 1091 nt, Artificial Sequence
  SARS-CoV-2__MT293186.1__ORF3a protein mRNA gc
aggagagucccgcagucggcguccagcggcucugcuuguucgugugugugucguugcaggccuuauucaagcuuaccauggaccuguucaugcgcauccucaccgugacccugaagcagggcgagaucaaggacgccacgcccagcgacuucguccgggccaccgcgaccaucccgauccaggccucccugcccuucggguggcucaucgugggcguggcccugcuggccgucuuccagagcgccuccaagaucaucacccucaagaagcgcuggcagcuggcgcugagcaagggggugcacuucgugugcaaccuccugcugcuguucgucacgguguacucccaccuccugcucguggccgccggccuggaggcccccuuccuguaccucuacgcgcuggucuacuuccugcagagcaucaacuucgugcggaucaucaugcgccucuggcugugcuggaagugccgguccaagaacccccugcucuacgacgccaacuacuuccugugcuggcacaccaacugcuacgacuacugcaucccguacaacagcgugaccuccagcaucgucaucaccuccggggacggcacgaccagccccaucuccgagcacgacuaccagaucggcggguacaccgagaagugggagagcggcgugaaggacugcgugguccugcacuccuacuucaccagcgacuacuaccagcucuacuccacgcagcugagcaccgacaccgggguggagcacgugaccuucuucaucuacaacaagaucgucgacgagcccgaggagcacgugcagauccacacgaucgacggcuccagcgggguggucaaccccgugauggagccgaucuacgacgagcccaccaccaccacgagcgugccccugugaggacuagucccuguucccagagcccacuuuuuuuucuuuuuuugaaauaaaauagccugucuuucagaucucaaaggcucuuuucagagccaccaaaaaaaaaaaaaaaaaaaaaaaaaaaaaaaaaaaaaaaaaaaaaaaaaaaaaaaaaaaaaaaaaaaaaaaaaaaaaaaaaaaaaaaaaaaaaaaaaaaaa

SEQ ID NO: 20741 - RNA, 1100 nt, Artificial Sequence
  SARS-CoV-2__MT263428.1__ORF3a protein mRNA gc
aggagagucccgcagucggcguccagcggcucugcuuguucgugugugugucguugcaggccuuauucaagcuuaccauggaccuguucaugcgcaucuucaccaucggcaccgugacgcucaagcagggggagaucaaggacgccacccccagcgacuucguccgggccaccgcgaccaucccgauccaggccucccugcccuucggcuggcugaucguggggguggcccuccuggccgucuuccacagcgccuccaagaucaucacgcugaagaagcgcuggcagcucgcgcugagcaagggcgugcacuucgugugcaaccugcuccugcuguucgucaccguguacucccaccuccugcugguggccgccguccucgaggcccccuuccuguaccuguacgcgcucguguacuuccugcagagcaucaacuucgugcggaucaucaugcgccuguggcucugcuggaagugccgguccaagaacccccugcuguacgacgccaacuacuuccucugcuggcacaccaacugcuacgacuacugcaucccguacaacagcgucaccuccagcaucgugaucacguccggggacggcaccaccagccccaucuccgagcacgacuaccagaucggcggguacaccgagaagugggagagcggcgugaaggacugcgucgugcugcacuccuacuucacgagcgacuacuaccagcuguacuccacccagcucagcaccgacaccgggguggagcacgucacguucuucaucuacaacaagaucguggacgagcccgaggagcacgugcagauccacaccaucgacggcuccagcggggucgugaaccccgugauggagccgaucuacgacgagcccaccaccacgaccagcgucccccugugaggacuagucccuguucccagagcccacuuuuuuuucuuuuuuugaaauaaaauagccugucuuucagaucucaaaggcucuuuucagagccaccaaaaaaaaaaaaaaaaaaaaaaaaaaaaaaaaaaaaaaaaaaaaaaaaaaaaaaaaaaaaaaaaaaaaaaaaaaaaaaaaaaaaaaaaaaaaaaaaaaaaa

SEQ ID NO: 20742 - RNA, 1100 nt, Artificial Sequence
  SARS-CoV-2__MT263448.1__ORF3a protein mRNA gc
aggagagucccgcagucggcguccagcggcucugcuuguucgugugugugucguugcaggccuuauucaagcuuaccauggaccuguucaugcgcaucuucaccaucggcaccgugacgcucaagcagggggagaucaaggacgccacccccagcgacuucguccgggccaccgcgaccaucccgauccaggccucccugcccuucggcuggcugaucguggggguggcccuccuggccgucuuccagagcgccuccaagaucaucacgcugaagaagcgcuggcagcucgcgcugagcaagggcgugcacuucgugugcaaccugcuccugcuguucgucaccguguacucccaccuccugcugguggccgccgggcucgaggcccccuuccuguaccuguacgcgcucgucuacuuccugcagagcaucaacuucgugcggaucaucaugcgccuguggcucugcuggaagugccgguccaagaacccccugcuguacgacgccaacuacuuccucugcuggcacaccaacuacuacgacuacugcaucccguacaacagcgugaccuccagcaucgucaucacguccggcgacggcaccaccagccccaucuccgagcacgacuaccagaucgggggcuacaccgagaagugggagagcggggugaaggacugcgugguccugcacuccuacuucacgagcgacuacuaccagcuguacuccacccagcucagcaccgacaccggcguggagcacgugacguucuucaucuacaacaagaucgucgacgagcccgaggagcacgugcagauccacaccaucgacggguccagcggcguggucaaccccgugauggagccgaucuacgacgagcccaccaccacgaccagcgugccccugugaggacuagucccuguucccagagcccacuuuuuuuucuuuuuuugaaauaaaauagccugucuuucagaucucaaaggcucuuuucagagccaccaaaaaaaaaaaaaaaaaaaaaaaaaaaaaaaaaaaaaaaaaaaaaaaaaaaaaaaaaaaaaaaaaaaaaaaaaaaaaaaaaaaaaaaaaaaaaaaaaaaaa

SEQ ID NO: 20743 - RNA, 1100 nt, Artificial Sequence
  SARS-CoV-2__MT159712.2__ORF3a protein mRNA gc
aggagagucccgcagucggcguccagcggcucugcuuguucgugugugugucguugcaggccuuauucaagcuuaccauggaccuguucaugcgcaucuucaccaucggcaccgugacgcucaagcagggggagaucaaggacgccacccccagcgacuucguccgggccaccgcgaccaucccgauccaggccucccugcccuucggcuggcugaucguggggguggcccuccuggccgucuuccagagcgccuccaagaucaucacgcugaagaagcgcuggcagcucgcgcugagcaagggcgugcacuucgugugcaaccugcuccugcuguucgucaccguguacucccaccuccugcugguggccgccgggcucgaggcccccuuccuguaccuguacgcgcucgucuacuuccugcagagcaucaacuucgugcggaucaucaugcgccuguggcucugcuggaagugccggcccaagaacccgcugcuguacgacgccaacuacuuccucugcuggcacaccaacugcuacgacuacugcauccccuacaacuccgugaccagcuccaucgucaucacgagcggcgacggcaccaccucccccaucagcgagcacgacuaccagaucgggggcuacaccgagaagugggaguccggggugaaggacugcgugguccugcacagcuacuucacguccgacuacuaccagcuguacagcacccagcucuccaccgacaccggcguggagcacgugacguucuucaucuacaacaagaucgucgacgagcccgaggagcacgugcagauccacaccaucgacgggagcuccggcguggucaacccggugauggagcccaucuacgacgagcccaccaccacgaccagcgugccccugugaggacuagucccuguucccagagcccacuuuuuuuucuuuuuuugaaauaaaauagccugucuuucagaucucaaaggcucuuuucagagccaccaaaaaaaaaaaaaaaaaaaaaaaaaaaaaaaaaaaaaaaaaaaaaaaaaaaaaaaaaaaaaaaaaaaaaaaaaaaaaaaaaaaaaaaaaaaaaaaaaaaaa

SEQ ID NO: 20744 - RNA, 1100 nt, Artificial Sequence
  SARS-CoV-2__MT039890.1__ORF3a protein mRNA gc
aggagagucccgcagucggcguccagcggcucugcuuguucgugugugugucguugcaggccuuauucaagcuuaccauggaccuguucaugcgcaucuucaccaucggcaccgugacgcucaagcagggggagaucaaggacgccacccccagcgacuucguccgggccaccgcgaccaucccgauccaggccucccugcccuucggcuggcugaucguggggguggcccuccuggccgucuuccagagcgccuccaagaucaucacgcugaagaagcgcuggcagcucgcgcugagcaagggcgugcacuucgugugcaaccugcuccugcuguucgucaccguguacucccaccuccugcugguggccgccgggcucgaggcccccuuccuguaccuguacgcgcucgucuacuuccugcagagcaucaacuucgugcggaucaucaugcgccugcuccugugcuggaagugccgguccaagaacccccugcucuacgacgccaacuacuuccugugcuggcacaccaacugcuacgacuacugcaucccguacaacagcgugaccuccagcaucgucaucacguccggcgacggcaccaccagccccaucuccgagcacgacuaccagaucgggggcuacaccgagaagugggagagcggggugaaggacugcgugguccugcacuccuacuucacgagcgacuacuaccagcucuacuccacccagcugagcaccgacaccggcguggagcacgugacguucuucaucuacaacaagaucgucgacgagcccgaggagcacgugcagauccacaccaucgacguguccagcggggucgugaaccccgugauggagccgaucuacgacgagcccaccaccacgaccagcgucccccugugaggacuagucccuguucccagagcccacuuuuuuuucuuuuuuugaaauaaaauagccugucuuucagaucucaaaggcucuuuucagagccaccaaaaaaaaaaaaaaaaaaaaaaaaaaaaaaaaaaaaaaaaaaaaaaaaaaaaaaaaaaaaaaaaaaaaaaaaaaaaaaaaaaaaaaaaaaaaaaaaaaaaa

SEQ ID NO: 20745 - RNA, 611 nt, Artificial Sequence
  MERS-CoV/MERS-CoV-Jeddah-human-1__KF958702.1__ORF8b protein mRNA gc
aggagagucccgcagucggcguccagcggcucugcuuguucgugugugugucguugcaggccuuauucaagcuuaccaugcccaucccgccccugcgcaagaugcugggcaucgggggcgaccggaccgagaagcugauccccgggauggagcugagcaacuggcuccccggcgggaccuccacgacccuggagcuggacccgaagcagcacagccacuccggccuccugcgcauggccagcuucggcuccaugaagauggcgccccugaugcuccugcagcugcucgggcggggcacccugaccaugauccagcugcuccugcacaacagccugcccgugcucuccuuccugaagacgagcacccugcgcgggcucgaggccaucgucaaccaccuccaggagccccuggccugaggacuagucccuguucccagagcccacuuuuuuuucuuuuuuugaaauaaaauagccugucuuucagaucucaaaggcucuuuucagagccaccaaaaaaaaaaaaaaaaaaaaaaaaaaaaaaaaaaaaaaaaaaaaaaaaaaaaaaaaaaaaaaaaaaaaaaaaaaaaaaaaaaaaaaaaaaaaaaaaaaaaa

SEQ ID NO: 20746 - RNA, 611 nt, Artificial Sequence
  MERS-CoV/Al-Hasa_4_2013__KF186564.1__ORF8b protein mRNA gc
aggagagucccgcagucggcguccagcggcucugcuuguucgugugugugucguugcaggccuuauucaagcuuaccaugcccaucccgccccugcgcaagaugcucggcaucgggggcgaccggaccgagaagcugauccccgggauggagcugagcaacuggcuccccggcgggaccuccacgacccuggagcuggacccgaagcagcacagccacuccggccuccugcgcauggccagcuucggcuccaugaagauggcgccccugaugcuccugcagcugcucgggcggggcacccugaccaugauccagcugcuccugcacaacagccgccccgugcuguccuuccucaagacgagcacccugcgggggcuggaggccaucgucaaccaccuccaggagccccuggccugaggacuagucccuguucccagagcccacuuuuuuuucuuuuuuugaaauaaaauagccugucuuucagaucucaaaggcucuuuucagagccaccaaaaaaaaaaaaaaaaaaaaaaaaaaaaaaaaaaaaaaaaaaaaaaaaaaaaaaaaaaaaaaaaaaaaaaaaaaaaaaaaaaaaaaaaaaaaaaaaaaaaa

SEQ ID NO: 20747 - RNA, 611 nt, Artificial Sequence; identical to SEQ ID NO: 20746
  MERS-CoV/Riyadh_14_2013__KJ156934.1__ORF8b protein mRNA gc

SEQ ID NO: 20748 - RNA, 392 nt, Artificial Sequence
  SARS-CoV/Tor2__NC_004718.3__ORF8a protein mRNA gc
aggagagucccgcagucggcguccagcggcucugcuuguucgugugugugucguugcaggccuuauucaagcuuaccaugaagcugcucaucgugcugaccugcaucagccugugcuccugcaucugcaccgucgugcagcgcugcgccagcaacaagccccacgugcucgaggacccgugcaagguccagcacugaggacuagucccuguucccagagcccacuuuuuuuucuuuuuuugaaauaaaauagccugucuuucagaucucaaaggcucuuuucagagccaccaaaaaaaaaaaaaaaaaaaaaaaaaaaaaaaaaaaaaaaaaaaaaaaaaaaaaaaaaaaaaaaaaaaaaaaaaaaaaaaaaaaaaaaaaaaaaaaaaaaaa

SEQ ID NO: 20749 - RNA, 527 nt, Artificial Sequence
  SARS-CoV/Tor2__NC_004718.3__ORF8b protein mRNA gc
aggagagucccgcagucggcguccagcggcucugcuuguucgugugugugucguugcaggccuuauucaagcuuaccaugugccugaagauccucgugcgcuacaacacccggggcaacaccuacagcacggccuggcugugcgcccuggggaagguccuccccuuccaccgcuggcacaccauggugcagaccugcaccccgaacgugacgaucaacugccaggaccccgcgggcggggcccugaucgcccggugcugguaccugcacgagggccaccagaccgccgccuuccgcgacguccucguggugcugaacaagcggaccaacugaggacuagucccuguucccagagcccacuuuuuuuucuuuuuuugaaauaaaauagccugucuuucagaucucaaaggcucuuuucagagccaccaaaaaaaaaaaaaaaaaaaaaaaaaaaaaaaaaaaaaaaaaaaaaaaaaaaaaaaaaaaaaaaaaaaaaaaaaaaaaaaaaaaaaaaaaaaaaaaaaaaaa

SEQ ID NO: 20750 - RNA, 638 nt, Artificial Sequence
  Bat SARS-like CoV/WIV1__KF367457.1__ORF8 protein mRNA gc
aggagagucccgcagucggcguccagcggcucugcuuguucgugugugugucguugcaggccuuauucaagcuuaccaugaagcugcucaucgugcugggccugcucaccagcgucuacugcaugcacaaggagugcuccauccaggagugcugcgagaaccagcccuuccagcuggaggaccccugccccauccacuacuacagcgacugguucgugaagaucgggccccgcaaguccgcccggcuggugcagcucugcgccggcgaguacgggcaccgcguccccauccacuacgagauguucggcaacuacaccaucagcugcgagccgcuggagaucaacugccagaacccgcccguggggucccugaucgugcggugcagcuacgacgucgacuucauggaguaccacgacgugcgcgugguccucgacuucaucugaggacuagucccuguucccagagcccacuuuuuuuucuuuuuuugaaauaaaauagccugucuuucagaucucaaaggcucuuuucagagccaccaaaaaaaaaaaaaaaaaaaaaaaaaaaaaaaaaaaaaaaaaaaaaaaaaaaaaaaaaaaaaaaaaaaaaaaaaaaaaaaaaaaaaaaaaaaaaaaaaaaaa

SEQ ID NO: 20751 - RNA, 638 nt, Artificial Sequence
  SARS-CoV-2/Wuhan-Hu-1__NC_045512.2/MN908947.2/EPI_ISL_402128__ORF 8 protein mRNA gc R9950
aggagagucccgcagucggcguccagcggcucugcuuguucgugugugugucguugcaggccuuauucaagcuuaccaugaaguuccugguguuccucggcaucaucaccaccgucgccgccuuccaccaggagugcagccugcaguccugcacgcagcaccagcccuacgugguggacgacccgugccccauccacuucuacagcaagugguacauccgcgucggggcccggaaguccgcgccccugaucgagcucugcguggacgaggccggcagcaagucccccauccaguacaucgacaucgggaacuacaccgugagcugccugccguucaccaucaacugccaggagcccaagcugggcucccucgucgugcgcugcagcuucuacgaggacuuccuggaguaccacgacgugcgggucgugcuggacuucaucugaggacuagucccuguucccagagcccacuuuuuuuucuuuuuuugaaauaaaauagccugucuuucagaucucaaaggcucuuuucagagccaccaaaaaaaaaaaaaaaaaaaaaaaaaaaaaaaaaaaaaaaaaaaaaaaaaaaaaaaaaaaaaaaaaaaaaaaaaaaaaaaaaaaaaaaaaaaaaaaaaaaaa

SEQ ID NO: 20752 - RNA, 638 nt, Artificial Sequence
  SARS-CoV-2__MT919788.1__ORF8 protein mRNA gc
aggagagucccgcagucggcguccagcggcucugcuuguucgugugugugucguugcaggccuuauucaagcuuaccaugaaguuccugguguuccucggcaucaucaccaccgucgccgccuuccaccaggagugcagccugcaguccugcacgcagcaccagcccuacgugguggacgacccgugccccauccacuucuacagcaagugguacauccgcgucggggcccggaaguccgcgccccugaucgagcucugcguggacgaggccggcuucaagagccccauccaguacaucgacaucgggaacuacaccguguccugccugccguucaccaucaacugccaggagcccaagcugggcagccucgucgugcgcugcuccuucuacgaggacuuccuggaguaccacgacgugcgggucgugcuggacuucaucugaggacuagucccuguucccagagcccacuuuuuuuucuuuuuuugaaauaaaauagccugucuuucagaucucaaaggcucuuuucagagccaccaaaaaaaaaaaaaaaaaaaaaaaaaaaaaaaaaaaaaaaaaaaaaaaaaaaaaaaaaaaaaaaaaaaaaaaaaaaaaaaaaaaaaaaaaaaaaaaaaaaaa

SEQ ID NO: 20753 - RNA, 638 nt, Artificial Sequence
  SARS-CoV-2__MT919994.1__ORF8 protein mRNA gc
aggagagucccgcagucggcguccagcggcucugcuuguucgugugugugucguugcaggccuuauucaagcuuaccaugaaguuccugguguuccucggcaucaucaccaccgucgccgccuuccaccaggagugcagccugcaguccugcacgcagcaccagcccuacgugguggacgacccgugccccauccacuucuacagcaagugguacauccgcgucggggcccggaaguccgcgccccugaucgagcucugcguggacgaggccggcagcaagucccccauccaguacaucgacaucgggaacuacaccgugagcugcuccccguucaccaucaacugccaggagcccaagcugggcagccuggucgugcgcugcuccuucuacgaggacuuccucgaguaccacgacgugcgggucgugcuggacuucaucugaggacuagucccuguucccagagcccacuuuuuuuucuuuuuuugaaauaaaauagccugucuuucagaucucaaaggcucuuuucagagccaccaaaaaaaaaaaaaaaaaaaaaaaaaaaaaaaaaaaaaaaaaaaaaaaaaaaaaaaaaaaaaaaaaaaaaaaaaaaaaaaaaaaaaaaaaaaaaaaaaaaaa

SEQ ID NO: 20754 - RNA, 638 nt, Artificial Sequence
  SARS-CoV-2__MT919999.1__ORF8 protein mRNA gc
aggagagucccgcagucggcguccagcggcucugcuuguucgugugugugucguugcaggccuuauucaagcuuaccaugaaguuccugguguuccucggcaucaucaccaccgucgccgccuuccaccaggagugcagccugcaguccugcacgcagcaccagcccuacgugguggacgacccgugccccauccacuucuacagcaagugguacauccgcgucggggcccggaaguccgcgccccugaucgagcucugccuggacgaggccggcagcaagucccccauccaguacaucgacaucgggaacuacaccgugagcugcuccccguucaccaucaacugccaggagcccaagcugggcagccucgugguccgcugcuccuucuacgaggacuuccuggaguaccacgacgugcgggugguccuggacuucaucugaggacuagucccuguucccagagcccacuuuuuuuucuuuuuuugaaauaaaauagccugucuuucagaucucaaaggcucuuuucagagccaccaaaaaaaaaaaaaaaaaaaaaaaaaaaaaaaaaaaaaaaaaaaaaaaaaaaaaaaaaaaaaaaaaaaaaaaaaaaaaaaaaaaaaaaaaaaaaaaaaaaaa

SEQ ID NO: 20755 - RNA, 638 nt, Artificial Sequence
  SARS-CoV-2__MT920037.1__ORF8 protein mRNA gc
aggagagucccgcagucggcguccagcggcucugcuuguucgugugugugucguugcaggccuuauucaagcuuaccaugaaguuccugguguuccucggcaucaucaccaccgucgccgccuuccaccaggagugcagccugcagcugugcacgcagcaccagcccuacgugguggacgacccgugccccauccacuucuacuccaagugguacauccgcgucggggcccgcaagagcgcgccccucaucgagcugugcguggacgaggccggcuccaagcugcccauccaguacaucgacaucgggaacuacaccgugagcugccucccguucaccaucaacugccaggagcccaagcugggcucccuggucgugcggugcagcuucuacgaggacuuccucgaguaccacgacgugcgggucgugcuggacuucaucugaggacuagucccuguucccagagcccacuuuuuuuucuuuuuuugaaauaaaauagccugucuuucagaucucaaaggcucuuuucagagccaccaaaaaaaaaaaaaaaaaaaaaaaaaaaaaaaaaaaaaaaaaaaaaaaaaaaaaaaaaaaaaaaaaaaaaaaaaaaaaaaaaaaaaaaaaaaaaaaaaaaaa

SEQ ID NO: 20756 - RNA, 638 nt, Artificial Sequence
  SARS-CoV-2__MT921009.1__ORF8 protein mRNA gc
aggagagucccgcagucggcguccagcggcucugcuuguucgugugugugucguugcaggccuuauucaagcuuaccaugaaguuccugguguuccucggcaucaucaccaccgucgccgccuuccaccaggagugcagccugcagcugugcacgcagcaccagcccuacgugguggacgacccgugccccauccacuucuacuccaagugguacauccgcgucggggcccgcaagagcgcgccccucaucgagcugugcguggacgaggccggcuccaagagccccauccaguacaucgacaucgggaacuacaccguguccugccugccguucaccaucaacugccaggagcccaagcucggcagccuggucgugcggugcuccuucuacgaggacuuccuggaguaccacgacgugcgggucgugcucgacuucaucugaggacuagucccuguucccagagcccacuuuuuuuucuuuuuuugaaauaaaauagccugucuuucagaucucaaaggcucuuuucagagccaccaaaaaaaaaaaaaaaaaaaaaaaaaaaaaaaaaaaaaaaaaaaaaaaaaaaaaaaaaaaaaaaaaaaaaaaaaaaaaaaaaaaaaaaaaaaaaaaaaaaaa

SEQ ID NO: 20757 - RNA, 638 nt, Artificial Sequence
  SARS-CoV-2__MT913071.1__ORF8 protein mRNA gc
aggagagucccgcagucggcguccagcggcucugcuuguucgugugugugucguugcaggccuuauucaagcuuaccaugaaguuccugguguuccucggcaucaucaccaccgucgccgccuuccaccaggagugcagccugcaguccugcacgcagcaccagcccuacgugguggacgacccgugccccauccacuucuacagcaagugguacauccgcgucggggcccggaaguccgcgccccugaucgagcucugcguggacgagagcggcuccaagagccccauccaguacaucgacaucgggaacuacaccguguccugccugccguucaccaucaacugccaggagcccaagcugggcagccucgucgugcgcugcuccuucuacgaggacuuccuggaguaccacgacgugcgggucgugcuggacuucaucugaggacuagucccuguucccagagcccacuuuuuuuucuuuuuuugaaauaaaauagccugucuuucagaucucaaaggcucuuuucagagccaccaaaaaaaaaaaaaaaaaaaaaaaaaaaaaaaaaaaaaaaaaaaaaaaaaaaaaaaaaaaaaaaaaaaaaaaaaaaaaaaaaaaaaaaaaaaaaaaaaaaaa

SEQ ID NO: 20758 - RNA, 638 nt, Artificial Sequence
  SARS-CoV-2__MT913109.1__ORF8 protein mRNA gc
aggagagucccgcagucggcguccagcggcucugcuuguucgugugugugucguugcaggccuuauucaagcuuaccaugaaguuccugguguuccucggcaucaucaccaccgucgccgccuuccaccaggagugcagccugcaguccugcacgcagcaccagcccuacgugguggacgacagcugcccgauccacuucuacuccaagugguacauccgcgucggggcccgcaagagcgcgccccugaucgagcucugcguggacgaggccggcuccaagagccccauccaguacaucgacaucgggaacuacaccguguccugccugcccuucaccaucaacugccaggagccgaagcugggcagccucgucgugcggugcuccuucuacgaggacuuccuggaguaccacgacgugcgggucgugcuggacuucaucugaggacuagucccuguucccagagcccacuuuuuuuucuuuuuuugaaauaaaauagccugucuuucagaucucaaaggcucuuuucagagccaccaaaaaaaaaaaaaaaaaaaaaaaaaaaaaaaaaaaaaaaaaaaaaaaaaaaaaaaaaaaaaaaaaaaaaaaaaaaaaaaaaaaaaaaaaaaaaaaaaaaaa

SEQ ID NO: 20759 - RNA, 638 nt, Artificial Sequence
  SARS-CoV-2__MT911807.1__ORF8 protein mRNA gc
aggagagucccgcagucggcguccagcggcucugcuuguucgugugugugucguugcaggccuuauucaagcuuaccaugaaguuccugguguuccucggcaucaucaccaccgucgccgccuuccaccaggagugcagccugcaguccugcacgcagcaccagcccuacgugguggacgacccgugccccauccacuucuacagcaagugguacauccgcgucggggcccggaaguccgcgccccugaucgagcucugcguggacgaggccggcagcaagucccccauccaguacaucgacaucgggaacuacaccgugagcugccugccguucaccaucaacugccaggagcccaagcugggcucccucgucgugcgcugcagcuucuacgaggacuuccugggguaccacgacgugcgggucgugcuggacuucaucugaggacuagucccuguucccagagcccacuuuuuuuucuuuuuuugaaauaaaauagccugucuuucagaucucaaaggcucuuuucagagccaccaaaaaaaaaaaaaaaaaaaaaaaaaaaaaaaaaaaaaaaaaaaaaaaaaaaaaaaaaaaaaaaaaaaaaaaaaaaaaaaaaaaaaaaaaaaaaaaaaaaaa

SEQ ID NO: 20760 - RNA, 638 nt, Artificial Sequence
  SARS-CoV-2__MT893659.1__ORF8 protein mRNA gc
aggagagucccgcagucggcguccagcggcucugcuuguucgugugugugucguugcaggccuuauucaagcuuaccaugaaguuccugguguuccucggcaucaucaccaccgucgccgccuuccaccaggagugcagccugcaguccugcacgcagcaccagcccuacgugguggacgacccgugccccauccacuucuacagcaagugguacauccgcgucggggcccggaaguccgcgccccugaucgagcucugcguggacgaggugggcagcaagucccccauccaguacaucgacaucgggaacuacaccgucagcugccugccguucaccaucaacugccaggagcccaagcugggcucccucguggugcgcugcagcuucuacgaggacuuccuggaguaccacgacguccggguggugcuggacuucaucugaggacuagucccuguucccagagcccacuuuuuuuucuuuuuuugaaauaaaauagccugucuuucagaucucaaaggcucuuuucagagccaccaaaaaaaaaaaaaaaaaaaaaaaaaaaaaaaaaaaaaaaaaaaaaaaaaaaaaaaaaaaaaaaaaaaaaaaaaaaaaaaaaaaaaaaaaaaaaaaaaaaaa

SEQ ID NO: 20761 - RNA, 638 nt, Artificial Sequence
  SARS-CoV-2__MT893685.1__ORF8 protein mRNA gc
aggagagucccgcagucggcguccagcggcucugcuuguucgugugugugucguugcaggccuuauucaagcuuaccaugaaguuccugguguuccucggcaucaucaccaccgucgccgccuuccaccaggagugcagccugcaguccugcacgcagcaccagcccuacgugguggacgacccgugccccauccacuucuacagcaaguggcacauccgcgucggggcccggaaguccgcgccccugaucgagcucugcguggacgaggccggcagcaagucccccauccaguacaucgacaucgggaacuacaccgugagcugccugccguucaccaucaacugccaggagcccaagcugggcucccucgucgugcgcugcagcuucuacgaggacuuccuggaguaccacgacgugcgggucgugcuggacuucaucugaggacuagucccuguucccagagcccacuuuuuuuucuuuuuuugaaauaaaauagccugucuuucagaucucaaaggcucuuuucagagccaccaaaaaaaaaaaaaaaaaaaaaaaaaaaaaaaaaaaaaaaaaaaaaaaaaaaaaaaaaaaaaaaaaaaaaaaaaaaaaaaaaaaaaaaaaaaaaaaaaaaaa

SEQ ID NO: 20762 - RNA, 638 nt, Artificial Sequence
  SARS-CoV-2__MT890281.1__ORF8 protein mRNA gc
aggagagucccgcagucggcguccagcggcucugcuuguucgugugugugucguugcaggccuuauucaagcuuaccaugaaguuccugguguuccucggcaucaucaccaccgucgccgccuuccaccaggagugcagccugcaguccugcacgcagcaccagcccuaccugguggacgacccgugccccauccacuucuacagcaagugguacauccgcgugggggcccggaaguccgcgccccucaucgagcugugcgucgacgaggccggcagcaagucccccauccaguacaucgacaucgggaacuacaccgugagcugccugccguucaccaucaacugccaggagcccaagcucggcucccuggugguccgcugcagcuucuacgaggacuuccuggaguaccacgacgugcgggugguccucgacuucaucugaggacuagucccuguucccagagcccacuuuuuuuucuuuuuuugaaauaaaauagccugucuuucagaucucaaaggcucuuuucagagccaccaaaaaaaaaaaaaaaaaaaaaaaaaaaaaaaaaaaaaaaaaaaaaaaaaaaaaaaaaaaaaaaaaaaaaaaaaaaaaaaaaaaaaaaaaaaaaaaaaaaaa

SEQ ID NO: 20763 - RNA, 638 nt, Artificial Sequence
  SARS-CoV-2__MT890301.1__ORF8 protein mRNA gc
aggagagucccgcagucggcguccagcggcucugcuuguucgugugugugucguugcaggccuuauucaagcuuaccaugaaguuccugguguuccucggcaucaucaccaccgucgccgccuuccaccaggagugcagccugcaguccugcacgcagcaccagcccuacgugguggacgacccgugccccauccacuucuacagcaagugguacauccgcgucggggcccggaaguccgcgccccugaucgagcucugcguggacgagcccggcagcaaguccccgauccaguacaucgacaucgggaacuacaccgugagcugccugcccuucaccaucaacugccaggagcccaagcugggcucccucgucgugcgcugcagcuucuacgaggacuuccuggaguaccacgacgugcgggucgugcuggacuucaucugaggacuagucccuguucccagagcccacuuuuuuuucuuuuuuugaaauaaaauagccugucuuucagaucucaaaggcucuuuucagagccaccaaaaaaaaaaaaaaaaaaaaaaaaaaaaaaaaaaaaaaaaaaaaaaaaaaaaaaaaaaaaaaaaaaaaaaaaaaaaaaaaaaaaaaaaaaaaaaaaaaaaa

SEQ ID NO: 20764 - RNA, 638 nt, Artificial Sequence
  SARS-CoV-2__MT883499.1__ORF8 protein mRNA gc
aggagagucccgcagucggcguccagcggcucugcuuguucgugugugugucguugcaggccuuauucaagcuuaccaugaaguuccugguguuccucggcaucaucaccaccgucgccgccuuccaccaggagugcagccugcaguccugcacgcagcaccagcccuacgugguggacgacccgugccccauccacuucuacagcaagugguacauccgcgucggggcgcggaaguccgugccccugaucgagcucugcguggacgaggccggcagcaagucccccauccaguacaucgacaucgggaacuacaccgucagcugccugccguucaccaucaacugccaggagcccaagcugggcucccucguggugcgcugcagcuucuacgaggacuuccuggaguaccacgacguccggguggugcuggacuucaucugaggacuagucccuguucccagagcccacuuuuuuuucuuuuuuugaaauaaaauagccugucuuucagaucucaaaggcucuuuucagagccaccaaaaaaaaaaaaaaaaaaaaaaaaaaaaaaaaaaaaaaaaaaaaaaaaaaaaaaaaaaaaaaaaaaaaaaaaaaaaaaaaaaaaaaaaaaaaaaaaaaaaa

SEQ ID NO: 20765 - RNA, 638 nt, Artificial Sequence
  SARS-CoV-2__MT883503.1__ORF8 protein mRNA gc
aggagagucccgcagucggcguccagcggcucugcuuguucgugugugugucguugcaggccuuauucaagcuuaccaugaaguuccugguguuccucggcaucaucaccaccgucgccgccuuccaccaggagugcagccugcaguccugcacgcagcaccagcccuacgugguggacgacccgugccccauccacuucuacagcaagugguacauccgcgucggggcccggaaguccgcgccccugaucgagcucugccuggacgaggccggcagcaagucccccauccaguacaucgacaucgggaacuacaccgugagcugccugccguucaccaucaacugccaggagcccaagcucggcucccuggugguccgcugcagcuucuacgaggacuuccuggaguaccacgacgugcgggugguccucgacuucaucugaggacuagucccuguucccagagcccacuuuuuuuucuuuuuuugaaauaaaauagccugucuuucagaucucaaaggcucuuuucagagccaccaaaaaaaaaaaaaaaaaaaaaaaaaaaaaaaaaaaaaaaaaaaaaaaaaaaaaaaaaaaaaaaaaaaaaaaaaaaaaaaaaaaaaaaaaaaaaaaaaaaaa

SEQ ID NO: 20766 - RNA, 650 nt, Artificial Sequence
  SARS-CoV-2__MT886367.1__ORF8 protein mRNA gc
aggagagucccgcagucggcguccagcggcucugcuuguucgugugugugucguugcaggccuuauucaagcuuaccaugaaguuccugguguuccucggcaucaucaccaccgucgccgccuuccaccaggagugcagccugcaguccugcacgcagcaccagcccuacgugguggacgacccgugccccauccacuucuacagcaagugguacauccgcgucggggcccggaaguccgcgccccugaucgagcucugcguggacgaggccggcagcaagucccccauccaguacaucgacaucgggaacuacaccgugagcugcuccccguucaccaucaacugccaggagcccaagcugggcagccuggucgugcgcugcuccuucuacgaggacuuccucgaguaccacgacgugcgggucgugcuggacuucagcaagcgcaccaacugaggacuagucccuguucccagagcccacuuuuuuuucuuuuuuugaaauaaaauagccugucuuucagaucucaaaggcucuuuucagagccaccaaaaaaaaaaaaaaaaaaaaaaaaaaaaaaaaaaaaaaaaaaaaaaaaaaaaaaaaaaaaaaaaaaaaaaaaaaaaaaaaaaaaaaaaaaaaaaaaaaaaa

SEQ ID NO: 20767 - RNA, 638 nt, Artificial Sequence
  SARS-CoV-2__MT873075.1__ORF8 protein mRNA gc
aggagagucccgcagucggcguccagcggcucugcuuguucgugugugugucguugcaggccuuauucaagcuuaccaugaaguuccugguguuccucggcaucaucaccaccgucgccgccuuccaccaggagugcagccugcaguccuucacgcagcaccagcccuacgugguggacgacccgugccccauccacuucuacagcaagugguacauccgcgucggggcccggaaguccgcgccccugaucgagcucugcguggacgaggccggcagcaagucccccauccaguacaucgacaucgggaacuacaccgugagcugccugccguucaccaucaacugccaggagcccaagcugggcucccucgucgugcgcugcagcuucuacgaggacuuccuggaguaccacgacgugcgggucgugcuggacuucaucugaggacuagucccuguucccagagcccacuuuuuuuucuuuuuuugaaauaaaauagccugucuuucagaucucaaaggcucuuuucagagccaccaaaaaaaaaaaaaaaaaaaaaaaaaaaaaaaaaaaaaaaaaaaaaaaaaaaaaaaaaaaaaaaaaaaaaaaaaaaaaaaaaaaaaaaaaaaaaaaaaaaaa

SEQ ID NO: 20768 - RNA, 638 nt, Artificial Sequence
  SARS-CoV-2__MT873148.1__ORF8 protein mRNA gc
aggagagucccgcagucggcguccagcggcucugcuuguucgugugugugucguugcaggccuuauucaagcuuaccaugaaguuccugguguuccucggcaucaucaccaccgucgccgccuuccaccaggagugcauccugcagagcugcacgcagcaccagcccuacgugguggacgacccgugccccauccacuucuacuccaagugguacauccgcgucggggcccgcaagagcgcgccccugaucgagcucugcguggacgaggccggcuccaagagccccauccaguacaucgacaucgggaacuacaccguguccugccugccguucaccaucaacugccaggagcccaagcugggcagccucgucgugcggugcuccuucuacgaggacuuccuggaguaccacgacgugcgggucgugcuggacuucaucugaggacuagucccuguucccagagcccacuuuuuuuucuuuuuuugaaauaaaauagccugucuuucagaucucaaaggcucuuuucagagccaccaaaaaaaaaaaaaaaaaaaaaaaaaaaaaaaaaaaaaaaaaaaaaaaaaaaaaaaaaaaaaaaaaaaaaaaaaaaaaaaaaaaaaaaaaaaaaaaaaaaaa

SEQ ID NO: 20769 - RNA, 638 nt, Artificial Sequence
  SARS-CoV-2__MT873152.1__ORF8 protein mRNA gc
aggagagucccgcagucggcguccagcggcucugcuuguucgugugugugucguugcaggccuuauucaagcuuaccaugaaguuccugguguuccucggcaucaucaccaccgucgccgccuuccaccaggagugcagccugcaguccugcauccagcaccagcccuacgugguggacgacccgugccccauccacuucuacagcaagugguacauccgcgucggggcccggaaguccgcgccccugaucgagcucugcguggacgaggccggcagcaagucccccauccaguacaucgacaucgggaacuacacggugagcugccugccguucaccaucaacugccaggagcccaagcugggcucccucgucgugcgcugcagcuucuacgaggacuuccuggaguaccacgacgugcgggucgugcuggacuucaucugaggacuagucccuguucccagagcccacuuuuuuuucuuuuuuugaaauaaaauagccugucuuucagaucucaaaggcucuuuucagagccaccaaaaaaaaaaaaaaaaaaaaaaaaaaaaaaaaaaaaaaaaaaaaaaaaaaaaaaaaaaaaaaaaaaaaaaaaaaaaaaaaaaaaaaaaaaaaaaaaaaaaa

SEQ ID NO: 20770 - RNA, 638 nt, Artificial Sequence
  SARS-CoV-2__MT873255.1__ORF8 protein mRNA gc
aggagagucccgcagucggcguccagcggcucugcuuguucgugugugugucguugcaggccuuauucaagcuuaccaugaaguuccugguguuccucggcaucaucaccaccgucgccgccuuccaccaggagugcagccugcaguccugcacgcagcaccagcccuacgugguggacgacccgugccugauccacuucuacagcaagugguacauccgcgucggggcccggaaguccgcgccccucaucgagcugugcguggacgaggccggcagcaagucccccauccaguacaucgacaucgggaacuacaccgugagcugccugcccuucaccaucaacugccaggagccgaagcucggcucccuggucgugcgcugcagcuucuacgaggacuuccuggaguaccacgacgugcgggucgugcucgacuucaucugaggacuagucccuguucccagagcccacuuuuuuuucuuuuuuugaaauaaaauagccugucuuucagaucucaaaggcucuuuucagagccaccaaaaaaaaaaaaaaaaaaaaaaaaaaaaaaaaaaaaaaaaaaaaaaaaaaaaaaaaaaaaaaaaaaaaaaaaaaaaaaaaaaaaaaaaaaaaaaaaaaaaa

SEQ ID NO: 20771 - RNA, 638 nt, Artificial Sequence
  SARS-CoV-2__MT873439.1__ORF8 protein mRNA gc
aggagagucccgcagucggcguccagcggcucugcuuguucgugugugugucguugcaggccuuauucaagcuuaccaugaaguuccugguguuccucggcaucaucaccaccgucgccgccuuccaccaggagugcagccugcaguccugcacgcagcaccagcccuacgugguggacgacccgugccccauccacuucuacagcaagugguacauccgcgucggggcccggaaguccgcgccccugaucgagcucugcguggacgaggccggcagcaagucccccauccaguacaucgacaucgggaacuacaccgugagcugccugccguucaccaucaacugccaggagcccaagcugggcucccucgucgugcgcugcagcuucuacgaggacuuccuggaguaccacgacgugcgggucgugcuggaccucaucugaggacuagucccuguucccagagcccacuuuuuuuucuuuuuuugaaauaaaauagccugucuuucagaucucaaaggcucuuuucagagccaccaaaaaaaaaaaaaaaaaaaaaaaaaaaaaaaaaaaaaaaaaaaaaaaaaaaaaaaaaaaaaaaaaaaaaaaaaaaaaaaaaaaaaaaaaaaaaaaaaaaaa

SEQ ID NO: 20772 - RNA, 638 nt, Artificial Sequence
  SARS-CoV-2__MT873503.1__ORF8 protein mRNA gc
aggagagucccgcagucggcguccagcggcucugcuuguucgugugugugucguugcaggccuuauucaagcuuaccaugaaguuccugguguuccucggcaucaucaccaccgucacggccuuccaccaggagugcagccugcaguccugcacccagcaccagcccuacgugguggacgacccgugccccauccacuucuacagcaagugguacauccgcgucggggcccggaaguccgcgccccugaucgagcucugcguggacgaggccggcagcaagucccccauccaguacaucgacaucgggaacuacaccgugagcugccugccguucaccaucaacugccaggagcccaagcugggcucccucgucgugcgcugcagcuucuacgaggacuuccuggaguaccacgacgugcgggucgugcuggacuucaucugaggacuagucccuguucccagagcccacuuuuuuuucuuuuuuugaaauaaaauagccugucuuucagaucucaaaggcucuuuucagagccaccaaaaaaaaaaaaaaaaaaaaaaaaaaaaaaaaaaaaaaaaaaaaaaaaaaaaaaaaaaaaaaaaaaaaaaaaaaaaaaaaaaaaaaaaaaaaaaaaaaaaa

SEQ ID NO: 20773 - RNA, 638 nt, Artificial Sequence
  SARS-CoV-2__MT873509.1__ORF8 protein mRNA gc
aggagagucccgcagucggcguccagcggcucugcuuguucgugugugugucguugcaggccuuauucaagcuuaccaugaaguuccugguguuccucggcaucaucaccaccgucgccgccuuccaccaggagugcagccugcagcugugcacgcagcaccagcccuacgugguggacgacuccugcccgauccacuucuacagcaagugguacauccgcgucggggcccggaaguccgcgccccucaucgagcugugcguggacgaggccggcagcaagucccccauccaguacaucgacaucgggaacuacaccgugagcugccugcccuucaccaucaacugccaggagccgaagcucggcucccuggucgugcgcugcagcuucuacgaggacuuccuggaguaccacgacgugcgggucgugcucgacuucaucugaggacuagucccuguucccagagcccacuuuuuuuucuuuuuuugaaauaaaauagccugucuuucagaucucaaaggcucuuuucagagccaccaaaaaaaaaaaaaaaaaaaaaaaaaaaaaaaaaaaaaaaaaaaaaaaaaaaaaaaaaaaaaaaaaaaaaaaaaaaaaaaaaaaaaaaaaaaaaaaaaaaaa

SEQ ID NO: 20774 - RNA, 638 nt, Artificial Sequence
  SARS-CoV-2__MT875354.1__ORF8 protein mRNA gc
aggagagucccgcagucggcguccagcggcucugcuuguucgugugugugucguugcaggccuuauucaagcuuaccaugaaguuccugguguuccucggcaucaucaccaccgucgccgccuuccaccaggagugcagccugcaguccugcacgcagcaccagcccuacgugguggacgacccgugccccauccacuucuacagcaagugguacauccgcgucggggcccggaaguccgcgccccugaucgagcucugcguggacgaggccggcagcaagucccccauccaguacaucgacaucgggaacuacaccgugagcugccugccguucaccaucuacugccaggagcccaagcugggcucccucgucgugcgcugcagcuucuacgaggacuuccuggaguaccacgacgugcgggucgugcuggacuucaucugaggacuagucccuguucccagagcccacuuuuuuuucuuuuuuugaaauaaaauagccugucuuucagaucucaaaggcucuuuucagagccaccaaaaaaaaaaaaaaaaaaaaaaaaaaaaaaaaaaaaaaaaaaaaaaaaaaaaaaaaaaaaaaaaaaaaaaaaaaaaaaaaaaaaaaaaaaaaaaaaaaaaa

SEQ ID NO: 20775 - RNA, 638 nt, Artificial Sequence
  SARS-CoV-2__MT876599.1__ORF8 protein mRNA gc
aggagagucccgcagucggcguccagcggcucugcuuguucgugugugugucguugcaggccuuauucaagcuuaccaugaaguuccugguguuccucggcaucaucaccaccgucgccgccuuccaccaggagugcagccugcaguccugcacgcagcaccagcccuacgugguggacgacccgugccccguccacuucuacagcaagugguacauccgcgugggggcccggaaguccgcgccccugaucgagcucugcguggacgaggccggcagcaagucccccauccaguacaucgacaucgggaacuacaccgucagcugccugccguucaccaucaacugccaggagcccaagcugggcucccucguggugcgcugcagcuucuacgaggacuuccuggaguaccacgacguccggguggugcuggacuucaucugaggacuagucccuguucccagagcccacuuuuuuuucuuuuuuugaaauaaaauagccugucuuucagaucucaaaggcucuuuucagagccaccaaaaaaaaaaaaaaaaaaaaaaaaaaaaaaaaaaaaaaaaaaaaaaaaaaaaaaaaaaaaaaaaaaaaaaaaaaaaaaaaaaaaaaaaaaaaaaaaaaaaa

SEQ ID NO: 20776 - RNA, 638 nt, Artificial Sequence
  SARS-CoV-2__MT872501.1__ORF8 protein mRNA gc
aggagagucccgcagucggcguccagcggcucugcuuguucgugugugugucguugcaggccuuauucaagcuuaccaugaaguuccugguguuccucggcaucaucaccaccgucgccgccuucuaccaggagugcagccugcaguccugcacgcagcaccagcccuacgugguggacgacccgugccccauccacuucuacagcaagugguacauccgcgucggggcccggaaguccgcgccccugaucgagcucugcguggacgaggccggcagcaagucccccauccaguacaucgacaucgggaacuacaccgugagcugcuccccguucaccaucaacugccaggagcccaagcugggcagccuggucgugcgcugcuccuucuacgaggacuuccucgaguaccacgacgugcgggucgugcuggacuucaucugaggacuagucccuguucccagagcccacuuuuuuuucuuuuuuugaaauaaaauagccugucuuucagaucucaaaggcucuuuucagagccaccaaaaaaaaaaaaaaaaaaaaaaaaaaaaaaaaaaaaaaaaaaaaaaaaaaaaaaaaaaaaaaaaaaaaaaaaaaaaaaaaaaaaaaaaaaaaaaaaaaaaa

SEQ ID NO: 20777 - RNA, 638 nt, Artificial Sequence
  SARS-CoV-2__MT846006.1__ORF8 protein mRNA gc
aggagagucccgcagucggcguccagcggcucugcuuguucgugugugugucguugcaggccuuauucaagcuuaccaugaaguuccugguguuccucggcaucaucaccaccgucgccgccuuccaccaggagugcagccugcaguccugcacgcagcaccagcccuacgugguggacgacccgugccccauccacuucuacagcaagugguacauccgcgucggggcccggaaguccgcgccccugaucgagcucugcguggacgaggccggcagcaagucccccauccaguacaucgacaucgggaacuacaccgugagcugccugccguucaccaucaacugccaggagcccaaguucggcucccuggucgugcgcugcagcuucuacgaggacuuccucgaguaccacgacgugcgggucgugcuggacuucaucugaggacuagucccuguucccagagcccacuuuuuuuucuuuuuuugaaauaaaauagccugucuuucagaucucaaaggcucuuuucagagccaccaaaaaaaaaaaaaaaaaaaaaaaaaaaaaaaaaaaaaaaaaaaaaaaaaaaaaaaaaaaaaaaaaaaaaaaaaaaaaaaaaaaaaaaaaaaaaaaaaaaaa

SEQ ID NO: 20778 - RNA, 638 nt, Artificial Sequence
  SARS-CoV-2__MT846007.1__ORF8 protein mRNA gc
aggagagucccgcagucggcguccagcggcucugcuuguucgugugugugucguugcaggccuuauucaagcuuaccaugaaguuccugguguuccucggcaucaucaccaccgucgccgccuuccaccaggagugcagccugcaguccugcacgcagcaccagcccuacgugguggacgacccgugccccauccacuucuacagcaagugguacauccgcgucggggcccggaaguccgcgccccugaucgagcucugcguggacgaggccggcagcaagucccccauccaguacaucgacaucgggaacuacaccgugagcugccugccguucaccaucaacugccaggagcccaagcugggcucccucgucgugcgcugcagcuucuacgaggacuuccuggacuaccacgacgugcgggucgugcuggacuucaucugaggacuagucccuguucccagagcccacuuuuuuuucuuuuuuugaaauaaaauagccugucuuucagaucucaaaggcucuuuucagagccaccaaaaaaaaaaaaaaaaaaaaaaaaaaaaaaaaaaaaaaaaaaaaaaaaaaaaaaaaaaaaaaaaaaaaaaaaaaaaaaaaaaaaaaaaaaaaaaaaaaaaa

SEQ ID NO: 20779 - RNA, 638 nt, Artificial Sequence
  SARS-CoV-2__MT846420.1__ORF8 protein mRNA gc
aggagagucccgcagucggcguccagcggcucugcuuguucgugugugugucguugcaggccuuauucaagcuuaccaugaaguuccugguguuccucggcaucaucaccaccgucgccgccuuccaccaggagugcagccugcaguccugcacgcagcaccagcccuacgugguggacgacccgugccccauccacuucuacagcaagugguacauccgcgucggggcccggaaguccgcgccccugaucgagcucugcgugggcgaggccgggagcaagucccccauccaguacaucgacaucggcaacuacaccgugagcugcuccccguucaccaucaacugccaggagcccaagcuggggagccuggucgugcgcugcuccuucuacgaggacuuccucgaguaccacgacgugcgggucgugcuggacuucaucugaggacuagucccuguucccagagcccacuuuuuuuucuuuuuuugaaauaaaauagccugucuuucagaucucaaaggcucuuuucagagccaccaaaaaaaaaaaaaaaaaaaaaaaaaaaaaaaaaaaaaaaaaaaaaaaaaaaaaaaaaaaaaaaaaaaaaaaaaaaaaaaaaaaaaaaaaaaaaaaaaaaaa

SEQ ID NO: 20780 - RNA, 638 nt, Artificial Sequence
  SARS-CoV-2__MT846452.1__ORF8 protein mRNA gc
aggagagucccgcagucggcguccagcggcucugcuuguucgugugugugucguugcaggccuuauucaagcuuaccaugaaguuccugguguuccucggcaucaucaccaacgucgccgccuuccaccaggagugcagccugcaguccugcacccagcaccagcccuacgugguggacgacccgugccccauccacuucuacagcaagugguacauccgcgucggggcccggaaguccgcgccccugaucgagcucugcguggacgaggccggcagcaagucccccauccaguacaucgacaucgggaacuacacggugagcugccugccguucaccaucaacugccaggagcccaagcugggcucccucgucgugcgcugcagcuucuacgaggacuuccuggaguaccacgacgugcgggucgugcuggacuucaucugaggacuagucccuguucccagagcccacuuuuuuuucuuuuuuugaaauaaaauagccugucuuucagaucucaaaggcucuuuucagagccaccaaaaaaaaaaaaaaaaaaaaaaaaaaaaaaaaaaaaaaaaaaaaaaaaaaaaaaaaaaaaaaaaaaaaaaaaaaaaaaaaaaaaaaaaaaaaaaaaaaaaa

SEQ ID NO: 20781 - RNA, 638 nt, Artificial Sequence
  SARS-CoV-2__MT846478.1__ORF8 protein mRNA gc
aggagagucccgcagucggcguccagcggcucugcuuguucgugugugugucguugcaggccuuauucaagcuuaccaugaaguuccugguguuccuccgcaucaucaccaccgucgccgccuuccaccaggagugcagccugcaguccugcacgcagcaccagcccuacgugguggacuacccgugccccauccacuucuacagcaagugguacauccgggucggcgcccgcaaguccgcgccccugaucgagcucugcguggacgaggccgggagcaagucccccauccaguacaucgacaucggcaacuacaccgugagcugccugccguucaccaucaacugccaggagcccaagcuggggucccucgucgugcggugcagcuucuacgaggacuuccuggaguaccacgacgugcgcgucgugcuggacuucaucugaggacuagucccuguucccagagcccacuuuuuuuucuuuuuuugaaauaaaauagccugucuuucagaucucaaaggcucuuuucagagccaccaaaaaaaaaaaaaaaaaaaaaaaaaaaaaaaaaaaaaaaaaaaaaaaaaaaaaaaaaaaaaaaaaaaaaaaaaaaaaaaaaaaaaaaaaaaaaaaaaaaaa

SEQ ID NO: 20782 - RNA, 638 nt, Artificial Sequence
  SARS-CoV-2__MT846647.1__ORF8 protein mRNA gc
aggagagucccgcagucggcguccagcggcucugcuuguucgugugugugucguugcaggccuuauucaagcuuaccaugaaguuccugguguuccucggcaucaucaccaccgucgccgccuuccaccaggagugcagccugcaguccugcacgcagcaccagcccuacgugguggacgacccgugccccauccacuucuacagcaagugguacauccgcgucggggcccggaaguccgcgccccugaucgagagcugcguggacgaggccggcuccaagagccccauccaguacaucgacaucgggaacuacaccguguccugccucccguucaccaucaacugccaggagcccaagcugggcagccuggucgugcgcugcuccuucuacgaggacuuccucgaguaccacgacgugcgggucgugcuggacuucaucugaggacuagucccuguucccagagcccacuuuuuuuucuuuuuuugaaauaaaauagccugucuuucagaucucaaaggcucuuuucagagccaccaaaaaaaaaaaaaaaaaaaaaaaaaaaaaaaaaaaaaaaaaaaaaaaaaaaaaaaaaaaaaaaaaaaaaaaaaaaaaaaaaaaaaaaaaaaaaaaaaaaaa

SEQ ID NO: 20783 - RNA, 638 nt, Artificial Sequence
  SARS-CoV-2__MT847226.1__ORF8 protein mRNA gc
aggagagucccgcagucggcguccagcggcucugcuuguucgugugugugucguugcaggccuuauucaagcuuaccaugaaguuccugguguuccucggcaucaucaucaccgucgccgccuuccaccaggagugcagccugcaguccugcacccagcaccagcccuacgugguggacgacccgugccccauccacuucuacagcaagugguacauccgcgucggggcccggaaguccgcgccccugaucgagcucugcguggacgaggccggcagcaagucccccauccaguacaucgacaucgggaacuacacggugagcugccugccguucaccaucaacugccaggagcccaagcugggcucccucgucgugcgcugcagcuucuacgaggacuuccuggaguaccacgacgugcgggucgugcuggacuucaucugaggacuagucccuguucccagagcccacuuuuuuuucuuuuuuugaaauaaaauagccugucuuucagaucucaaaggcucuuuucagagccaccaaaaaaaaaaaaaaaaaaaaaaaaaaaaaaaaaaaaaaaaaaaaaaaaaaaaaaaaaaaaaaaaaaaaaaaaaaaaaaaaaaaaaaaaaaaaaaaaaaaaa

SEQ ID NO: 20784 - RNA, 638 nt, Artificial Sequence
  SARS-CoV-2__MT843305.1__ORF8 protein mRNA gc
aggagagucccgcagucggcguccagcggcucugcuuguucgugugugugucguugcaggccuuauucaagcuuaccaugaaguuccugguguuccucggcaucaucaccaccgucgccgccuuccaccaggagugcagccugcaguccugcacgcagcaccagcccuacguggugaacgacccgugccccauccacuucuacagcaagugguacauccgcgucggggcccggaaguccgcgccccugaucgagcucugcguggacgaggccggcagcaagucccccauccaguacaucgacaucgggaacuacaccgugagcugccugccguucaccaucaacugccaggagcccaagcugggcucccucgucgugcgcugcagcuucuacgaggacuuccuggaguaccacgacgugcgggucgugcuggacuucaucugaggacuagucccuguucccagagcccacuuuuuuuucuuuuuuugaaauaaaauagccugucuuucagaucucaaaggcucuuuucagagccaccaaaaaaaaaaaaaaaaaaaaaaaaaaaaaaaaaaaaaaaaaaaaaaaaaaaaaaaaaaaaaaaaaaaaaaaaaaaaaaaaaaaaaaaaaaaaaaaaaaaaa

SEQ ID NO: 20785 - RNA, 638 nt, Artificial Sequence
  SARS-CoV-2__MT831123.1__ORF8 protein mRNA gc
aggagagucccgcagucggcguccagcggcucugcuuguucgugugugugucguugcaggccuuauucaagcuuaccaugaaguucuucguguuccugggcaucaucaccaccgucgccgccuuccaccaggagugcagccuccaguccugcacgcagcaccagcccuacgugguggacgacccgugccccauccacuucuacagcaagugguacauccgcgucggggcccggaaguccgcgccccugaucgagcugugcgugaacgaggccggcagcaagucccccauccaguacaucgacaucgggaacuacaccgugagcugccucccguucaccaucaacugccaggagcccaagcugggcucccuggucgugcgcugcagcuucuacgaggacuuccucgaguaccacgacgugcgggucgugcuggacuucaucugaggacuagucccuguucccagagcccacuuuuuuuucuuuuuuugaaauaaaauagccugucuuucagaucucaaaggcucuuuucagagccaccaaaaaaaaaaaaaaaaaaaaaaaaaaaaaaaaaaaaaaaaaaaaaaaaaaaaaaaaaaaaaaaaaaaaaaaaaaaaaaaaaaaaaaaaaaaaaaaaaaaaa

SEQ ID NO: 20786 - RNA, 638 nt, Artificial Sequence
  SARS-CoV-2__MT831186.1__ORF8 protein mRNA gc
aggagagucccgcagucggcguccagcggcucugcuuguucgugugugugucguugcaggccuuauucaagcuuaccaugaaguuccugguguuccucggcaucaucaccaccgucgccgccuuccaccaggagugcagccugcaguccugcacgcagcaccagcccuacgugguggacgacccgugccccauccacuucuacagcaagugguacauccgcgucggggccaucaaguccgcgccccugaucgagcucugcguggacgaggccggcagcaagucccccauccaguacaucgacaucgggaacuacaccgugagcugccugccguucaccaucaacugccaggagcccaagcugggcucccucgucgugcggugcagcuucuacgaggacuuccuggaguaccacgacgugcgcgucgugcuggacuucaucugaggacuagucccuguucccagagcccacuuuuuuuucuuuuuuugaaauaaaauagccugucuuucagaucucaaaggcucuuuucagagccaccaaaaaaaaaaaaaaaaaaaaaaaaaaaaaaaaaaaaaaaaaaaaaaaaaaaaaaaaaaaaaaaaaaaaaaaaaaaaaaaaaaaaaaaaaaaaaaaaaaaaa

SEQ ID NO: 20787 - RNA, 638 nt, Artificial Sequence
  SARS-CoV-2__MT831227.1__ORF8 protein mRNA gc
aggagagucccgcagucggcguccagcggcucugcuuguucgugugugugucguugcaggccuuauucaagcuuaccaugaaguuccugguguuccucggcaucaucaccaccgucgccgccuuccaccaggagugcagccugcaguccugcacgcagcaccagcccuacgugguggacgacccgagccccauccacuucuacuccaagugguacauccgcgucggggcccgcaagagcgcgccccugaucgagcucugcguggacgaggccggcuccaagagccccauccaguacaucgacaucgggaacuacaccguguccugccugccguucaccaucaacugccaggagcccaagcugggcagccucgucgugcggugcuccuucuacgaggacuuccuggaguaccacgacgugcgggucgugcuggacuucaucugaggacuagucccuguucccagagcccacuuuuuuuucuuuuuuugaaauaaaauagccugucuuucagaucucaaaggcucuuuucagagccaccaaaaaaaaaaaaaaaaaaaaaaaaaaaaaaaaaaaaaaaaaaaaaaaaaaaaaaaaaaaaaaaaaaaaaaaaaaaaaaaaaaaaaaaaaaaaaaaaaaaaa

SEQ ID NO: 20788 - RNA, 638 nt, Artificial Sequence
  SARS-CoV-2__MT831230.1__ORF8 protein mRNA gc
aggagagucccgcagucggcguccagcggcucugcuuguucgugugugugucguugcaggccuuauucaagcuuaccaugaaguuccugguguuccucggcaucaucaccaccgucgccgccuuccaccaggagugcagccugcaguccugcacgcagcaccagcccuacgugguggacgacccgugccccauccacuucuacagcaagugguacauccgcgucggggcccggaaguccgcgccccugaucgagcucugcgugaacgaggccggcagcaagucccccauccaguacaucgacaucgggaacuacaccgugagcugccugccguucaccaucaacugccaggagcccaagcugggcucccucgucgugcgcugcagcuucuacgaggacuuccuggaguaccacgacgugcgggucgugcuggacuucaucugaggacuagucccuguucccagagcccacuuuuuuuucuuuuuuugaaauaaaauagccugucuuucagaucucaaaggcucuuuucagagccaccaaaaaaaaaaaaaaaaaaaaaaaaaaaaaaaaaaaaaaaaaaaaaaaaaaaaaaaaaaaaaaaaaaaaaaaaaaaaaaaaaaaaaaaaaaaaaaaaaaaaa

SEQ ID NO: 20789 - RNA, 638 nt, Artificial Sequence
  SARS-CoV-2__MT831282.1__ORF8 protein mRNA gc
aggagagucccgcagucggcguccagcggcucugcuuguucgugugugugucguugcaggccuuauucaagcuuaccaugaaguuccugguguuccucggcaucaucaccaccgucgccgccuuccaccaggacugcagccugcaguccugcacgcagcaccagcccuacgugguggacgacccgugccccauccacuucuacagcaagugguacauccgcgucggggcccggaaguccgcgccccugaucgagcucugcguggacgaggccggcagcaagucccccauccaguacaucgacaucgggaacuacaccgugagcugcuccccguucaccaucaacugccaggagcccaagcugggcagccuggucgugcgcugcuccuucuacgaggacuuccucgaguaccacgacgugcgggucgugcuggacuucaucugaggacuagucccuguucccagagcccacuuuuuuuucuuuuuuugaaauaaaauagccugucuuucagaucucaaaggcucuuuucagagccaccaaaaaaaaaaaaaaaaaaaaaaaaaaaaaaaaaaaaaaaaaaaaaaaaaaaaaaaaaaaaaaaaaaaaaaaaaaaaaaaaaaaaaaaaaaaaaaaaaaaaa

SEQ ID NO: 20790 - RNA, 638 nt, Artificial Sequence
  SARS-CoV-2__MT831623.1__ORF8 protein mRNA gc
aggagagucccgcagucggcguccagcggcucugcuuguucgugugugugucguugcaggccuuauucaagcuuaccaugaaguuccugguguuccucggcaucaucaccaccgucgccgccuuccaccaggagugcagccugcaguccugcacgcagcaccagcccuacgugguggacgacccgugccccauccacuucuacagcaagugguacauccgcgucggggugcggaaguccgcgccccugaucgagcucugcguggacgaggccggcagcaagucccccauccaguacaucgacaucgggaacuacaccgucagcugccugccguucaccaucaacugccaggagcccaagcugggcucccucguggugcgcugcagcuucuacgaggacuuccuggaguaccacgacguccggguggugcuggacuucaucugaggacuagucccuguucccagagcccacuuuuuuuucuuuuuuugaaauaaaauagccugucuuucagaucucaaaggcucuuuucagagccaccaaaaaaaaaaaaaaaaaaaaaaaaaaaaaaaaaaaaaaaaaaaaaaaaaaaaaaaaaaaaaaaaaaaaaaaaaaaaaaaaaaaaaaaaaaaaaaaaaaaaa

SEQ ID NO: 20791 - RNA, 638 nt, Artificial Sequence
  SARS-CoV-2__MT831735.1__ORF8 protein mRNA gc
aggagagucccgcagucggcguccagcggcucugcuuguucgugugugugucguugcaggccuuauucaagcuuaccaugaaguuccugguguuccucggcaucaucaccaccgucgccgccuuccaccaggagugcagccugcaguccugcacgcagcaccagcccuacgugguggacgacccgugccccauccacuucuacagcaagugcuacauccgcgucggggcccggaaguccgcgccccugaucgagcucugcguggacgaggccggcagcaagucccccauccaguacaucgacaucgggaacuacaccgugagcugccugccguucaccaucaacugccaggagcccaagcugggcucccucgucgugcgcugcagcuucuacgaggacuuccuggaguaccacgacgugcgggucgugcuggacuucaucugaggacuagucccuguucccagagcccacuuuuuuuucuuuuuuugaaauaaaauagccugucuuucagaucucaaaggcucuuuucagagccaccaaaaaaaaaaaaaaaaaaaaaaaaaaaaaaaaaaaaaaaaaaaaaaaaaaaaaaaaaaaaaaaaaaaaaaaaaaaaaaaaaaaaaaaaaaaaaaaaaaaaa

SEQ ID NO: 20792 - RNA, 638 nt, Artificial Sequence
  SARS-CoV-2__MT831739.1__ORF8 protein mRNA gc
aggagagucccgcagucggcguccagcggcucugcuuguucgugugugugucguugcaggccuuauucaagcuuaccaugaaguuccugguguuccucggcaucaucaccaccgucgccgccuuccaccaggagugcagccugcaguccugcacgcagcaccagcccuacgugguggacgacccgugccccauccacuucuacagcaagugguacauccgcgucggggcccggaaguccgcgccccugaucgagcucugcguggacgaggccggcagcaagucccccauccaguacaucgacaucgggaacuacaccgugagcugccugccguucaccaucaacugccaggagcccaagcugggcaaccucgucgugcgcugcuccuucuacgaggacuuccuggaguaccacgacgugcgggucgugcuggacuucaucugaggacuagucccuguucccagagcccacuuuuuuuucuuuuuuugaaauaaaauagccugucuuucagaucucaaaggcucuuuucagagccaccaaaaaaaaaaaaaaaaaaaaaaaaaaaaaaaaaaaaaaaaaaaaaaaaaaaaaaaaaaaaaaaaaaaaaaaaaaaaaaaaaaaaaaaaaaaaaaaaaaaaa

SEQ ID NO: 20793 - RNA, 638 nt, Artificial Sequence
  SARS-CoV-2__MT831821.1__ORF8 protein mRNA gc
aggagagucccgcagucggcguccagcggcucugcuuguucgugugugugucguugcaggccuuauucaagcuuaccaugaaguuccugguguuccucggcaucaucaccaccgucgccgccuuccaccaggagugcagccugcaguccugcacgcagcaccagcccuacgugguggacgacccguuccccauccacuucuacagcaagugguacauccgcgucggggcccggaaguccgcgccccugaucgagcucugcguggacgaggccggcagcaagucccccauccaguacaucgacaucgggaacuacaccgugagcugccugccguucaccaucaacugccaggagcccaagcugggcucccucgucgugcgcugcagcuucuacgaggacuuccuggaguaccacgacgugcgggucgugcuggacuucaucugaggacuagucccuguucccagagcccacuuuuuuuucuuuuuuugaaauaaaauagccugucuuucagaucucaaaggcucuuuucagagccaccaaaaaaaaaaaaaaaaaaaaaaaaaaaaaaaaaaaaaaaaaaaaaaaaaaaaaaaaaaaaaaaaaaaaaaaaaaaaaaaaaaaaaaaaaaaaaaaaaaaaa

SEQ ID NO: 20794 - RNA, 638 nt, Artificial Sequence
  SARS-CoV-2__MT833958.1__ORF8 protein mRNA gc
aggagagucccgcagucggcguccagcggcucugcuuguucgugugugugucguugcaggccuuauucaagcuuaccaugaaguuccugguguuccucggcaucaucaccaccgucgccgccuuccaccaggagugcagccugcaguccugcacgcagcaccagcccuacgugguggacgacccgugccccauccacuucuacagcaagugguacauccgcgucggggcccggaaguccgcgccccugaucgagcucugcguggacgaggccggcagcaagucccccauccacuacaucgacaucgggaacuacaccgugagcugccugccguucaccaucaacugccaggagcccaagcugggcucccucgucgugcgcugcagcuucuacgaggacuuccuggaguaccacgacgugcgggucgugcuggacuucaucugaggacuagucccuguucccagagcccacuuuuuuuucuuuuuuugaaauaaaauagccugucuuucagaucucaaaggcucuuuucagagccaccaaaaaaaaaaaaaaaaaaaaaaaaaaaaaaaaaaaaaaaaaaaaaaaaaaaaaaaaaaaaaaaaaaaaaaaaaaaaaaaaaaaaaaaaaaaaaaaaaaaaa

SEQ ID NO: 20795 - RNA, 638 nt, Artificial Sequence
  SARS-CoV-2__MT834344.1__ORF8 protein mRNA gc
aggagagucccgcagucggcguccagcggcucugcuuguucgugugugugucguugcaggccuuauucaagcuuaccaugaaguuccugguguuccucggcaucaucaccaccgucgccgccuuccaccaggagugcagccugcaguccugcacgcagcaccagcccuacgugguggacgacccgugccccauccacuucuacagcaagugguacauccgcgucggggcccggaaguccgcgccccugaucgagcucugcguggacgaggccggcagcaagucccccauccaguacaucgacaucgggaacuacaccgugagcugccugccguucaccaucaacugccaggagcugaagcucggcucccuggucgugcgcugcagcuucuacgaggacuuccuggaguaccacgacgugcgggucgugcucgacuucaucugaggacuagucccuguucccagagcccacuuuuuuuucuuuuuuugaaauaaaauagccugucuuucagaucucaaaggcucuuuucagagccaccaaaaaaaaaaaaaaaaaaaaaaaaaaaaaaaaaaaaaaaaaaaaaaaaaaaaaaaaaaaaaaaaaaaaaaaaaaaaaaaaaaaaaaaaaaaaaaaaaaaaa

SEQ ID NO: 20796 - RNA, 638 nt, Artificial Sequence
  SARS-CoV-2__MT834622.1__ORF8 protein mRNA gc
aggagagucccgcagucggcguccagcggcucugcuuguucgugugugugucguugcaggccuuauucaagcuuaccaugaaguuccugguguuccuccgcaucaucaccaccgucgccgccuuccaccaggagugcagccugcaguccugcacgcagcaccagcccuacgugguggacgacccgugccccauccacuucuacagcaagugguacauccgggucggcgcccgcaaguccgcgccccugaucgagcucugcguggacgaggccgggagcaagucccccauccaguacaucgacaucggcaacuacaccgugagcugccugccguucaccaucaacugccaggagcccaagcuggggucccucgucgugcggugcagcuucuacgaggacuuccuggaguaccacgacgugcgcgucgugcuggacuucaucugaggacuagucccuguucccagagcccacuuuuuuuucuuuuuuugaaauaaaauagccugucuuucagaucucaaaggcucuuuucagagccaccaaaaaaaaaaaaaaaaaaaaaaaaaaaaaaaaaaaaaaaaaaaaaaaaaaaaaaaaaaaaaaaaaaaaaaaaaaaaaaaaaaaaaaaaaaaaaaaaaaaaa

SEQ ID NO: 20797 - RNA, 638 nt, Artificial Sequence
  SARS-CoV-2__MT834647.1__ORF8 protein mRNA gc
aggagagucccgcagucggcguccagcggcucugcuuguucgugugugugucguugcaggccuuauucaagcuuaccaugaaguuccugguguuccucggcaucaucaccaccgucgccgccuuccaccaggagugcagccugcaguccugcacgcagcaccagcccuacgugguggacgacccgugccccauccacuucuacagcaagugguacauccgcgucggggcccggaaguccgcgccccugaucgagcucugcguggacgaggccggcagcaagucccccauccaguacaucgacaucgggaacuacaccgugagcugcuccccguucaccaucaacugccaggagcccaagcugggcagccuggucgugcgcugcuccagcuacgaggacuuccucgaguaccacgacgugcgggucgugcuggacuucaucugaggacuagucccuguucccagagcccacuuuuuuuucuuuuuuugaaauaaaauagccugucuuucagaucucaaaggcucuuuucagagccaccaaaaaaaaaaaaaaaaaaaaaaaaaaaaaaaaaaaaaaaaaaaaaaaaaaaaaaaaaaaaaaaaaaaaaaaaaaaaaaaaaaaaaaaaaaaaaaaaaaaaa

SEQ ID NO: 20798 - RNA, 638 nt, Artificial Sequence
  SARS-CoV-2__MT827821.1__ORF8 protein mRNA gc
aggagagucccgcagucggcguccagcggcucugcuuguucgugugugugucguugcaggccuuauucaagcuuaccaugaaguuccuguucuuccucggcaucaucaccaccguggccgccuuccaccaggagugcagccugcaguccugcacgcagcaccagcccuacgucguggacgacccgugccccauccacuucuacagcaagugguacauccgcgugggggcccggaaguccgcgccccugaucgagcucugcgucgacgaggccggcagcaagucccccauccaguacaucgacaucgggaacuacaccgugagcugcuccccguucaccaucaacugccaggagcccaagcugggcagccuggugguccgcugcuccuucuacgaggacuuccucgaguaccacgacgugcgggugguccuggacuucaucugaggacuagucccuguucccagagcccacuuuuuuuucuuuuuuugaaauaaaauagccugucuuucagaucucaaaggcucuuuucagagccaccaaaaaaaaaaaaaaaaaaaaaaaaaaaaaaaaaaaaaaaaaaaaaaaaaaaaaaaaaaaaaaaaaaaaaaaaaaaaaaaaaaaaaaaaaaaaaaaaaaaaa

SEQ ID NO: 20799 - RNA, 638 nt, Artificial Sequence
  SARS-CoV-2__MT825091.1__ORF8 protein mRNA gc
aggagagucccgcagucggcguccagcggcucugcuuguucgugugugugucguugcaggccuuauucaagcuuaccaugaaguuccugguguuccucggcaucaucaccaccgucgccgccuuccaccaggagugcagccugcaguccugcacgcagcaccagcccuacgugguggacgacccgugccccauccacuucuacagcaagugguacauccgcgucggggcccggaaguccgcgccccugaucgagcucugcauggacgaggccggcagcaagucccccauccaguacaucgacaucgggaacuacaccgugagcugccugccguucaccaucaacugccaggagcccaagcugggcucccucgugguccgcugcagcuucuacgaggacuuccuggaguaccacgacgugcgggugguccuggacuucaucugaggacuagucccuguucccagagcccacuuuuuuuucuuuuuuugaaauaaaauagccugucuuucagaucucaaaggcucuuuucagagccaccaaaaaaaaaaaaaaaaaaaaaaaaaaaaaaaaaaaaaaaaaaaaaaaaaaaaaaaaaaaaaaaaaaaaaaaaaaaaaaaaaaaaaaaaaaaaaaaaaaaaa

SEQ ID NO: 20800 - RNA, 638 nt, Artificial Sequence
  SARS-CoV-2__MT821566.1__ORF8 protein mRNA gc
aggagagucccgcagucggcguccagcggcucugcuuguucgugugugugucguugcaggccuuauucaagcuuaccaugaaguuccugguguucuucggcaucaucaccaccgucgccgccuuccaccaggagugcagccuccaguccugcacgcagcaccagcccuacgugguggacgacccgugccccauccacuucuacagcaagugguacauccgcgucggggcccggaaguccgcgccccugaucgagcugugcguggacgaggccggcagcaagucccccauccaguacaucgacaucgggaacuacaccgugagcugccucccguucaccaucaacugccaggagcccaagcugggcucccuggucgugcgcugcagcuucuacgaggacuuccucgaguaccacgacgugcgggucgugcuggacuucaucugaggacuagucccuguucccagagcccacuuuuuuuucuuuuuuugaaauaaaauagccugucuuucagaucucaaaggcucuuuucagagccaccaaaaaaaaaaaaaaaaaaaaaaaaaaaaaaaaaaaaaaaaaaaaaaaaaaaaaaaaaaaaaaaaaaaaaaaaaaaaaaaaaaaaaaaaaaaaaaaaaaaaa

SEQ ID NO: 20801 - RNA, 638 nt, Artificial Sequence
  SARS-CoV-2__MT821663.1__ORF8 protein mRNA gc
aggagagucccgcagucggcguccagcggcucugcuuguucgugugugugucguugcaggccuuauucaagcuuaccaugaaguuccugguguuccucggcaucaucaucaccgucgccgccuuccaccaggagugcagccugcaguccugcacccagcaccagcccuacgugguggacgacccgugccccauccacuucuacagcaagugguacauccgcgucggggcccggaaguccgcgccccugaucgagcucugcguggacgaggccggcagcaagucccccauccaguacaucgacaucgggaacuacacggugagcugcuccccguucaccaucaacugccaggagcccaagcugggcagccuggucgugcgcugcuccuucuacgaggacuuccucgaguaccacgacgugcgggucgugcuggacuucaucugaggacuagucccuguucccagagcccacuuuuuuuucuuuuuuugaaauaaaauagccugucuuucagaucucaaaggcucuuuucagagccaccaaaaaaaaaaaaaaaaaaaaaaaaaaaaaaaaaaaaaaaaaaaaaaaaaaaaaaaaaaaaaaaaaaaaaaaaaaaaaaaaaaaaaaaaaaaaaaaaaaaaa

SEQ ID NO: 20802 - RNA, 638 nt, Artificial Sequence
  SARS-CoV-2__MT821773.1__ORF8 protein mRNA gc
aggagagucccgcagucggcguccagcggcucugcuuguucgugugugugucguugcaggccuuauucaagcuuaccaugaaguuccugguguuccucggcaucaucaccaccgucgccgccuuccaccaggagugcagccugcaguccugcacgcagcaccagcccuacgugguggacgacccgugccccauccacuucuacagcaagugguacauccgcgucggggcccggaaguccgcgccccugaucgagcucugcguggacgaggccggcagcaagucccccauccaguacaucgacaucgggaacuacaccgugagcugcuccccguucaccaucaacugccaggagcccaagcugggcagccuggucgugcgcugcuccuucuacgaggacuuccuccaguaccacgacgugcgggucgugcuggacuucaucugaggacuagucccuguucccagagcccacuuuuuuuucuuuuuuugaaauaaaauagccugucuuucagaucucaaaggcucuuuucagagccaccaaaaaaaaaaaaaaaaaaaaaaaaaaaaaaaaaaaaaaaaaaaaaaaaaaaaaaaaaaaaaaaaaaaaaaaaaaaaaaaaaaaaaaaaaaaaaaaaaaaaa

SEQ ID NO: 20803 - RNA, 638 nt, Artificial Sequence
  SARS-CoV-2__MT810566.1__ORF8 protein mRNA gc
aggagagucccgcagucggcguccagcggcucugcuuguucgugugugugucguugcaggccuuauucaagcuuaccaugaaguuccugguguuccucggcaucaucaccaccgucgccgccuuccaccaggagugcagccugcaguccugcacgcagcaccagcccuacgugguggacgacccgugccccauccacuucuacagcaagugguacauccgcgucggggcccggaaguccgcgccccugaucgagcucugcguggacgaggccggcagcaagucccccauccaguacaucgacaucgggaacuacaccgccagcugccugccguucaccaucaacugccaggagcccaagcugggcucccucgugguccgcugcagcuucuacgaggacuuccuggaguaccacgacgugcgggugguccuggacuucaucugaggacuagucccuguucccagagcccacuuuuuuuucuuuuuuugaaauaaaauagccugucuuucagaucucaaaggcucuuuucagagccaccaaaaaaaaaaaaaaaaaaaaaaaaaaaaaaaaaaaaaaaaaaaaaaaaaaaaaaaaaaaaaaaaaaaaaaaaaaaaaaaaaaaaaaaaaaaaaaaaaaaaa

SEQ ID NO: 20804 - RNA, 638 nt, Artificial Sequence
  SARS-CoV-2__MT810601.1__ORF8 protein mRNA gc
aggagagucccgcagucggcguccagcggcucugcuuguucgugugugugucguugcaggccuuauucaagcuuaccaugaaguuccugguguuccucggcaucaucaccaccgucgccgccuuccaccaggagugcagccugcaguccugcacgcagcaccagcccuacgugguggacgacccgugccccauccacuucuacagcaagugguacauccgcgucggggcccggaaguccgcgccccugaucgagcucugcguggacgaggccggcagcaagucccccauccaguacaucgacaucgggaacuacaccgugagcugccugccguucaccaucaacugccaggagcccaagcugugcucccucgucgugcgcugcagcuucuacgaggacuuccuggaguaccacgacgugcgggucgugcuggacuucaucugaggacuagucccuguucccagagcccacuuuuuuuucuuuuuuugaaauaaaauagccugucuuucagaucucaaaggcucuuuucagagccaccaaaaaaaaaaaaaaaaaaaaaaaaaaaaaaaaaaaaaaaaaaaaaaaaaaaaaaaaaaaaaaaaaaaaaaaaaaaaaaaaaaaaaaaaaaaaaaaaaaaaa

SEQ ID NO: 20805 - RNA, 638 nt, Artificial Sequence
  SARS-CoV-2__MT810624.1__ORF8 protein mRNA gc
aggagagucccgcagucggcguccagcggcucugcuuguucgugugugugucguugcaggccuuauucaagcuuaccaugaaguucuucguguuccugggcaucaucaccaccgucgccgccuuccaccaggagugcagccuccaguccugcacgcagcaccagcccuacgugguggacgacccgugccccauccacuucuacagcaagugguacauccgcgucggggcccggaaguccgcgccccugaucgagcugugcguggacgaggccggcagcaagucccccauccaguacaucgacaucgggaacuacaccgugagcugccucccguucaccaucaacugccaggagcccaagcugggcucccuggucgugcgcugcagcuucuacgaggacuuccucgaguaccacgacgugcgggucgugcuggacuucaucugaggacuagucccuguucccagagcccacuuuuuuuucuuuuuuugaaauaaaauagccugucuuucagaucucaaaggcucuuuucagagccaccaaaaaaaaaaaaaaaaaaaaaaaaaaaaaaaaaaaaaaaaaaaaaaaaaaaaaaaaaaaaaaaaaaaaaaaaaaaaaaaaaaaaaaaaaaaaaaaaaaaaa

SEQ ID NO: 20806 - RNA, 638 nt, Artificial Sequence
  SARS-CoV-2__MT811022.1__ORF8 protein mRNA gc
aggagagucccgcagucggcguccagcggcucugcuuguucgugugugugucguugcaggccuuauucaagcuuaccaugaaguuccugguguuccucggcaucaucaccaccgucgccgccuuccaccaggagugcagccugcaguccugcacgcagcaccagcccuacgugguggacgacccgugccccauccacuucuacagcaagugguacauccgcgucggggcccggaaguccgcgccccugaucgagcucugcguggacgaggccggcagcaagucccccauccagcacaucgacaucgggaacuacaccgugagcugccugccguucaccaucaacugccaggagcccaagcugggcucccucgucgugcgcugcagcuucuacgaggacuuccuggaguaccacgacgugcgggucgugcuggacuucaucugaggacuagucccuguucccagagcccacuuuuuuuucuuuuuuugaaauaaaauagccugucuuucagaucucaaaggcucuuuucagagccaccaaaaaaaaaaaaaaaaaaaaaaaaaaaaaaaaaaaaaaaaaaaaaaaaaaaaaaaaaaaaaaaaaaaaaaaaaaaaaaaaaaaaaaaaaaaaaaaaaaaaa

SEQ ID NO: 20807 - RNA, 638 nt, Artificial Sequence
  SARS-CoV-2__MT811486.1__ORF8 protein mRNA gc
aggagagucccgcagucggcguccagcggcucugcuuguucgugugugugucguugcaggccuuauucaagcuuaccaugaaguuccugguguuccucggcaucaucaccaccgucgccgccuuccaccaggagugcagccugcaguccugcacgaagcaccagcccuacgugguggacgacccgugccccauccacuucuacagcaagugguacauccgcgucggggcccggaaguccgcgccccugaucgagcucugcguggacgaggccggcagcaagucccccauccaguacaucgacaucgggaacuacaccgugagcugccugccguucaccaucaacugccaggagcccaagcugggcucccucgucgugcgcugcagcuucuacgaggacuuccuggaguaccacgacgugcgggucgugcuggacuucaucugaggacuagucccuguucccagagcccacuuuuuuuucuuuuuuugaaauaaaauagccugucuuucagaucucaaaggcucuuuucagagccaccaaaaaaaaaaaaaaaaaaaaaaaaaaaaaaaaaaaaaaaaaaaaaaaaaaaaaaaaaaaaaaaaaaaaaaaaaaaaaaaaaaaaaaaaaaaaaaaaaaaaa

SEQ ID NO: 20808 - RNA, 638 nt, Artificial Sequence
  SARS-CoV-2__MT811528.1__ORF8 protein mRNA gc
aggagagucccgcagucggcguccagcggcucugcuuguucgugugugugucguugcaggccuuauucaagcuuaccaugaagauccugguguuccucggcaucaucaccaccgucgccgccuuccaccaggagugcagccugcaguccugcacgcagcaccagcccuacgugguggacgacccgugccccauccacuucuacagcaagugguacauccgcgucggggcccggaaguccgcgccccugaucgagcucugcguggacgaggccggcagcaagucccccauccaguacaucgacaucgggaacuacaccgugagcugccugccguucaccaucaacugccaggagcccaagcugggcucccucgucgugcgcugcagcuucuacgaggacuuccuggaguaccacgacgugcgggucgugcuggacuucaucugaggacuagucccuguucccagagcccacuuuuuuuucuuuuuuugaaauaaaauagccugucuuucagaucucaaaggcucuuuucagagccaccaaaaaaaaaaaaaaaaaaaaaaaaaaaaaaaaaaaaaaaaaaaaaaaaaaaaaaaaaaaaaaaaaaaaaaaaaaaaaaaaaaaaaaaaaaaaaaaaaaaaa

SEQ ID NO: 20809 - RNA, 638 nt, Artificial Sequence
  SARS-CoV-2__MT811533.1__ORF8 protein mRNA gc
aggagagucccgcagucggcguccagcggcucugcuuguucgugugugugucguugcaggccuuauucaagcuuaccaugaaguuccugguguuccucggcaucaucaccaccgucgccgccuuccaccaggagugcagccugcaguccugcacgcagcaccagcccuacgugguggacgacccgugccccauccacuucuacagcaagugguacauccgcgucggggcccggaaguccgcgccccugaucgagcucugcguggacgaggccggcagcaagucccccauccaguacaucgacaucgggaacuacaccgugagcugccugccguucaccaucaacugccaggagcccaagcugggcucccucgucgugcgcugcagcuucuacgaggacuuccuggaguaccacgacgugcgggucgugcuggacgugcucugaggacuagucccuguucccagagcccacuuuuuuuucuuuuuuugaaauaaaauagccugucuuucagaucucaaaggcucuuuucagagccaccaaaaaaaaaaaaaaaaaaaaaaaaaaaaaaaaaaaaaaaaaaaaaaaaaaaaaaaaaaaaaaaaaaaaaaaaaaaaaaaaaaaaaaaaaaaaaaaaaaaaa

SEQ ID NO: 20810 - RNA, 638 nt, Artificial Sequence
  SARS-CoV-2__MT811534.1__ORF8 protein mRNA gc
aggagagucccgcagucggcguccagcggcucugcuuguucgugugugugucguugcaggccuuauucaagcuuaccaugaaguuccugguguuccucggcaucaucaccaccgucgccgccuuccaccaggagugcagccugcaguccugcacgcagcaccagcccuacgugguggacgacccgugccccauccacuucuacagcaagugguacauccgcgucggggcccggaaguccgcgccccugaucgagcucugcguggacgaggccggcagcaagucccccauccaguacaucgacaucgggaacuacaccgugagcugccugccguucaccaucaacugccaggagcccaagcugggcucccucgucgugcgcugcagcuucuacgaggacuuccuggagugccacgacgugcgggucgugcuggacuucaucugaggacuagucccuguucccagagcccacuuuuuuuucuuuuuuugaaauaaaauagccugucuuucagaucucaaaggcucuuuucagagccaccaaaaaaaaaaaaaaaaaaaaaaaaaaaaaaaaaaaaaaaaaaaaaaaaaaaaaaaaaaaaaaaaaaaaaaaaaaaaaaaaaaaaaaaaaaaaaaaaaaaaa

SEQ ID NO: 20811 - RNA, 638 nt, Artificial Sequence
  SARS-CoV-2__MT806884.1__ORF8 protein mRNA gc
aggagagucccgcagucggcguccagcggcucugcuuguucgugugugugucguugcaggccuuauucaagcuuaccaugaaguuccugguguuccucggcaucaucaccaccgucgccgccuuccaccaggagugcagccugcagcugugcacgcagcaccagcccuacgugguggacgacccgugccccauccacuucuacuccaagugguacauccgcgucggggcccgcaagagcgcgccccucaucgagcugugcguggacgaggccggcuucaagucccccauccaguacaucgacaucgggaacuacaccgugagcugccugccguucaccaucaacugccaggagcccaagcucggcucccuggucgugcggugcagcuucuacgaggacuuccuggaguaccacgacgugcgggucgugcucgacuucaucugaggacuagucccuguucccagagcccacuuuuuuuucuuuuuuugaaauaaaauagccugucuuucagaucucaaaggcucuuuucagagccaccaaaaaaaaaaaaaaaaaaaaaaaaaaaaaaaaaaaaaaaaaaaaaaaaaaaaaaaaaaaaaaaaaaaaaaaaaaaaaaaaaaaaaaaaaaaaaaaaaaaaa

SEQ ID NO: 20812 - RNA, 638 nt, Artificial Sequence
  SARS-CoV-2__MT800031.1__ORF8 protein mRNA gc
aggagagucccgcagucggcguccagcggcucugcuuguucgugugugugucguugcaggccuuauucaagcuuaccaugaaguuccugguguuccucggcaucaucaccaccgucagcgccuuccaccaggagugcucccugcagagcugcacgcagcaccagcccuacgugguggacgacccgugccccauccacuucuacuccaagugguacauccgcgucggggcccgcaagagcgcgccccugaucgagcucugcguggacgaggccggcuccaagagccccauccaguacaucgacaucgggaacuacaccguguccugccugccguucaccaucaacugccaggagcccaagcugggcagccucgucgugcggugcuccuucuacgaggacuuccuggaguaccacgacgugcgggucgugcuggacuucaucugaggacuagucccuguucccagagcccacuuuuuuuucuuuuuuugaaauaaaauagccugucuuucagaucucaaaggcucuuuucagagccaccaaaaaaaaaaaaaaaaaaaaaaaaaaaaaaaaaaaaaaaaaaaaaaaaaaaaaaaaaaaaaaaaaaaaaaaaaaaaaaaaaaaaaaaaaaaaaaaaaaaaa

SEQ ID NO: 20813 - RNA, 638 nt, Artificial Sequence
  SARS-CoV-2__MT795889.1__ORF8 protein mRNA gc
aggagagucccgcagucggcguccagcggcucugcuuguucgugugugugucguugcaggccuuauucaagcuuaccaugaaguuccugguguuccucggcaucaucaccaccgucgccgccuuccaccaggagugcagccugcaguccugcacgcagcaccagcccuacguguucgacgacccgugccccauccacuucuacagcaagugguacauccgcgugggggcccggaaguccgcgccccugaucgagcucugcgucgacgaggccggcagcaagucccccauccaguacaucgacaucgggaacuacaccgugagcugccugccguucaccaucaacugccaggagcccaagcugggcucccucgugguccgcugcagcuucuacgaggacuuccuggaguaccacgacgugcgggugguccuggacuucaucugaggacuagucccuguucccagagcccacuuuuuuuucuuuuuuugaaauaaaauagccugucuuucagaucucaaaggcucuuuucagagccaccaaaaaaaaaaaaaaaaaaaaaaaaaaaaaaaaaaaaaaaaaaaaaaaaaaaaaaaaaaaaaaaaaaaaaaaaaaaaaaaaaaaaaaaaaaaaaaaaaaaaa

SEQ ID NO: 20814 - RNA, 638 nt, Artificial Sequence
  SARS-CoV-2__MT791870.1__ORF8 protein mRNA gc
aggagagucccgcagucggcguccagcggcucugcuuguucgugugugugucguugcaggccuuauucaagcuuaccaugaaguuccugguguuccucggcaucaucaccaccgucgccgccuuccaccaggagugcagccugcaguccugcacgcagcaccagcccuacgugguggacgacccgugccccauccacuucuacagcaagcuguacauccgcgucggggcccggaaguccgcgccccucaucgagcugugcguggacgaggccggcagcaagucccccauccaguacaucgacaucgggaacuacaccgugagcugccugccguucaccaucaacugccaggagcccaagcucggcucccuggucgugcgcugcagcuucuacgaggacuuccuggaguaccacgacgugcgggucgugcucgacuucaucugaggacuagucccuguucccagagcccacuuuuuuuucuuuuuuugaaauaaaauagccugucuuucagaucucaaaggcucuuuucagagccaccaaaaaaaaaaaaaaaaaaaaaaaaaaaaaaaaaaaaaaaaaaaaaaaaaaaaaaaaaaaaaaaaaaaaaaaaaaaaaaaaaaaaaaaaaaaaaaaaaaaaa

SEQ ID NO: 20815 - RNA, 638 nt, Artificial Sequence
  SARS-CoV-2__MT786817.1__ORF8 protein mRNA gc
aggagagucccgcagucggcguccagcggcucugcuuguucgugugugugucguugcaggccuuauucaagcuuaccaugaaguuccugguguuccucggcaucaucaccaccgucgccgccuuccaccaggagugcagccugcaguccugcacgcagcaccagcccuacgugguggacgacccgugccccauccacuucuacagcaagugguacauccgcgucggggccaagaaguccgcgccccugaucgagcucugcguggacgaggccggcagcaagucccccauccaguacaucgacaucgggaacuacaccgugagcugccugccguucaccaucaacugccaggagcccaagcugggcucccucgucgugcggugcagcuucuacgaggacuuccuggaguaccacgacgugcgcgucgugcuggacuucaucugaggacuagucccuguucccagagcccacuuuuuuuucuuuuuuugaaauaaaauagccugucuuucagaucucaaaggcucuuuucagagccaccaaaaaaaaaaaaaaaaaaaaaaaaaaaaaaaaaaaaaaaaaaaaaaaaaaaaaaaaaaaaaaaaaaaaaaaaaaaaaaaaaaaaaaaaaaaaaaaaaaaaa

SEQ ID NO: 20816 - RNA, 611 nt, Artificial Sequence
  SARS-CoV-2__MT782382.1__ORF8 protein mRNA gc
aggagagucccgcagucggcguccagcggcucugcuuguucgugugugugucguugcaggccuuauucaagcuuaccaugaaguuccugguguuccucggcaucaucaccaccgucgccgccuuccaccaggagugcagccugcaguccugcacgcagcaccagcccuacgugguggacgacccgugcauccgcgucggggcccgcaagagcgcgccccugaucgagcucugcguggacgaggccggcuccaagagccccauccaguacaucgacaucgggaacuacaccguguccugccugcccuucaccaucaacugccaggagccgaagcugggcagccucgucgugcggugcuccuucuacgaggacuuccuggaguaccacgacgugcgggucgugcuggacuucaucugaggacuagucccuguucccagagcccacuuuuuuuucuuuuuuugaaauaaaauagccugucuuucagaucucaaaggcucuuuucagagccaccaaaaaaaaaaaaaaaaaaaaaaaaaaaaaaaaaaaaaaaaaaaaaaaaaaaaaaaaaaaaaaaaaaaaaaaaaaaaaaaaaaaaaaaaaaaaaaaaaaaaa

SEQ ID NO: 20817 - RNA, 638 nt, Artificial Sequence
  SARS-CoV-2__MT777677.1__ORF8 protein mRNA gc
aggagagucccgcagucggcguccagcggcucugcuuguucgugugugugucguugcaggccuuauucaagcuuaccaugaaguuccugguguuccucggcaucaucaccaccgucgccgccuuccaccaggagugcagccugcaguccugcacgcagcaccagcccuacgugguggacuacccgugccccauccacuucuacagcaagugguacauccgcgucggggcccggaaguccgcgccccugaucgagcucugcguggacgaggccggcagcaagucccccauccaguacaucgacaucgggaacuacaccgugagcugccugccguucaccaucaacugccaggagcccaagcugggcucccucgucgugcgcugcagcuucuacgaggacuuccuggaguaccacgacgugcgggucgugcuggacuucaucugaggacuagucccuguucccagagcccacuuuuuuuucuuuuuuugaaauaaaauagccugucuuucagaucucaaaggcucuuuucagagccaccaaaaaaaaaaaaaaaaaaaaaaaaaaaaaaaaaaaaaaaaaaaaaaaaaaaaaaaaaaaaaaaaaaaaaaaaaaaaaaaaaaaaaaaaaaaaaaaaaaaaa

SEQ ID NO: 20818 - RNA, 638 nt, Artificial Sequence
  SARS-CoV-2__MT757030.1__ORF8 protein mRNA gc
aggagagucccgcagucggcguccagcggcucugcuuguucgugugugugucguugcaggccuuauucaagcuuaccaugaaguuccugguguuccucggcaucaucaccaccgucgccgcccugcaccaggagugcagccugcaguccugcacgcagcaccagcccuacgugguggacgacccgugccccauccacuucuacagcaagugguacauccgcgucggggcccggaaguccgcgccccucaucgagcugugccuggacgaggccggcagcaagucccccauccaguacaucgacaucgggaacuacaccgugagcugcuccccguucaccaucaacugccaggagcccaagcucggcagccuggugguccgcugcuccuucuacgaggacuuccuggaguaccacgacgugcgggugguccucgacuucaucugaggacuagucccuguucccagagcccacuuuuuuuucuuuuuuugaaauaaaauagccugucuuucagaucucaaaggcucuuuucagagccaccaaaaaaaaaaaaaaaaaaaaaaaaaaaaaaaaaaaaaaaaaaaaaaaaaaaaaaaaaaaaaaaaaaaaaaaaaaaaaaaaaaaaaaaaaaaaaaaaaaaaa

SEQ ID NO: 20819 - RNA, 638 nt, Artificial Sequence
  SARS-CoV-2__MT757105.1__ORF8 protein mRNA gc
aggagagucccgcagucggcguccagcggcucugcuuguucgugugugugucguugcaggccuuauucaagcuuaccaugaaguuccugguguuccucggcaucaucaccaccgucgccgccuuccaccaggagugcagccugcagcugugcacgcagcaccagcccuacgugguggacgacccgugccccauccacuucuacuccaagugguacauccgcgucggggcccgcaagagcgcgccccucaucgagcugugccuggacgaggccggcuccaagagccccauccaguacaucgacaucgggaacuacaccguguccugccucccguucaccaucaacugccaggagcccaagcugggcagccuggugguccggugcuccuucuacgaggacuuccucgaguaccacgacgugcgggugguccuggacuucaucugaggacuagucccuguucccagagcccacuuuuuuuucuuuuuuugaaauaaaauagccugucuuucagaucucaaaggcucuuuucagagccaccaaaaaaaaaaaaaaaaaaaaaaaaaaaaaaaaaaaaaaaaaaaaaaaaaaaaaaaaaaaaaaaaaaaaaaaaaaaaaaaaaaaaaaaaaaaaaaaaaaaaa

SEQ ID NO: 20820 - RNA, 638 nt, Artificial Sequence
  SARS-CoV-2__MT757116.1__ORF8 protein mRNA gc
aggagagucccgcagucggcguccagcggcucugcuuguucgugugugugucguugcaggccuuauucaagcuuaccaugaaguuccugguguuccucggcaucaucaccaccgucgccgccuuccaccaggagugcagccugcagcugugcacgcagcaccagcccuacgugguggacgacccgugcuccauccacuucuacagcaagugguacauccgcgucggggcccggaaguccgcgccccucaucgagcugugcguggacgaggccggcagcaagucccccauccaguacaucgacaucgggaacuacaccgugagcugccugcccuucaccaucaacugccaggagccgaagcucggcucccuggucgugcgcugcagcuucuacgaggacuuccuggaguaccacgacgugcgggucgugcucgacuucaucugaggacuagucccuguucccagagcccacuuuuuuuucuuuuuuugaaauaaaauagccugucuuucagaucucaaaggcucuuuucagagccaccaaaaaaaaaaaaaaaaaaaaaaaaaaaaaaaaaaaaaaaaaaaaaaaaaaaaaaaaaaaaaaaaaaaaaaaaaaaaaaaaaaaaaaaaaaaaaaaaaaaaa

SEQ ID NO: 20821 - RNA, 638 nt, Artificial Sequence
  SARS-CoV-2__MT750459.1__ORF8 protein mRNA gc
aggagagucccgcagucggcguccagcggcucugcuuguucgugugugugucguugcaggccuuauucaagcuuaccaugaaguuccugguguuccucggcaucaucaccaccgucgccgccuuccaccaggagugcagccugcaguccugcacgcagcaccagcccuacgugguggacgacccgugccccauccacuucuacagcaagugguacauccgcgucggggcccggaaguccgcgccccugaucgagcucugcguggacgagagcggcuccaagagccccauccaguacaucgacaucgggaacuacaccguguccugcagcccguucaccaucaacugccaggagcccaagcugggcucccuggucgugcgcugcagcuucuacgaggacuuccucgaguaccacgacgugcgggucgugcuggacuucaucugaggacuagucccuguucccagagcccacuuuuuuuucuuuuuuugaaauaaaauagccugucuuucagaucucaaaggcucuuuucagagccaccaaaaaaaaaaaaaaaaaaaaaaaaaaaaaaaaaaaaaaaaaaaaaaaaaaaaaaaaaaaaaaaaaaaaaaaaaaaaaaaaaaaaaaaaaaaaaaaaaaaaa

SEQ ID NO: 20822 - RNA, 638 nt, Artificial Sequence
  SARS-CoV-2__MT750487.1__ORF8 protein mRNA gc
aggagagucccgcagucggcguccagcggcucugcuuguucgugugugugucguugcaggccuuauucaagcuuaccaugaaguuccugguguuccucggcaucaucaccaccgucgccgccuuccaccaggagugcagccugcaguccugcacgcagcaccagcccuacgugguggacgacccgugccccacccacuucuacagcaagugguacauccgcgucggggcccggaaguccgcgccccugaucgagcucugcguggacgaggccggcagcaagucccccauccaguacaucgacaucgggaacuacaccgugagcugccugccguucaccaucaacugccaggagcccaagcugggcucccucgucgugcgcugcagcuucuacgaggacuuccuggaguaccacgacgugcgggucgugcuggacuucaucugaggacuagucccuguucccagagcccacuuuuuuuucuuuuuuugaaauaaaauagccugucuuucagaucucaaaggcucuuuucagagccaccaaaaaaaaaaaaaaaaaaaaaaaaaaaaaaaaaaaaaaaaaaaaaaaaaaaaaaaaaaaaaaaaaaaaaaaaaaaaaaaaaaaaaaaaaaaaaaaaaaaaa

SEQ ID NO: 20823 - RNA, 638 nt, Artificial Sequence
  SARS-CoV-2__MT740384.1__ORF8 protein mRNA gc
aggagagucccgcagucggcguccagcggcucugcuuguucgugugugugucguugcaggccuuauucaagcuuaccaugaaguuccugguguuccucggcaucaucaccaccgucgccgccuuccaccaggagugcagccugcaguccugcacgcagcaccagcccuacgugguggacgacccgugccgcauccacuucuacagcaagugguacauccgggucggggcccgcaaguccgcgccccugaucgagcucugcguggacgaggccggcagcaagucccccauccaguacaucgacaucgggaacuacaccgugagcugccugcccuucaccaucaacugccaggagccgaagcugggcucccucgucgugcggugcagcuucuacgaggacuuccuggaguaccacgacgugcgcgucgugcuggacuucaucugaggacuagucccuguucccagagcccacuuuuuuuucuuuuuuugaaauaaaauagccugucuuucagaucucaaaggcucuuuucagagccaccaaaaaaaaaaaaaaaaaaaaaaaaaaaaaaaaaaaaaaaaaaaaaaaaaaaaaaaaaaaaaaaaaaaaaaaaaaaaaaaaaaaaaaaaaaaaaaaaaaaaa

SEQ ID NO: 20824 - RNA, 638 nt, Artificial Sequence
  SARS-CoV-2__MT734055.1__ORF8 protein mRNA gc
aggagagucccgcagucggcguccagcggcucugcuuguucgugugugugucguugcaggccuuauucaagcuuaccaugaaguuccugguguuccucggcaucaucaccaccgucgccgccuuccaccaggagugcagccugcaguccugcacgcagcaccagcccuacgugguggacgacccgugccccauccacuucuacagcaagugguacauccgcgucggggcccggaaguccgcgccccugaucgagcucugcguggacgacgccggcagcaagucccccauccaguacaucgacaucgggaacuacaccgugagcugccugccguucaccaucaacugccaggagcccaagcugggcucccucgucgugcgcugcagcuucuacgaggacuuccuggaguaccacgacgugcgggucgugcuggacuucaucugaggacuagucccuguucccagagcccacuuuuuuuucuuuuuuugaaauaaaauagccugucuuucagaucucaaaggcucuuuucagagccaccaaaaaaaaaaaaaaaaaaaaaaaaaaaaaaaaaaaaaaaaaaaaaaaaaaaaaaaaaaaaaaaaaaaaaaaaaaaaaaaaaaaaaaaaaaaaaaaaaaaaa

SEQ ID NO: 20825 - RNA, 638 nt, Artificial Sequence
  SARS-CoV-2__MT704111.1__ORF8 protein mRNA gc
aggagagucccgcagucggcguccagcggcucugcuuguucgugugugugucguugcaggccuuauucaagcuuaccaugaaguuccugguguuccucggcaucaucaccaccgucgccgccuuccaccaggagugcagccugcaguccugcacgcagcaccagccccacgugguggacgacccgugccccauccacuucuacagcaagugguacauccgcgucggggcccggaaguccgcgccccugaucgagcucugcguggacgaggccggcagcaagucccccauccaguacaucgacaucgggaacuacaccgugagcugccugccguucaccaucaacugccaggagcccaagcugggcucccucgucgugcgcugcagcuucuacgaggacuuccuggaguaccacgacgugcgggucgugcuggacuucaucugaggacuagucccuguucccagagcccacuuuuuuuucuuuuuuugaaauaaaauagccugucuuucagaucucaaaggcucuuuucagagccaccaaaaaaaaaaaaaaaaaaaaaaaaaaaaaaaaaaaaaaaaaaaaaaaaaaaaaaaaaaaaaaaaaaaaaaaaaaaaaaaaaaaaaaaaaaaaaaaaaaaaa

SEQ ID NO: 20826 - RNA, 638 nt, Artificial Sequence
  SARS-CoV-2__MT683389.1__ORF8 protein mRNA gc
aggagagucccgcagucggcguccagcggcucugcuuguucgugugugugucguugcaggccuuauucaagcuuaccaugaaguuccugguguuccucggcaucaucaccaccgucgccgccuuccaccaggagugcagccugcaguccugcacgcagcaccagcccuacguggugggggacccgugccccauccacuucuacagcaagugguacauccgcgucggcgcccggaaguccgcgccccugaucgagcucugcguggacgaggccgggagcaagucccccauccaguacaucgacaucggcaacuacaccgugagcugccugccguucaccaucaacugccaggagcccaagcuggggucccucgucgugcgcugcagcuucuacgaggacuuccuggaguaccacgacgugcgggucgugcuggacuucaucugaggacuagucccuguucccagagcccacuuuuuuuucuuuuuuugaaauaaaauagccugucuuucagaucucaaaggcucuuuucagagccaccaaaaaaaaaaaaaaaaaaaaaaaaaaaaaaaaaaaaaaaaaaaaaaaaaaaaaaaaaaaaaaaaaaaaaaaaaaaaaaaaaaaaaaaaaaaaaaaaaaaaa

SEQ ID NO: 20827 - RNA, 638 nt, Artificial Sequence
  SARS-CoV-2__MT679161.1__ORF8 protein mRNA gc
aggagagucccgcagucggcguccagcggcucugcuuguucgugugugugucguugcaggccuuauucaagcuuaccaugaaguuccugguguuccucggcaucaucaccaccgucgccgccuuccaccaggagugcagccugcaguccugcacgcagcaccagcccuacgugguggacgacccgugccccauccacuucuacagcaagugguacauccgcgucggggcccggaaguccgcgccccugaucgagcucugcguggacgaggccggcagcaagucccccauccuguacaucgacaucgggaacuacaccgugagcugccugccguucaccaucaacugccaggagcccaagcucggcucccuggucgugcgcugcagcuucuacgaggacuuccuggaguaccacgacgugcgggucgugcucgacuucaucugaggacuagucccuguucccagagcccacuuuuuuuucuuuuuuugaaauaaaauagccugucuuucagaucucaaaggcucuuuucagagccaccaaaaaaaaaaaaaaaaaaaaaaaaaaaaaaaaaaaaaaaaaaaaaaaaaaaaaaaaaaaaaaaaaaaaaaaaaaaaaaaaaaaaaaaaaaaaaaaaaaaaa

SEQ ID NO: 20828 - RNA, 638 nt, Artificial Sequence
  SARS-CoV-2__MT642081.1__ORF8 protein mRNA gc
aggagagucccgcagucggcguccagcggcucugcuuguucgugugugugucguugcaggccuuauucaagcuuaccaugaaguuccugguguuccucggcaucaucaccaccgucgccgccuuccaccaggagugcagccugcaguccugcacgcagcaccagcccuacgugguggacgacccgugccccauccacuucuacagcaagugguacauccgcgucggggcccggaaguccgcgccccugaucgagcucugcguggacgaggccggcagcaagucccccauccaguacaucgacaucugcaacuacaccgugagcugccugccguucaccaucaacugccaggagcccaagcuggggucccucgucgugcgcugcagcuucuacgaggacuuccuggaguaccacgacgugcgggucgugcuggacuucaucugaggacuagucccuguucccagagcccacuuuuuuuucuuuuuuugaaauaaaauagccugucuuucagaucucaaaggcucuuuucagagccaccaaaaaaaaaaaaaaaaaaaaaaaaaaaaaaaaaaaaaaaaaaaaaaaaaaaaaaaaaaaaaaaaaaaaaaaaaaaaaaaaaaaaaaaaaaaaaaaaaaaaa

SEQ ID NO: 20829 - RNA, 638 nt, Artificial Sequence
  SARS-CoV-2__MT642109.1__ORF8 protein mRNA gc
aggagagucccgcagucggcguccagcggcucugcuuguucgugugugugucguugcaggccuuauucaagcuuaccaugaaguuccugguguuccucggcaucaucaccaccgucgccgccagccaccaggagugcucccugcagagcugcacgcagcaccagcccuacgugguggacgacccgugccccauccacuucuacuccaagugguacauccgcgucggggcccgcaagagcgcgccccugaucgagcucugcguggacgaggccggcuccaagagccccauccaguacaucgacaucgggaacuacaccguguccugccugccguucaccaucaacugccaggagcccaagcugggcagccucgucgugcggugcuccuucuacgaggacuuccuggaguaccacgacgugcgggucgugcuggacuucaucugaggacuagucccuguucccagagcccacuuuuuuuucuuuuuuugaaauaaaauagccugucuuucagaucucaaaggcucuuuucagagccaccaaaaaaaaaaaaaaaaaaaaaaaaaaaaaaaaaaaaaaaaaaaaaaaaaaaaaaaaaaaaaaaaaaaaaaaaaaaaaaaaaaaaaaaaaaaaaaaaaaaaa

SEQ ID NO: 20830 - RNA, 638 nt, Artificial Sequence
  SARS-CoV-2__MT642177.1__ORF8 protein mRNA gc
aggagagucccgcagucggcguccagcggcucugcuuguucgugugugugucguugcaggccuuauucaagcuuaccaugaaguuccugguguuccucggcaucaucaccaccgucgccgccuuccaccaggagugcagccugcaguccugcacgcagcaccagcccuacgugguggacgacccgugccccauccacuucuacagcaagugguacauccgcgucggggcccggaaguccgcgccccugaucgagcucugcguggacgaggccggcagcaagucccccauccacuacaucgacaucgggaacuacaccgugagcugcuccccguucaccaucaacugccaggagcccaagcugggcagccuggucgugcgcugcuccuucuacgaggacuuccucgaguaccacgacgugcgggucgugcuggacuucaucugaggacuagucccuguucccagagcccacuuuuuuuucuuuuuuugaaauaaaauagccugucuuucagaucucaaaggcucuuuucagagccaccaaaaaaaaaaaaaaaaaaaaaaaaaaaaaaaaaaaaaaaaaaaaaaaaaaaaaaaaaaaaaaaaaaaaaaaaaaaaaaaaaaaaaaaaaaaaaaaaaaaaa

SEQ ID NO: 20831 - RNA, 638 nt, Artificial Sequence
  SARS-CoV-2__MT630423.1__ORF8 protein mRNA gc
aggagagucccgcagucggcguccagcggcucugcuuguucgugugugugucguugcaggccuuauucaagcuuaccaugaaguuccugguguuccucggcaucaucaccaccgucgccgccuuccaccaggagugcagccugcaguccugcacgcagcaccagcccuacgugguggacgacccgugccccauccacuucuacagcaagcuguacauccgcgucggggcccggaaguccgcgccccucaucgagcugugcguggacgaggccggcagcaagucccccauccaguacaucgacaucgggaacuacaccgugagcugcuccccguucaccaucaacugccaggagcccaagcugggcagccucgucgugcgcugcuccuucuacgaggacuuccuggaguaccacgacgugcgggucgugcuggacuucaucugaggacuagucccuguucccagagcccacuuuuuuuucuuuuuuugaaauaaaauagccugucuuucagaucucaaaggcucuuuucagagccaccaaaaaaaaaaaaaaaaaaaaaaaaaaaaaaaaaaaaaaaaaaaaaaaaaaaaaaaaaaaaaaaaaaaaaaaaaaaaaaaaaaaaaaaaaaaaaaaaaaaaa

SEQ ID NO: 20832 - RNA, 638 nt, Artificial Sequence
  SARS-CoV-2__MT632817.1__ORF8 protein mRNA gc
aggagagucccgcagucggcguccagcggcucugcuuguucgugugugugucguugcaggccuuauucaagcuuaccaugaaguuccugguguuccucggcaucaucaccaccgucgccgccuuccaccaggagugcagccugcaguccugcacgcagcaccagcccuacgugguggacgacccgugccccauccacuucuacagcaagugguacauccgcgucggggcccggaaguccgcgccccugaucgagcucugcguggacgaggccggcuucaagagccccauccaguacaucgacaucgggaacuacaccguguccugcagcccguucaccaucaacugccaggagcccaagcugggcucccuggucgugcgcugcagcuucuacgaggacuuccucgaguaccacgacgugcgggucgugcuggacuucaucugaggacuagucccuguucccagagcccacuuuuuuuucuuuuuuugaaauaaaauagccugucuuucagaucucaaaggcucuuuucagagccaccaaaaaaaaaaaaaaaaaaaaaaaaaaaaaaaaaaaaaaaaaaaaaaaaaaaaaaaaaaaaaaaaaaaaaaaaaaaaaaaaaaaaaaaaaaaaaaaaaaaaa

SEQ ID NO: 20833 - RNA, 638 nt, Artificial Sequence
  SARS-CoV-2__MT632919.1__ORF8 protein mRNA gc
aggagagucccgcagucggcguccagcggcucugcuuguucgugugugugucguugcaggccuuauucaagcuuaccaugaaguuccugguguuccucggcaucaucgccaccgucgccgccuuccaccaggagugcagccugcaguccugcacccagcaccagcccuacgugguggacgacccgugccccauccacuucuacagcaagugguacauccgcgucggggcccggaaguccgcgccccugaucgagcucugcguggacgaggccggcagcaagucccccauccaguacaucgacaucgggaacuacacggugagcugcuccccguucaccaucaacugccaggagcccaagcugggcagccuggucgugcgcugcuccuucuacgaggacuuccucgaguaccacgacgugcgggucgugcuggacuucaucugaggacuagucccuguucccagagcccacuuuuuuuucuuuuuuugaaauaaaauagccugucuuucagaucucaaaggcucuuuucagagccaccaaaaaaaaaaaaaaaaaaaaaaaaaaaaaaaaaaaaaaaaaaaaaaaaaaaaaaaaaaaaaaaaaaaaaaaaaaaaaaaaaaaaaaaaaaaaaaaaaaaaa

SEQ ID NO: 20834 - RNA, 638 nt, Artificial Sequence
  SARS-CoV-2__MT607245.1__ORF8 protein mRNA gc
aggagagucccgcagucggcguccagcggcucugcuuguucgugugugugucguugcaggccuuauucaagcuuaccaugaaguuccugguguuccucggcaucaucaccaccgucgccgccuuccaccaggagugcagccugcaguccugcacgcagcaccagcccuacgugguggacgacccgugccccauccacuucuacagcaagugguacauccgcgucggggcccggaaguccgcgccccugaucgagcucugcguggacgaggccugcagcaagucccccauccaguacaucgacaucggcaacuacaccgugagcugccugccguucaccaucaacugccaggagcccaagcuggggucccucgucgugcgcugcagcuucuacgaggacuuccuggaguaccacgacgugcgggucgugcuggacuucaucugaggacuagucccuguucccagagcccacuuuuuuuucuuuuuuugaaauaaaauagccugucuuucagaucucaaaggcucuuuucagagccaccaaaaaaaaaaaaaaaaaaaaaaaaaaaaaaaaaaaaaaaaaaaaaaaaaaaaaaaaaaaaaaaaaaaaaaaaaaaaaaaaaaaaaaaaaaaaaaaaaaaaa

SEQ ID NO: 20835 - RNA, 638 nt, Artificial Sequence
  SARS-CoV-2__MT609558.1__ORF8 protein mRNA gc
aggagagucccgcagucggcguccagcggcucugcuuguucgugugugugucguugcaggccuuauucaagcuuaccaugaaguuccugguguuccucggcaucaucaccaccgucgccgccuuccaccaggagugcagccugcaguccugcacgcagcaccagcccuacgugguggacgaccugugcccgauccacuucuacagcaagugguacauccgcgucggggcccggaaguccgcgccccucaucgagcugugcguggacgaggccggcagcaagucccccauccaguacaucgacaucgggaacuacaccgugagcugccugcccuucaccaucaacugccaggagccgaagcucggcucccuggucgugcgcugcagcuucuacgaggacuuccuggaguaccacgacgugcgggucgugcucgacuucaucugaggacuagucccuguucccagagcccacuuuuuuuucuuuuuuugaaauaaaauagccugucuuucagaucucaaaggcucuuuucagagccaccaaaaaaaaaaaaaaaaaaaaaaaaaaaaaaaaaaaaaaaaaaaaaaaaaaaaaaaaaaaaaaaaaaaaaaaaaaaaaaaaaaaaaaaaaaaaaaaaaaaaa

SEQ ID NO: 20836 - RNA, 650 nt, Artificial Sequence
  SARS-CoV-2__MT568638.1__ORF8 protein mRNA gc
aggagagucccgcagucggcguccagcggcucugcuuguucgugugugugucguugcaggccuuauucaagcuuaccaugaaguuccugguguuccucggcaucaucaccaccgucgccgccuuccaccaggagugcagccugcaguccugcacgcagcaccagcccuacgugguggacgacccgugccccauccacuucuacagcaagugguacauccgcgucggggcccggaaguccgcgccccugaucgagcucugcguggacgaggccggcagcaagucccccauccaguacaucgacaucgggaacuacaccgugagcugcuccccguucaccaucaacugccaggagcccaagcugggcagccuggucgugcgcugcuccuucuacgaggacuuccucgaguaccacgacgugcgggucgugcuggaguucagcaagcgcaccaacugaggacuagucccuguucccagagcccacuuuuuuuucuuuuuuugaaauaaaauagccugucuuucagaucucaaaggcucuuuucagagccaccaaaaaaaaaaaaaaaaaaaaaaaaaaaaaaaaaaaaaaaaaaaaaaaaaaaaaaaaaaaaaaaaaaaaaaaaaaaaaaaaaaaaaaaaaaaaaaaaaaaaa

SEQ ID NO: 20837 - RNA, 638 nt, Artificial Sequence
  SARS-CoV-2__MT520189.1__ORF8 protein mRNA gc
aggagagucccgcagucggcguccagcggcucugcuuguucgugugugugucguugcaggccuuauucaagcuuaccaugaaguuccugguguuccucggcaucaucaccaccgucgccgccuuccaccaggagugcagccugcaguccugcacgcagcaccagcccuacgugguggacgacagcugcccgauccacuucuacuccaagugguacauccgcgucggggcccgcaagagcgcgccccugaucgagcucugccuggacgaggccggcuccaagagccccauccaguacaucgacaucgggaacuacaccguguccugcagccccuucaccaucaacugccaggagccgaagcugggcucccucgugguccggugcagcuucuacgaggacuuccuggaguaccacgacgugcgggugguccuggacuucaucugaggacuagucccuguucccagagcccacuuuuuuuucuuuuuuugaaauaaaauagccugucuuucagaucucaaaggcucuuuucagagccaccaaaaaaaaaaaaaaaaaaaaaaaaaaaaaaaaaaaaaaaaaaaaaaaaaaaaaaaaaaaaaaaaaaaaaaaaaaaaaaaaaaaaaaaaaaaaaaaaaaaaa

SEQ ID NO: 20838 - RNA, 638 nt, Artificial Sequence
  SARS-CoV-2__MT534313.1__ORF8 protein mRNA gc
aggagagucccgcagucggcguccagcggcucugcuuguucgugugugugucguugcaggccuuauucaagcuuaccaugaaguuccugguguuccucggcaucaucaagaccgucgccgccuuccaccaggagugcagccugcaguccugcacccagcaccagcccuacgugguggacgacccgugccccauccacuucuacagcaagugguacauccgcgucggggcccggaaguccgcgccccugaucgagcucugcguggacgaggccggcagcaagucccccauccaguacaucgacaucgggaacuacacggugagcugccugccguucaccaucaacugccaggagcccaagcugggcucccucgucgugcgcugcagcuucuacgaggacuuccuggaguaccacgacgugcgggucgugcuggacuucaucugaggacuagucccuguucccagagcccacuuuuuuuucuuuuuuugaaauaaaauagccugucuuucagaucucaaaggcucuuuucagagccaccaaaaaaaaaaaaaaaaaaaaaaaaaaaaaaaaaaaaaaaaaaaaaaaaaaaaaaaaaaaaaaaaaaaaaaaaaaaaaaaaaaaaaaaaaaaaaaaaaaaaa

SEQ ID NO: 20839 - RNA, 638 nt, Artificial Sequence
  SARS-CoV-2__MT511079.1__ORF8 protein mRNA gc
aggagagucccgcagucggcguccagcggcucugcuuguucgugugugugucguugcaggccuuauucaagcuuaccaugaaguuccugguguuccucggcaucaucaccaccgucgccgccuuccaccaggagugcagccugcaguccugcacgcagcaccagcccuacgugguggacgacccgugcagcauccacuucuacuccaagugguacauccgcgucggggcccgcaagagcgcgccccugaucgagcucugcguggacgaggccggcuccaagagccccauccaguacaucgacaucgggaacuacaccguguccugccugcccuucaccaucaacugccaggagccgaagcugggcagccucgucgugcggugcuccuucuacgaggacuuccuggaguaccacgacgugcgggucgugcuggacuucaucugaggacuagucccuguucccagagcccacuuuuuuuucuuuuuuugaaauaaaauagccugucuuucagaucucaaaggcucuuuucagagccaccaaaaaaaaaaaaaaaaaaaaaaaaaaaaaaaaaaaaaaaaaaaaaaaaaaaaaaaaaaaaaaaaaaaaaaaaaaaaaaaaaaaaaaaaaaaaaaaaaaaaa

SEQ ID NO: 20840 - RNA, 638 nt, Artificial Sequence
  SARS-CoV-2__MT509510.1__ORF8 protein mRNA gc
aggagagucccgcagucggcguccagcggcucugcuuguucgugugugugucguugcaggccuuauucaagcuuaccaugaaguuccugguguuccucgagaucaucaccaccgucgccgccuuccaccaggagugcagccugcaguccugcacgcagcaccagcccuacgugguggacgacccgugccccauccacuucuacagcaagugguacauccgcgucggcgcccggaaguccgcgccccugaucgagcucugcguggacgaggccgggagcaagucccccauccaguacaucgacaucggcaacuacaccgugagcugccugccguucaccaucaacugccaggagcccaagcuggggucccucgucgugcgcugcagcuucuacgaggacuuccuggaguaccacgacgugcgggucgugcuggacuucaucugaggacuagucccuguucccagagcccacuuuuuuuucuuuuuuugaaauaaaauagccugucuuucagaucucaaaggcucuuuucagagccaccaaaaaaaaaaaaaaaaaaaaaaaaaaaaaaaaaaaaaaaaaaaaaaaaaaaaaaaaaaaaaaaaaaaaaaaaaaaaaaaaaaaaaaaaaaaaaaaaaaaaa

SEQ ID NO: 20841 - RNA, 638 nt, Artificial Sequence
  SARS-CoV-2__MT506707.1__ORF8 protein mRNA gc
aggagagucccgcagucggcguccagcggcucugcuuguucgugugugugucguugcaggccuuauucaagcuuaccaugaaguuccugguguuccucggcaucaucaccaccgucgccgccuuccaccaggagugcagccugcaguccugcacgcagcaccagcccuacgugguggacgacccgugccccauccacuucuacagcaagugguacauccgcgucgggucccgcaagagcgcgccccugaucgagcucugcguggacgaggccggcuccaagagccccauccaguacaucgacaucgggaacuacaccguguccugccugccguucaccaucaacugccaggagcccaagcugggcagccucgucgugcggugcuccuucuacgaggacuuccuggaguaccacgacgugcgggucgugcuggacuucaucugaggacuagucccuguucccagagcccacuuuuuuuucuuuuuuugaaauaaaauagccugucuuucagaucucaaaggcucuuuucagagccaccaaaaaaaaaaaaaaaaaaaaaaaaaaaaaaaaaaaaaaaaaaaaaaaaaaaaaaaaaaaaaaaaaaaaaaaaaaaaaaaaaaaaaaaaaaaaaaaaaaaaa

SEQ ID NO: 20842 - RNA, 638 nt, Artificial Sequence
  SARS-CoV-2__MT482119.1__ORF8 protein mRNA gc
aggagagucccgcagucggcguccagcggcucugcuuguucgugugugugucguugcaggccuuauucaagcuuaccaugaaguuccugguguuccucggcaucaucaccaccgucgccgccuuccaccaggagugcagccugcaguccugcacgcagcaccagcccuacgugguggacgacccgugccccauccacuucuacagcaagugguacauccgcgucggggcccggaaguccgcgccccugaucgagcucugcguggacgaggccggcagcaagucccccauccaguacaucgacaucgggaacuacaccgugagcugccugccguucaccaucaacugccaggagcccaagcugggcucccucgucgugcgcugcagcuucuacgagaacuuccuggaguaccacgacgugcgggucgugcuggacuucaucugaggacuagucccuguucccagagcccacuuuuuuuucuuuuuuugaaauaaaauagccugucuuucagaucucaaaggcucuuuucagagccaccaaaaaaaaaaaaaaaaaaaaaaaaaaaaaaaaaaaaaaaaaaaaaaaaaaaaaaaaaaaaaaaaaaaaaaaaaaaaaaaaaaaaaaaaaaaaaaaaaaaaa

SEQ ID NO: 20843 - RNA, 638 nt, Artificial Sequence
  SARS-CoV-2__MT467253.1__ORF8 protein mRNA gc
aggagagucccgcagucggcguccagcggcucugcuuguucgugugugugucguugcaggccuuauucaagcuuaccaugaaguuccugguguuccucggcaucaucaccaccgucgccgccuuccaccaggagugcagccugcaguccugcacgcagcaccagcccuacgugguggacgacccgugccccauccacuucuacagcaagugguacauccgcgucggggcccggaaguccgcgccccugaucgagcucugcguggacgaggccggcagcaagucccccauccaguacaucgacaucgggaacuacaccgugagcugccugccguucaccaucaacugccaggagcccaagcugggcucccucgucgugcgcugcagcuucuacgaggacuuccuggaguaccacgacgugcgggucgugcuggacuuccucugaggacuagucccuguucccagagcccacuuuuuuuucuuuuuuugaaauaaaauagccugucuuucagaucucaaaggcucuuuucagagccaccaaaaaaaaaaaaaaaaaaaaaaaaaaaaaaaaaaaaaaaaaaaaaaaaaaaaaaaaaaaaaaaaaaaaaaaaaaaaaaaaaaaaaaaaaaaaaaaaaaaaa

SEQ ID NO: 20844 - RNA, 638 nt, Artificial Sequence
  SARS-CoV-2__MT470123.1__ORF8 protein mRNA gc
aggagagucccgcagucggcguccagcggcucugcuuguucgugugugugucguugcaggccuuauucaagcuuaccaugaaguuccugguguuccucggcaucaucaccaccgucgccgccuuccaccaggagugcagccugcaguccugcacgcagcaccagcccuacgugguggacgacccgugccccauccacuucuacagcaagugguacauccgcgucggggcccggaaguccgcgccccugaucgagcucugcguggacgaggccggcagcaagucccccauccaguacaucgacaucgggaacuacaccgugagcugccugccguucaccaucaacugccaggagcccaagcugggcucccucgucgugcgcugcagcuucuacgaggacuuccuggaguaccacgacgugcgggucgugcuggacuucuucugaggacuagucccuguucccagagcccacuuuuuuuucuuuuuuugaaauaaaauagccugucuuucagaucucaaaggcucuuuucagagccaccaaaaaaaaaaaaaaaaaaaaaaaaaaaaaaaaaaaaaaaaaaaaaaaaaaaaaaaaaaaaaaaaaaaaaaaaaaaaaaaaaaaaaaaaaaaaaaaaaaaaa

SEQ ID NO: 20845 - RNA, 638 nt, Artificial Sequence
  SARS-CoV-2__MT459881.1__ORF8 protein mRNA gc
aggagagucccgcagucggcguccagcggcucugcuuguucgugugugugucguugcaggccuuauucaagcuuaccaugaaguuccugguguuccucggcaucaucaccaccgucgccgccuuccaccaggagugcagccugcaguccugcacgcagcaccagcccuacgugguggacgacccgugccccauccacuucuacagcaagugguacauccgcgucggggcccggaaguccgcgccccugaucgagcucugcguggacgaggccggcagcaagucccccauccaguacaucgacaucgggaacuacaccgugagcugccugccguucaccaucaacugccaggagcccaagcugggcucccucgucgugcgcugcagcuucuacggggacuuccuggaguaccacgacgugcgggucgugcuggacuucaucugaggacuagucccuguucccagagcccacuuuuuuuucuuuuuuugaaauaaaauagccugucuuucagaucucaaaggcucuuuucagagccaccaaaaaaaaaaaaaaaaaaaaaaaaaaaaaaaaaaaaaaaaaaaaaaaaaaaaaaaaaaaaaaaaaaaaaaaaaaaaaaaaaaaaaaaaaaaaaaaaaaaaa

SEQ ID NO: 20846 - RNA, 638 nt, Artificial Sequence
  SARS-CoV-2__MT461632.1__ORF8 protein mRNA gc
aggagagucccgcagucggcguccagcggcucugcuuguucgugugugugucguugcaggccuuauucaagcuuaccaugaaguuccugguguuccucggcaucaucaccaccgucgccgccuuccaccaggagugcagccugcagcugugcacgcagcaccagcccuacgugguggacgacccgugccccauccacuucuacuccaagagcuacauccgcgucggggcccggaaguccgcgccccucaucgagcugugcguggacgaggccggcagcaagucccccauccaguacaucgacaucgggaacuacaccgugagcugccugccguucaccaucaacugccaggagcccaagcucggcucccuggucgugcgcugcagcuucuacgaggacuuccuggaguaccacgacgugcgggucgugcucgacuucaucugaggacuagucccuguucccagagcccacuuuuuuuucuuuuuuugaaauaaaauagccugucuuucagaucucaaaggcucuuuucagagccaccaaaaaaaaaaaaaaaaaaaaaaaaaaaaaaaaaaaaaaaaaaaaaaaaaaaaaaaaaaaaaaaaaaaaaaaaaaaaaaaaaaaaaaaaaaaaaaaaaaaaa

SEQ ID NO: 20847 - RNA, 638 nt, Artificial Sequence
  SARS-CoV-2__MT461664.1__ORF8 protein mRNA gc
aggagagucccgcagucggcguccagcggcucugcuuguucgugugugugucguugcaggccuuauucaagcuuaccaugaaguuccugguguuccucggcaucaucaccaccgucgccgccuuccaccaggagugcagccugcaguccugcacgcagcaccagcccuacgugguggacgacccgugccccauccacuucuacagcaagugguacauccgcgucggggcccggaaguccgcgccccugaucgagcucugcguggacgaggccgccagcaagucccccauccaguacaucgacaucggcaacuacaccgugagcugccugccguucaccaucaacugccaggagcccaagcuggggucccucgucgugcgcugcagcuucuacgaggacuuccuggaguaccacgacgugcgggucgugcuggacuucaucugaggacuagucccuguucccagagcccacuuuuuuuucuuuuuuugaaauaaaauagccugucuuucagaucucaaaggcucuuuucagagccaccaaaaaaaaaaaaaaaaaaaaaaaaaaaaaaaaaaaaaaaaaaaaaaaaaaaaaaaaaaaaaaaaaaaaaaaaaaaaaaaaaaaaaaaaaaaaaaaaaaaaa

SEQ ID NO: 20848 - RNA, 638 nt, Artificial Sequence
  SARS-CoV-2__MT451177.1__ORF8 protein mRNA gc
aggagagucccgcagucggcguccagcggcucugcuuguucgugugugugucguugcaggccuuauucaagcuuaccaugaaguuccugguguuccucggcaucaucaccaccgucgccgccuuccaccaggagugcagccugcaguccugcacgcagcaccagcccuacgugguggacgacccgugccccauccacuucuacagcaagugguacauccgcgucggggcccggaaguccgcgccccugaucgagcucugcguggacgaggccggcagcaagucccccauccaguacaucgacaucgggaacuacaccgugagcugccugccguucaccaucaacugccaggagcccaagcugggcucccucgucgugcgcugcagcuucuacgaggacuuccuggaguaccacgacuuccgggugguccuggacuucaucugaggacuagucccuguucccagagcccacuuuuuuuucuuuuuuugaaauaaaauagccugucuuucagaucucaaaggcucuuuucagagccaccaaaaaaaaaaaaaaaaaaaaaaaaaaaaaaaaaaaaaaaaaaaaaaaaaaaaaaaaaaaaaaaaaaaaaaaaaaaaaaaaaaaaaaaaaaaaaaaaaaaaa

SEQ ID NO: 20849 - RNA, 638 nt, Artificial Sequence
  SARS-CoV-2__MT451592.1__ORF8 protein mRNA gc
aggagagucccgcagucggcguccagcggcucugcuuguucgugugugugucguugcaggccuuauucaagcuuaccaugaaguuccugguguuccucgucaucaucaccaccguggccgccuuccaccaggagugcagccugcaguccugcacgcagcaccagcccuacguggucgacgacccgugccccauccacuucuacagcaagugguacauccgcgugggcgcccggaaguccgcgccccugaucgagcucugcguggacgaggccgggagcaagucccccauccaguacaucgacaucggcaacuacaccgucagcugccugccguucaccaucaacugccaggagcccaagcuggggucccucguggugcgcugcagcuucuacgaggacuuccuggaguaccacgacguccggguggugcuggacuucaucugaggacuagucccuguucccagagcccacuuuuuuuucuuuuuuugaaauaaaauagccugucuuucagaucucaaaggcucuuuucagagccaccaaaaaaaaaaaaaaaaaaaaaaaaaaaaaaaaaaaaaaaaaaaaaaaaaaaaaaaaaaaaaaaaaaaaaaaaaaaaaaaaaaaaaaaaaaaaaaaaaaaaa

SEQ ID NO: 20850 - RNA, 638 nt, Artificial Sequence
  SARS-CoV-2__MT252757.1__ORF8 protein mRNA gc
aggagagucccgcagucggcguccagcggcucugcuuguucgugugugugucguugcaggccuuauucaagcuuaccaugaaguuccugguguuccucggcaucaucaccaccgucgccgccuuccaccaggagugcagccugcaguccugcacgcagcaccagcccuacgugguggacgacccgugccccauccacuucuacagcaagugguacauccgcgucggggcccggaaguccgcgccccugaucgagcucugcguggacgaggccggcagcaagucccccauccaguacaucgacaucgggaacuacaccgugagcugcuccccguucaccaucaacugccaggagcccaagcugggcagccuggucgugcgcugcuccuucuacgaggacuuccucgaguaccaggacgugcgggucgugcuggacuucaucugaggacuagucccuguucccagagcccacuuuuuuuucuuuuuuugaaauaaaauagccugucuuucagaucucaaaggcucuuuucagagccaccaaaaaaaaaaaaaaaaaaaaaaaaaaaaaaaaaaaaaaaaaaaaaaaaaaaaaaaaaaaaaaaaaaaaaaaaaaaaaaaaaaaaaaaaaaaaaaaaaaaaa

SEQ ID NO: 20851 - RNA, 638 nt, Artificial Sequence
  SARS-CoV-2__MT358654.1__ORF8 protein mRNA gc
aggagagucccgcagucggcguccagcggcucugcuuguucgugugugugucguugcaggccuuauucaagcuuaccaugaaguuccugguguuccucggcaucaucaccaccgucgccgccuuccaccaggagugcagccugcaguccugcacgcagcaccagcccuacgugguggacgacccgugccccauccacuucuacagcaagugguacauccgcgucggggcccggaaguccgcgccccugaucgagcucugcguggacgaggccggcagcaagucccccauccaguacaucgacaucgggaacuacaccgugagcugccugccguucaccaucaacugccaggagcccaagcugggcucccucguccugcgcugcagcuucuacgaggacuuccuggaguaccacgacgugcgggugguccucgacuucaucugaggacuagucccuguucccagagcccacuuuuuuuucuuuuuuugaaauaaaauagccugucuuucagaucucaaaggcucuuuucagagccaccaaaaaaaaaaaaaaaaaaaaaaaaaaaaaaaaaaaaaaaaaaaaaaaaaaaaaaaaaaaaaaaaaaaaaaaaaaaaaaaaaaaaaaaaaaaaaaaaaaaaa

SEQ ID NO: 20852 - RNA, 877 nt, Artificial Sequence
  MERS-CoV/MERS-CoV-Jeddah-human-1__KF958702.1__membrane protein (M) mRNA gc
aggagaaagcuuaccaugagcaacaugacccagcugaccgaggcccagaucaucgccaucaucaaggacuggaacuucgcguggucccucaucuuccugcugaucacgaucgugcuccaguacggcuaccccagccgcuccaugaccgucuacguguucaagauguucgugcuguggcugcucuggccgagcuccauggcccugagcaucuucuccgccaucuaccccaucgaccuggccagccagaucaucuccgggaucgucgccgcggugagcgccaugauguggaucuccuacuucgugcagagcauccgccucuucaugcggaccggcuccugguggagcuucaaccccgagaccaacugccugcugaacguccccuucgggggcacgaccguggugcggccgcucgucgaggacuccaccagcgugaccgccguggucacgaacgggcaccugaagauggccggcaugcacuucggcgcgugcgacuacgaccgccugcccaacgaggugaccguggccaagcccaacguccucaucgcccugaagauggugaagcggcaguccuacgggaccaacagcggcguggccaucuaccaccgcuacaaggccgggaacuaccgguccccgcccaucaccgcggacaucgagcuggcccuccugcgcgccugaggacuaguuauaagacugacuagcccgaugggccucccaacgggcccuccuccccuccuugcaccgagauuaauaaaaaaaaaaaaaaaaaaaaaaaaaaaaaaaaaaaaaaaaaaaaaaaaaaaaaaaaaaaaaaaaugcaucccccccccccccccccccccccccccccccaaaggcucuuuucagagccaccagaauu

SEQ ID NO: 20853 - RNA, 877 nt, Artificial Sequence
  MERS-CoV/Al-Hasa_4_2013__KF186564.1__membrane protein (M) mRNA gc
aggagaaagcuuaccaugagcaacaugacccagcugaccgaggcccagaucaucgccaucaucaaggacuggaacuucgcguggucccucaucuuccugcugaucacgaucgugcuccaguacggcuaccccagccgcuccaugaccgucuacguguucaagauguucgugcuguggcugcucuggccgagcuccauggcccugagcaucuucuccgccgucuaccccaucgaccuggccagccagaucaucuccgggaucguggccgcggugagcgccaugauguggaucuccuacuucguccagagcauccgccucuucaugcggaccggcuccugguggagcuucaaccccgagaccaacugccugcugaacgugcccuucgggggcacgaccgugguccggccgcucguggaggacuccaccagcgugaccgccgucgugacgaacgggcaccugaagauggccggcaugcacuucggcgcgugcgacuacgaccgccugcccaacgaggugaccgucgccaagcccaacgugcucaucgcccugaagauggugaagcggcaguccuacgggaccaacagcggcgucgccaucuaccaccgcuacaaggccgggaacuaccgguccccgcccaucaccgcggacaucgagcuggcccuccugcgcgccugaggacuaguuauaagacugacuagcccgaugggccucccaacgggcccuccuccccuccuugcaccgagauuaauaaaaaaaaaaaaaaaaaaaaaaaaaaaaaaaaaaaaaaaaaaaaaaaaaaaaaaaaaaaaaaaaugcaucccccccccccccccccccccccccccccccaaaggcucuuuucagagccaccagaauu

SEQ ID NO: 20854 - RNA, 877 nt, Artificial Sequence; identical to SEQ ID NO: 20852
  MERS-CoV/Riyadh_14_2013__KJ156934.1__membrane protein (M) mRNA gc

SEQ ID NO: 20855 - RNA, 877 nt, Artificial Sequence; identical to SEQ ID NO: 20853
  MERS-CoV/England 1__NC_038294.1__membrane protein (M) mRNA gc

SEQ ID NO: 20856 - RNA, 883 nt, Artificial Sequence
  SARS-CoV/Tor2__NC_004718.3__membrane protein (M) mRNA gc
aggagaaagcuuaccauggccgacaacggcaccaucaccguggaggagcugaagcagcuccuggagcaguggaaccuggucaucggguuccucuuccuggccuggaucaugcugcuccaguucgcguacagcaaccgcaaccgguuccuguacaucaucaagcugguguuccucuggcugcuguggcccgugacgcucgccugcuucguccuggccgccguguaccgcaucaacugggugaccggcgggaucgccaucgcgauggccugcaucgucggccugauguggcucuccuacuucguggccagcuuccggcuguucgcccgcacccgguccauguggagcuucaacccggagaccaacauccugcucaacgugccccugcgcgggacgaucgucacccggccccugauggaguccgagcucgugaucggcgcggugaucauccgcggccaccuccggauggccgggcacagccugggccgcugcgacaucaaggaccugcccaaggagaucaccgucgccaccucccggacgcugagcuacuacaagcugggggccucccagcgcgugggcaccgacagcggguucgccgcguacaaccgguaccgcaucggcaacuacaagcucaacaccgaccacgccggcuccaacgacaacaucgcccugcuggugcagugaggacuaguuauaagacugacuagcccgaugggccucccaacgggcccuccuccccuccuugcaccgagauuaauaaaaaaaaaaaaaaaaaaaaaaaaaaaaaaaaaaaaaaaaaaaaaaaaaaaaaaaaaaaaaaaaugcaucccccccccccccccccccccccccccccccaaaggcucuuuucagagccaccagaauu

SEQ ID NO: 20857 - RNA, 910 nt, Artificial Sequence
  HCoV/OC43__NC_006213.1__membrane protein (M) mRNA gc
aggagaaagcuuaccaugagcuccaagaccacccccgccccgguguacaucuggacggccgacgaggcgaucaaguuccugaaggaguggaacuucagccucggcaucauccugcuguucaucaccaucauccuccaguucggguacaccucccgcagcauguucguguacgugaucaagaugaucauccuguggcugauguggccccucaccaucauccugacgaucuucaacugcguguacgcccugaacaacgucuaccucggccuguccaucguguucaccaucguggccaucaucauguggaucgucuacuucgugaacagcauccggcuguucauccgcaccggguccuucuggagcuucaaccccgagaccaacaaccucaugugcaucgacaugaagggcacgauguacgugcggcccaucaucgaggacuaccacacccugaccgucaccaucauccgcgggcaccuguacauccagggcaucaagcucggcacgggguacucccuggccgaccugccggccuacaugaccguggcgaaggugacccaccucugcaccuacaagcggggcuuccuggaccgcaucagcgacacguccggguucgccgucuacgucaagagcaaggugggcaacuaccggcugcccuccacccagaaggggagcggcauggacaccgcccuccugcgcaacaacaucugaggacuaguuauaagacugacuagcccgaugggccucccaacgggcccuccuccccuccuugcaccgagauuaauaaaaaaaaaaaaaaaaaaaaaaaaaaaaaaaaaaaaaaaaaaaaaaaaaaaaaaaaaaaaaaaaugcaucccccccccccccccccccccccccccccccaaaggcucuuuucagagccaccagaauu

SEQ ID NO: 20858 - RNA, 889 nt, Artificial Sequence
  HCoV/HKU1__NC_006577.2__membrane protein (M) mRNA gc
aggagaaagcuuaccaugaacaagagcuuccugccccaguucaccuccgaccaggccgugaccuuccucaaggaguggaacuucagccugggcgugauccuccuguucaucacgaucauccugcaguucggguacaccucccgcagcauguucguguaccugaucaagaugaucauccucuggcugauguggccgcugaccaucacccucacgaucuucaacugcuucuacgcccugaacaacgcguuccuggccuucuccaucguguucaccaucaucagcaucgucaucuggauccucuacuucgugaacuccauccggcuguucauccgcaccggcagcuggugguccuucaaccccgagaccaacaaccugaugugcaucgacaugaaggggaagauguucgugcggcccgucaucgaggacuaccacacgcucaccgccaccgugauccgcggccaccuguacauccagggggugaagcugggcaccggcuacacgcucagcgaccugcccgucuacgugaccguggccaagguccaggugcugugcaccuacaagcgggccuuccucgacaagcuggacgugaacuccggguucgcggucuucgucaagagcaaggugggcaacuaccgccugccguccagcaagcccuccgggauggacaccgcccuccugcgggccugaggacuaguuauaagacugacuagcccgaugggccucccaacgggcccuccuccccuccuugcaccgagauuaauaaaaaaaaaaaaaaaaaaaaaaaaaaaaaaaaaaaaaaaaaaaaaaaaaaaaaaaaaaaaaaaaugcaucccccccccccccccccccccccccccccccaaaggcucuuuucagagccaccagaauu

SEQ ID NO: 20859 - RNA, 895 nt, Artificial Sequence
  HCoV/229E/BN1/GER/2015__KU291448.1__membrane protein (M) mRNA gc
aggagaaagcuuaccaugagcaacgacaacugcaccggcgacaucgugacccaccugaagaacuggaacuucggguggaacgucauccucacgaucuucaucgugauccugcaguucggccacuacaaguacucccgccuguucuacgggcucaagaugcuggugcuguggcuccuguggccccugguccucgcccugagcaucuucgacaccugggccaacugggacuccaacugggcguucguggccuucagcuuccugauggccguguccacccucgucaugugggugauguacuucgccaacagcuuccggcuguuccgccgggcccgcaccuucugggcguggaacccggaggugaacgccaucacggucaccaccgugcugggccagaccuacuaccagcccauccagcaggcccccacggggaucaccgugacccuccuguccggcguccuguacguggacggccaccggcucgccagcggggugcagguccacaaccugcccgaguacaugaccguggcggugccguccacgaccaucaucuacagccgcgucggccgguccgugaacagccagaacuccaccggguggguguucuacguccgcgugaagcacggcgacuucagcgccguguccagccccauguccaacaugaccgagaacgagcggcugcuccacuucuucugaggacuaguuauaagacugacuagcccgaugggccucccaacgggcccuccuccccuccuugcaccgagauuaauaaaaaaaaaaaaaaaaaaaaaaaaaaaaaaaaaaaaaaaaaaaaaaaaaaaaaaaaaaaaaaaaugcaucccccccccccccccccccccccccccccccaaaggcucuuuucagagccaccagaauu

SEQ ID NO: 20860 - RNA, 898 nt, Artificial Sequence
  HCoV/NL63/RPTEC/2004__JX504050.1__membrane protein (M) mRNA gc
aggagaaagcuuaccaugagcaacuccagcgugccccugcucgaggucuacgugcaccuccgcaacuggaacuucuccuggaaccugauccugacccuguucaucgugguccugcaguacggccacuacaaguacagccggcuccuguacgggcugaagauguccgugcucuggugccuguggccgcuggugcucgcccugagcaucuucgacugcuucgucaacuucaacguggacuggguguucuucggcuucuccauccugaugagcaucaucacccucugccugugggucauguacuucgugaacuccuuccgccuguggcggcgcgugaagacguucugggccuucaaccccgagaccaacgcgaucaucagccuccaggucuacgggcacaacuacuaccugcccgugauggccgcccccaccggcgugacccugacgcuccuguccgggguccugcucguggacggccacaagaucgccacccgggugcaggucggccagcugccgaaguacgugaucguggccacccccagcaccacgaucgucugcgaccgcguggggcgguccgugaacgagaccagccagaccggcugggcguucuacguccgcgccaagcacggggacuucuccggcguggccagccaggaggggguccuguccgagcgggagaagcuccugcaccugaucugaggacuaguuauaagacugacuagcccgaugggccucccaacgggcccuccuccccuccuugcaccgagauuaauaaaaaaaaaaaaaaaaaaaaaaaaaaaaaaaaaaaaaaaaaaaaaaaaaaaaaaaaaaaaaaaaugcaucccccccccccccccccccccccccccccccaaaggcucuuuucagagccaccagaauu

SEQ ID NO: 20861 - RNA, 883 nt, Artificial Sequence
  Bat SARS-like CoV/WIV1__KF367457.1__membrane protein (M) mRNA gc
aggagaaagcuuaccauggccgagaacggcaccaucagcguggaggagcugaagcgccuccuggagcaguggaaccuggucaucggguuccucuuccuggccuggaucaugcugcuccaguucgcguacuccaaccggaaccgcuuccuguacaucaucaagcugguguuccucuggcugcuguggcccgugacccucgccugcuucguccuggccgccguguaccggaucaacugggugacgggcgggaucgccaucgcgauggccugcaucgucggccugauguggcucagcuacuucaucgccuccuuccgccuguucgcccggacccgcagcaugugguccuucaacccggagaccaacauccugcucaacgugccccugcgggggaccaucgugacgcgcccccugauggagagcgagcucgucaucggcgcggugaucauccggggccaccuccgcauggccgggcacucccugggccggugcgacaucaaggaccugcccaaggagaucaccguggccaccagccgcacccuguccuacuacaagcugggggccagccagcgggucggcacggacuccggguucgccgcguacaaccgcuaccggaucggcaacuacaagcucaacaccgaccacgccggcagcaacgacaacaucgcccugcuggugcagugaggacuaguuauaagacugacuagcccgaugggccucccaacgggcccuccuccccuccuugcaccgagauuaauaaaaaaaaaaaaaaaaaaaaaaaaaaaaaaaaaaaaaaaaaaaaaaaaaaaaaaaaaaaaaaaaugcaucccccccccccccccccccccccccccccccaaaggcucuuuucagagccaccagaauu

SEQ ID NO: 20862 - RNA, 886 nt, Artificial Sequence
  BatCoV/HKU9-1 BF_005I__NC_009021.1__membrane protein (M) mRNA gc
aggagaaagcuuaccaugagcaacaacugcaccaacaccgugccccgcccggaggucaucgccgcccugaaggacuggaacuucgcgguguccgugauccuccuguucaucacgguccugcuccaguggggcuaccccagccggugcaagcccaucugggugaucaagauguucauccuguggcugcucuggccccuguccaucgccgccgccguguucgccgcgauccacccgaucaacagcgucgccuucggguucgccaucgccuucgcgugcaucuccggcaucauguggcugagcuacuucaucuccagcuuccgccuccugugccggaccggguccgccuggagcuucaugcccgagaccgacaugcugaucaacaucccccuccugggccgcaccgugacgcggcccaucaucuccgacagcccggccgugcaguuccugaucauccgcggggagcuccgguucgacggcuucacccugggccgcugcgaccccggggacaugcccgacaucgucaccaucgcccggcccaacgcccugcacugguacaagcgcgcgcucacccggaacauguacacgcgcuccgccauccugguguacaucaaguacaaggugggcaaccaccggguccagaacaccaccgaggacggggaccgccuggccauguucguggccugaggacuaguuauaagacugacuagcccgaugggccucccaacgggcccuccuccccuccuugcaccgagauuaauaaaaaaaaaaaaaaaaaaaaaaaaaaaaaaaaaaaaaaaaaaaaaaaaaaaaaaaaaaaaaaaaugcaucccccccccccccccccccccccccccccccaaaggcucuuuucagagccaccagaauu

SEQ ID NO: 20863 - RNA, 871 nt, Artificial Sequence
  PDCoV/Swine/Thailand/S5011/2015__KU051641.1__membrane protein (M) mRNA gc
aggagaaagcuuaccaugagcgacgccgaggaguggcagaucaucguguucaucgccaucaucugggcgcugggcgucauccuccagggcggguacgccacccgcaaccgggugaucuacgugaucaagcugauccugcucuggcugcugcagcccuucacccucgucgugacgaucuggaccgccguggaccgcuccagcaagaaggacgccgucuucaucguguccaucaucuucgccgugcugaccuucaucagcugggcgaaguacugguacgacuccauccggcugcucaugaagacccgcagcgccugggcccuguccccggagagccggcugcucgccgggaucauggaccccaugggcacguggcgcugcauccccaucgaccacauggcgcccauccugaccccggucgugaagcacgggaagcugaagcuccacggccaggagcuggccaacggcaucuccgugcggaacccgccccaggacauggucaucgugagccccuccgacaccuuccacuacaccuucaagaagcccguggagagcaacaacgaccccgaguucgccguccugaucuaccagggggaccgcgccuccaacgccggccuccacacgaucaccaccagcaaggcgggggacgcccggcuguacaaguacaugugaggacuaguuauaagacugacuagcccgaugggccucccaacgggcccuccuccccuccuugcaccgagauuaauaaaaaaaaaaaaaaaaaaaaaaaaaaaaaaaaaaaaaaaaaaaaaaaaaaaaaaaaaaaaaaaaugcaucccccccccccccccccccccccccccccccaaaggcucuuuucagagccaccagaauu

SEQ ID NO: 20864 - RNA, 898 nt, Artificial Sequence
  PEDV/NPL-PEDv/2013/P10__KJ778616.1__membrane protein (M) mRNA gc
aggagaaagcuuaccaugagcaacggcuccauccccguggacgaggucauccagcaccuccgcaacuggaacuucaccuggaacaucauccugaccauccugcugguggugcuccaguacgggcacuacaaguacagcgccuuccuguacggcgucaagauggccauccuguggauccucuggccgcuggugcuggcgcucucccuguucgacgccugggccagcuuccaggugaacugggucuucuucgccuucuccauccugauggccugcaucacgcucaugcuguggaucauguacuucgugaacagcauccggcuguggcgccggacccacuccugguggagcuucaaccccgagaccgacgcgcuccugaccacguccgugauggggcgccaggucugcauccccgugcugggcgcccccaccggggugacccucacccugcugagcggcacgcuccuggucgagggcuacaagguggccaccggggugcaggucucccagcugccgaacuucgugaccguggccaaggcgaccacgaccaucgucuacggccggguggggcgcagcgugaacgccuccagcggcaccgggugggccuucuacguccgguccaagcacggcgacuacagcgccguguccaaccccagcuccgugcucaccgacagcgagaagguccugcaccuggugugaggacuaguuauaagacugacuagcccgaugggccucccaacgggcccuccuccccuccuugcaccgagauuaauaaaaaaaaaaaaaaaaaaaaaaaaaaaaaaaaaaaaaaaaaaaaaaaaaaaaaaaaaaaaaaaaugcaucccccccccccccccccccccccccccccccaaaggcucuuuucagagccaccagaauu

SEQ ID NO: 20865 - RNA, 904 nt, Artificial Sequence
  MHV/A59__NC_048217.1__membrane protein (M) mRNA gc
aggagaaagcuuaccaugagcuccaccacccaggcccccgagccgguguaccaguggacggccgacgaggcggugcaguuccugaaggaguggaacuucagccucggcaucauccugcuguucaucaccaucauccuccaguucggguacaccucccgcagcauguucaucuacguggugaagaugaucauccuguggcugauguggccccucaccaucguccugugcaucuucaacugcguguacgcccugaacaacguguaccucggcuucuccaucgucuucacgaucgugagcaucgugaucuggaucauguacuucgucaacuccauccggcuguucauccgcaccgggagcuggugguccuucaaccccgagaccaacaaccugaugugcaucgacaugaagggcaccguguacgugcggcccaucaucgaggacuaccacacgcucaccgccaccaucauccgcgggcaccuguacaugcagggcgucaagcugggcaccggguucagccucuccgaccugccggccuacgugacgguggccaaggucagccaccugugcaccuacaagcgggcguuccucgacaagguggacggcguguccggguucgccgucuacgucaagagcaaggugggcaacuaccgccugcccuccaacaagcccagcggggccgacaccgcccugcuccggaccugaggacuaguuauaagacugacuagcccgaugggccucccaacgggcccuccuccccuccuugcaccgagauuaauaaaaaaaaaaaaaaaaaaaaaaaaaaaaaaaaaaaaaaaaaaaaaaaaaaaaaaaaaaaaaaaaugcaucccccccccccccccccccccccccccccccaaaggcucuuuucagagccaccagaauu

SEQ ID NO: 20866 - RNA, 886 nt, Artificial Sequence
  SARS-CoV-2/Wuhan-Hu-1__NC_045512.2/MN908947.2/EPI_ISL_402128__mem brane protein (M) mRNA gc R9922
aggagaaagcuuaccauggccgacagcaacggcaccaucaccguggaggagcugaagaagcuccuggagcaguggaaccuggucaucggguuccucuuccugacguggaucugccugcuccaguucgccuacgcgaaccgcaaccgguuccuguacaucaucaagcugaucuuccucuggcugcuguggcccgugacccucgccugcuucgugcuggccgccgucuaccgcaucaacuggaucaccggcgggaucgccaucgcgauggccugccuggugggccucauguggcuguccuacuucaucgccagcuuccggcuguucgcccgcacccgguccauguggagcuucaacccggagacgaacauccuccugaacgugccccugcacgggaccauccucacccgcccccugcuggaguccgagcucgucaucggcgcggugauccugcggggccaccuccgcaucgccgggcaccaccugggccggugcgacaucaaggaccugcccaaggagaucaccguggccacgagccgcacccuguccuacuacaagcucggggccagccagcgggucgccggcgacuccggguucgcggccuacagccgcuaccggaucggcaacuacaagcugaacaccgaccacuccagcuccagcgacaacaucgcccugcucgugcagugaggacuaguuauaagacugacuagcccgaugggccucccaacgggcccuccuccccuccuugcaccgagauuaauaaaaaaaaaaaaaaaaaaaaaaaaaaaaaaaaaaaaaaaaaaaaaaaaaaaaaaaaaaaaaaaaugcaucccccccccccccccccccccccccccccccaaaggcucuuuucagagccaccagaauu

SEQ ID NO: 20867 - RNA, 886 nt, Artificial Sequence
  SARS-CoV-2__MT919771.1__membrane protein (M) mRNA gc
aggagaaagcuuaccauggccgacagcaacggcaccaucaccguggaggagcugaagaagcuccuggagcaguggaaccuggucaucggguuccucuucuucacguggaucugccugcugcaguucgccuacgcgaaccgcaaccgguuccucuacaucaucaagcugaucuuccuguggcuccuguggcccgugacccuggccugcuucgugcucgccgccgucuaccgcaucaacuggaucaccggcgggaucgccaucgcgauggccugccuggugggccugauguggcucuccuacuucaucgccagcuuccggcuguucgcccgcacccgguccauguggagcuucaacccggagacgaacauccugcucaacgugccccugcacgggaccauccugacccgcccccuccuggaguccgagcuggucaucggcgcggugauccuccggggccaccuccgcaucgccgggcaccaccugggccggugcgacaucaaggaccugcccaaggagaucaccguggccacgagccgcacccuguccuacuacaagcugggggccagccagcgggucgccggcgacuccggguucgcggccuacagccgcuaccggaucggcaacuacaagcucaacaccgaccacuccagcuccagcgacaacaucgcccugcuggugcagugaggacuaguuauaagacugacuagcccgaugggccucccaacgggcccuccuccccuccuugcaccgagauuaauaaaaaaaaaaaaaaaaaaaaaaaaaaaaaaaaaaaaaaaaaaaaaaaaaaaaaaaaaaaaaaaaugcaucccccccccccccccccccccccccccccccaaaggcucuuuucagagccaccagaauu

SEQ ID NO: 20868 - RNA, 886 nt, Artificial Sequence
  SARS-CoV-2__MT913062.1__membrane protein (M) mRNA gc
aggagaaagcuuaccauggccgacagcaacggcaccaucaccguggaggagcugaagaagcuccuggagcaguggaaccuggucaucggguuccucuuccugacguggaucugccugcuccaguucgccuacgcgaaccgcaaccgguuccuguacaucaucaagcugaucuuccucuggcugcuguggcccgugacccucgccugcuucgugcuggccgccgucuaccgcaucaacuggaucaccggcgggaucgccaucgcgauggccugccuggugggccucauguggcuguccuacuucaucgccagcuuccggcuguucgcccgcacccgguccauguggagcuucaacccggagacgaacauccuccugaacgugccccugcacgggaccauccucacccgcccccugcuggaguccgagcucgucaucggcgcggugauccugcggggccaccuccgcaucgccgggcaccaccugggccggugcgacaucaaggaccugcccaaggagaucaccguggccacgagccgcaugcuguccuacuacaagcucggggccagccagcgggucgccggcgacuccggguucgcggccuacagccgcuaccggaucggcaacuacaagcugaacaccgaccacuccagcuccagcgacaacaucgcccugcucgugcagugaggacuaguuauaagacugacuagcccgaugggccucccaacgggcccuccuccccuccuugcaccgagauuaauaaaaaaaaaaaaaaaaaaaaaaaaaaaaaaaaaaaaaaaaaaaaaaaaaaaaaaaaaaaaaaaaugcaucccccccccccccccccccccccccccccccaaaggcucuuuucagagccaccagaauu

SEQ ID NO: 20869 - RNA, 886 nt, Artificial Sequence
  SARS-CoV-2__MT913095.1__membrane protein (M) mRNA gc
aggagaaagcuuaccauggccgacagcaacggcaccaucaccguggaggagcugaagaagcuccuggagcaguggaaccuggucaucggguuccucuuccugacguggaucugccugcuccaguucgccuacgcgaaccgcaaccgguuccuguacaucaucaagcugaucuuccucuggcugcuguggcccgugacccucgccugcuucgugcuggccgccuucuaccgcaucaacuggaucaccggcgggaucgccaucgcgauggccugccuggucggccucauguggcuguccuacuucaucgccagcuuccggcuguucgcccgcacccgguccauguggagcuucaacccggagacgaacauccuccugaacgugccccugcacgggaccauccucacccgcccccugcuggaguccgagcucgugaucggcgcggucauccugcggggccaccuccgcaucgccgggcaccaccugggccggugcgacaucaaggaccugcccaaggagaucaccguggccacgagccgcacccuguccuacuacaagcucggggccagccagcggguggccggcgacuccggguucgcggccuacagccgcuaccggaucggcaacuacaagcugaacaccgaccacuccagcuccagcgacaacaucgcccugcucguccagugaggacuaguuauaagacugacuagcccgaugggccucccaacgggcccuccuccccuccuugcaccgagauuaauaaaaaaaaaaaaaaaaaaaaaaaaaaaaaaaaaaaaaaaaaaaaaaaaaaaaaaaaaaaaaaaaugcaucccccccccccccccccccccccccccccccaaaggcucuuuucagagccaccagaauu

SEQ ID NO: 20870 - RNA, 886 nt, Artificial Sequence
  SARS-CoV-2__MT913138.1__membrane protein (M) mRNA gc
aggagaaagcuuaccauggccgacagcaacggcaccaucaccguggaggagcugaagaagcuccuggagcaguggaaccuggucaucggguuccucuuccugacguggaucugccugcuccaguucgccuacgcgaaccgcaaccgguuccuguacaucaucaagcugaucuuccucuggcugcuguggcccgugacccucgccugcuucgugcuggccgccgucuaccgcaucaacuggaucaccggcgggaucgccaucgcgauggccugccuggugggccucauguggcuguccuacuucaucgccagcuuccggcuguucgcccgcacccgguccauguggagcuucaacccggagacgaacauccuccugaacgugccccugcacgggaccauccucacccgcccccugcuggaguccgagcucgucaucggcgcggugauccugcggggccaccuccgcaucgccgggcaccaccugggccggugcgacaucaaggaccugcccaaggagaucaccguggccacgagccugacccucuccuacuacaagcugggggccagccagcgcgucgccggcgacuccggguucgcggccuacagccgguaccgcaucggcaacuacaagcugaacaccgaccacuccagcuccagcgacaacaucgcccuccuggugcagugaggacuaguuauaagacugacuagcccgaugggccucccaacgggcccuccuccccuccuugcaccgagauuaauaaaaaaaaaaaaaaaaaaaaaaaaaaaaaaaaaaaaaaaaaaaaaaaaaaaaaaaaaaaaaaaaugcaucccccccccccccccccccccccccccccccaaaggcucuuuucagagccaccagaauu

SEQ ID NO: 20871 - RNA, 886 nt, Artificial Sequence
  SARS-CoV-2__MT913144.1__membrane protein (M) mRNA gc
aggagaaagcuuaccauggccgacagcaacggcaccaucaccguggaggagcugaagaagcuccuggagcaguggaaccugaucaucggguuccucuuccugacguggaucugccugcuccaguucgccuacgcgaaccgcaaccgguuccuguacaucaucaagcugaucuuccucuggcugcuguggcccgucacccucgccugcuucgugcuggccgccguguaccgcaucaacuggaucaccggcgggaucgccaucgcgauggccugccuggucggccucauguggcuguccuacuucaucgccagcuuccggcuguucgcccgcacccgguccauguggagcuucaacccggagacgaacauccuccugaacgugccccugcacgggaccauccucacccgcccccugcuggaguccgagcucgugaucggcgcggucauccugcggggccaccuccgcaucgccgggcaccaccugggccggugcgacaucaaggaccugcccaaggagaucaccguggccacgagccgcacccuguccuacuacaagcucggggccagccagcggguggccggcgacuccggguucgcggccuacagccgcuaccggaucggcaacuacaagcugaacaccgaccacuccagcuccagcgacaacaucgcccugcucguccagugaggacuaguuauaagacugacuagcccgaugggccucccaacgggcccuccuccccuccuugcaccgagauuaauaaaaaaaaaaaaaaaaaaaaaaaaaaaaaaaaaaaaaaaaaaaaaaaaaaaaaaaaaaaaaaaaugcaucccccccccccccccccccccccccccccccaaaggcucuuuucagagccaccagaauu

SEQ ID NO: 20872 - RNA, 886 nt, Artificial Sequence
  SARS-CoV-2__MT911566.1__membrane protein (M) mRNA gc
aggagaaagcuuaccauggccggcagcaacgggaccaucaccguggaggagcugaagaagcuccuggagcaguggaaccuggucaucggcuuccucuuccugacguggaucugccugcuccaguucgccuacgcgaaccgcaaccgguuccuguacaucaucaagcugaucuuccucuggcugcuguggcccgugacccucgccugcuucgugcuggccgccgucuaccgcaucaacuggaucaccgggggcaucgccaucgcgauggccugccugguggggcucauguggcuguccuacuucaucgccagcuuccggcuguucgcccgcacccgguccauguggagcuucaacccggagacgaacauccuccugaacgugccccugcacggcaccauccucacccgcccccugcuggaguccgagcucgucaucggcgcggugauccugcgggggcaccuccgcaucgccggccaccaccuggggcggugcgacaucaaggaccugcccaaggagaucaccguggccacgagccgcacccuguccuacuacaagcucggcgccagccagcgggucgccggggacuccggcuucgcggccuacagccgcuaccggaucggcaacuacaagcugaacaccgaccacuccagcuccagcgacaacaucgcccugcucgugcagugaggacuaguuauaagacugacuagcccgaugggccucccaacgggcccuccuccccuccuugcaccgagauuaauaaaaaaaaaaaaaaaaaaaaaaaaaaaaaaaaaaaaaaaaaaaaaaaaaaaaaaaaaaaaaaaaugcaucccccccccccccccccccccccccccccccaaaggcucuuuucagagccaccagaauu

SEQ ID NO: 20873 - RNA, 886 nt, Artificial Sequence
  SARS-CoV-2__MT892971.1__membrane protein (M) mRNA gc
aggagaaagcuuaccauggccgacagcaacggcaccaucaccguggaggagcugaagaagcuccuggagcaguggaaccuggucaucggguuccucuuccugacguggaucugccugcuccaguucgccuacgcgaaccgcaaccgguuccuguacaucaucaagcugaucuuccucuggcugcuguggcccgugacccucgccuccuucgugcuggccgccgucuaccgcaucaacuggaucaccggcgggaucgccaucgcgauggccugccuggugggccucauguggcugagcuacuucaucgccuccuuccggcuguucgcccgcacccggagcaugugguccuucaacccggagacgaacauccuccugaacgugccccugcacgggaccauccucacccgcccccugcuggagagcgagcucgucaucggcgcggugauccugcggggccaccuccgcaucgccgggcaccaccugggccggugcgacaucaaggaccugcccaaggagaucaccguggccacgucccgcacccugagcuacuacaagcucggggccucccagcgggucgccggcgacagcggguucgcggccuacucccgcuaccggaucggcaacuacaagcugaacaccgaccacagcuccagcuccgacaacaucgcccugcucgugcagugaggacuaguuauaagacugacuagcccgaugggccucccaacgggcccuccuccccuccuugcaccgagauuaauaaaaaaaaaaaaaaaaaaaaaaaaaaaaaaaaaaaaaaaaaaaaaaaaaaaaaaaaaaaaaaaaugcaucccccccccccccccccccccccccccccccaaaggcucuuuucagagccaccagaauu

SEQ ID NO: 20874 - RNA, 886 nt, Artificial Sequence
  SARS-CoV-2__MT883499.1__membrane protein (M) mRNA gc
aggagaaagcuuaccauggccuacagcaacggcaccaucaccguggaggagcugaagaagcuccuggagcaguggaaccuggucaucggguuccucuuccugacguggaucugccugcuccaguucgccuacgcgaaccgcaaccgguuccuguacaucaucaagcugaucuuccucuggcugcuguggcccgugacccucgccugcuucgugcuggccgccgucuaccgcaucaacuggaucaccggcgggaucgccaucgcgauggccugccuggugggccucauguggcuguccuacuucaucgccagcuuccggcuguucgcccgcacccgguccauguggagcuucaacccggagacgaacauccuccugaacgugccccugcacgggaccauccucacccgcccccugcuggaguccgagcucgucaucggcgcggugauccugcggggccaccuccgcaucgccgggcaccaccugggccggugcgacaucaaggaccugcccaaggagaucaccguggccacgagccgcacccuguccuacuacaagcucggggccagccagcgggucgccggcgacuccggguucgcggccuacagccgcuaccggaucggcaacuacaagcugaacaccgaccacuccagcuccagcgacaacaucgcccugcucgugcagugaggacuaguuauaagacugacuagcccgaugggccucccaacgggcccuccuccccuccuugcaccgagauuaauaaaaaaaaaaaaaaaaaaaaaaaaaaaaaaaaaaaaaaaaaaaaaaaaaaaaaaaaaaaaaaaaugcaucccccccccccccccccccccccccccccccaaaggcucuuuucagagccaccagaauu

SEQ ID NO: 20875 - RNA, 886 nt, Artificial Sequence
  SARS-CoV-2__MT883502.1__membrane protein (M) mRNA gc
aggagaaagcuuaccauggccgacagcaacggcaccaucaccguggaggagcugaagaagcuccuggagcaguggaaccuggucaucggguuccucuuccugacguggaucugccugcuccaguucgccuacgcgaaccgcaaccgguuccuguacaucaucaagcugaucuuccucuggcugcuguggccccucacccuggccugcuucgugcuggccgccguguaccgcaucaacuggaucaccggcgggaucgccaucgcgauggccugccucgucggccugauguggcuguccuacuucaucgccagcuuccgccucuucgcccggacccgguccauguggagcuucaacccggagacgaacauccugcugaacgugccccuccacgggaccauccugacccgcccccugcucgaguccgagcuggugaucggcgcggucauccugcggggccaccuccgcaucgccgggcaccaccugggccggugcgacaucaaggaccugcccaaggagaucaccguggccacgagccgcacccucuccuacuacaagcugggggccagccagcggguggccggcgacuccggguucgcggccuacagccgcuaccggaucggcaacuacaagcugaacaccgaccacuccagcuccagcgacaacaucgcccuccugguccagugaggacuaguuauaagacugacuagcccgaugggccucccaacgggcccuccuccccuccuugcaccgagauuaauaaaaaaaaaaaaaaaaaaaaaaaaaaaaaaaaaaaaaaaaaaaaaaaaaaaaaaaaaaaaaaaaugcaucccccccccccccccccccccccccccccccaaaggcucuuuucagagccaccagaauu

SEQ ID NO: 20876 - RNA, 886 nt, Artificial Sequence
  SARS-CoV-2__MT873185.1__membrane protein (M) mRNA gc
aggagaaagcuuaccauggccgacagcaacggcaccaucaccguggaggagcugaagaagcuccuggagcaguggaaccuggucaucggguuccucuuccugacguggaucugccugcuccaguucgccuacgcgaaccgcaaccgguuccuguacaucaucaagcugaucuuccucuggcugcuguggcccgugacccucgccugcuucgugcuggccgccgucuaccgcaucaacuggaucaccggcgggaucgccaucgcgauguccugccuggugggccucauguggcugagcuacuucaucgccuccuuccggcuguucgcccgcacccggagcaugugguccuucaacccggagacgaacauccuccugaacgugccccugcacgggaccauccucacccgcccccugcuggagagcgagcucgucaucggcgccgugauccugcggggccaccuccgcaucgcggggcaccaccugggccggugcgacaucaaggaccugcccaaggagaucaccguggccacgucccgcacccugagcuacuacaagcucggggccucccagcgggucgccggcgacagcggguucgccgcguacucccgcuaccggaucggcaacuacaagcugaacaccgaccacagcuccagcuccgacaacaucgcccugcucgugcagugaggacuaguuauaagacugacuagcccgaugggccucccaacgggcccuccuccccuccuugcaccgagauuaauaaaaaaaaaaaaaaaaaaaaaaaaaaaaaaaaaaaaaaaaaaaaaaaaaaaaaaaaaaaaaaaaugcaucccccccccccccccccccccccccccccccaaaggcucuuuucagagccaccagaauu

SEQ ID NO: 20877 - RNA, 886 nt, Artificial Sequence
  SARS-CoV-2__MT873187.1__membrane protein (M) mRNA gc
aggagaaagcuuaccauggccgacagcaacggcaccaucaccguggaggagcugaagaagcuccuggagcaguggaaccuggucaucggguuccucuuccugacguggaucugccugcuccaguucgccuacgcgaaccgcaaccgguuccuguacaucaucaagcugaucuuccucuggcugcuguggcccgugacccucgccugcuucgugcuggccgccgucuaccgcaucaacuggaucaccggcgggaucgccaucgcgauggccugccuggugggccucauguggcuguccuacuucaucgccagcuuccggcuguucgcccgcacccgguccauguggagcuucaacccggagacgaacauccuccugaacgugccccugcacgggaccauccucacccgcccccugcuggaguccgagcucgucaucggcgcggugauccugcggggccaccuccgcaucgccgggcaccaccugggccggugcgacaucaaggaccugcccaaggagaucaccguggccacgagccgcacccuguccuacuacaagcucggggccagccagcgggucgccggcgacuccggguucgcggccuacagccgcuaccggaucggcaacuacaagcugaacaccuaccacuccagcuccagcgacaacaucgcccugcucgugcagugaggacuaguuauaagacugacuagcccgaugggccucccaacgggcccuccuccccuccuugcaccgagauuaauaaaaaaaaaaaaaaaaaaaaaaaaaaaaaaaaaaaaaaaaaaaaaaaaaaaaaaaaaaaaaaaaugcaucccccccccccccccccccccccccccccccaaaggcucuuuucagagccaccagaauu

SEQ ID NO: 20878 - RNA, 886 nt, Artificial Sequence
  SARS-CoV-2__MT873268.1__membrane protein (M) mRNA gc
aggagaaagcuuaccauggccgacagcaacggcaccaucaccguggaggagcugaagaagcuccuggagcaguggaaccuggucaucggguuccucuuccugacguggaucugccugcuccaguucgccuacgcgaaccgcaaccgguuccuguacaucaucaagcugaucuuccucuggcugcuguggcccgugacccucgccugcuucgugcuggccgccgucuaccgcaucaacuggaucaccggcgggaucgccaucgcgauggccugccuggugggccucauguggcuguccuacuucaucgccagcuuccggcuguucgcccgcacccgguccauguggagcuucaacccggagacgaacauccuccugaacgugccccugcacgacaccauccucacccgcccccugcuggaguccgagcucgucaucggggcggugauccugcggggccaccuccgcaucgccggccaccaccuggggcggugcgacaucaaggaccugcccaaggagaucaccguggccacgagccgcacccuguccuacuacaagcucggcgccagccagcgggucgccggggacuccggcuucgcggccuacagccgcuaccggaucgggaacuacaagcugaacaccgaccacuccagcuccagcgacaacaucgcccugcucgugcagugaggacuaguuauaagacugacuagcccgaugggccucccaacgggcccuccuccccuccuugcaccgagauuaauaaaaaaaaaaaaaaaaaaaaaaaaaaaaaaaaaaaaaaaaaaaaaaaaaaaaaaaaaaaaaaaaugcaucccccccccccccccccccccccccccccccaaaggcucuuuucagagccaccagaauu

SEQ ID NO: 20879 - RNA, 886 nt, Artificial Sequence
  SARS-CoV-2__MT873272.1__membrane protein (M) mRNA gc
aggagaaagcuuaccaugagcgacuccaacggcaccaucaccguggaggagcugaagaagcuccuggagcaguggaaccuggucaucggguuccucuuccugacguggaucugccugcuccaguucgccuacgccaaccgcaaccgguuccuguacaucaucaagcugaucuuccucuggcugcuguggcccgugacccucgcgugcuucgugcuggccgccgucuaccgcaucaacuggaucaccggcgggaucgccaucgccauggcgugccuggugggccucauguggcugagcuacuucaucgccuccuuccggcuguucgcccgcacccggagcaugugguccuucaacccggagacgaacauccuccugaacgugccccugcacgggaccauccucacccgcccccugcuggagagcgagcucgucaucggcgccgugauccugcggggccaccuccgcaucgcggggcaccaccugggccggugcgacaucaaggaccugcccaaggagaucaccguggccacgucccgcacccugagcuacuacaagcucggggccucccagcgggucgccggcgacagcggguucgccgcguacucccgcuaccggaucggcaacuacaagcugaacaccgaccacagcuccagcuccgacaacaucgcccugcucgugcagugaggacuaguuauaagacugacuagcccgaugggccucccaacgggcccuccuccccuccuugcaccgagauuaauaaaaaaaaaaaaaaaaaaaaaaaaaaaaaaaaaaaaaaaaaaaaaaaaaaaaaaaaaaaaaaaaugcaucccccccccccccccccccccccccccccccaaaggcucuuuucagagccaccagaauu

SEQ ID NO: 20880 - RNA, 886 nt, Artificial Sequence
  SARS-CoV-2__MT873351.1__membrane protein (M) mRNA gc
aggagaaagcuuaccauggccgacagcaacggcaccaucaccguggaggagcugaagaagcuccuggagcaguggaaccuggucaucggguuccucuuccugacguggaucugccugcuccaguucgccuacgcgaaccgcaaccgguuccuguacaucaucaagcugaucuuccucuggcugcuguggcccgugacccucgccugcuucgugcuggccgccgucuaccgcaucaacuggaucaccggcgggaucgccaucgcgauggccugccuggugggccucauguggcuguccuacuucaucgccagccugcgccucuucgcccggacccgguccauguggagcuucaacccggagacgaacauccugcugaacgugccccuccacgggaccauccugacccgcccccugcucgaguccgagcuggucaucggcgcggugauccugcggggccaccuccgcaucgccgggcaccaccugggccggugcgacaucaaggaccugcccaaggagaucaccguggccacgagccgcacccucuccuacuacaagcugggggccagccagcgggucgccggcgacuccggguucgcggccuacagccgcuaccggaucggcaacuacaagcugaacaccgaccacuccagcuccagcgacaacaucgcccuccuggugcagugaggacuaguuauaagacugacuagcccgaugggccucccaacgggcccuccuccccuccuugcaccgagauuaauaaaaaaaaaaaaaaaaaaaaaaaaaaaaaaaaaaaaaaaaaaaaaaaaaaaaaaaaaaaaaaaaugcaucccccccccccccccccccccccccccccccaaaggcucuuuucagagccaccagaauu

SEQ ID NO: 20881 - RNA, 886 nt, Artificial Sequence
  SARS-CoV-2__MT872501.1__membrane protein (M) mRNA gc
aggagaaagcuuaccauggccgacagcaacggcaccaucaccguggaggagcugaagaagcuccuggagcaguggaaccuggucaucggguuccucuuccugacguggaucugccugcuccaguucgccuacgcgaaccgcaaccgguuccuguacaucaucaagcugaucuuccucuggcugcuguggcccgugacccucgccugcuucgugcuggccgccgucuaccgcaucaacuggaucaccggcgggaucgccaucgcgauggccugccuggugggccucauguggcuguccuacuucaucgccagcuuccggcuguucgcccgcacccgguccaucuggagcuucaacccggagacgaacauccuccugaacgugccccugcacgggaccauccucacccgcccccugcuggaguccgagcucgucaucggcgcggugauccugcggggccaccuccgcaucgccgggcaccaccugggccggugcgacaucaaggaccugcccaaggagaucaccguggccacgagccgcacccuguccuacuacaagcucggggccagccagcgggucgccggcgacuccggguucgcggccuacagccgcuaccggaucggcaacuacaagcugaacaccgaccacuccagcuccagcgacaacaucgcccugcucgugcagugaggacuaguuauaagacugacuagcccgaugggccucccaacgggcccuccuccccuccuugcaccgagauuaauaaaaaaaaaaaaaaaaaaaaaaaaaaaaaaaaaaaaaaaaaaaaaaaaaaaaaaaaaaaaaaaaugcaucccccccccccccccccccccccccccccccaaaggcucuuuucagagccaccagaauu

SEQ ID NO: 20882 - RNA, 886 nt, Artificial Sequence
  SARS-CoV-2__MT846468.1__membrane protein (M) mRNA gc
aggagaaagcuuaccauggccgacagcaacggcaccaucaccguggaggagcugaagaagcuccuggagcaguggaaccuggucaucggguuccucuuccugacguggaucugccugcuccaguucgccuacgcgaaccgcaaccgguuccuguacaucaucaagcugaccuuccucuggcugcuguggcccgugacccucgccugcuucgugcuggccgccgucuaccgcaucaacuggaucaccggcgggaucgccaucgcgauggccugccuggugggccucauguggcuguccuacuucaucgccagcuuccggcuguucgcccgcacgcgguccauguggagcuucaacccggagaccaacauccuccugaacgugccccugcacgggaccauccucacccgcccccugcuggaguccgagcucgucaucggcgcggugauccugcggggccaccuccgcaucgccgggcaccaccugggccggugcgacaucaaggaccugcccaaggagaucacgguggccaccagccgcacccuguccuacuacaagcucggggccagccagcgggucgccggcgacuccggguucgcggccuacagccgcuaccggaucggcaacuacaagcugaacaccgaccacuccagcuccagcgacaacaucgcccugcucgugcagugaggacuaguuauaagacugacuagcccgaugggccucccaacgggcccuccuccccuccuugcaccgagauuaauaaaaaaaaaaaaaaaaaaaaaaaaaaaaaaaaaaaaaaaaaaaaaaaaaaaaaaaaaaaaaaaaugcaucccccccccccccccccccccccccccccccaaaggcucuuuucagagccaccagaauu

SEQ ID NO: 20883 - RNA, 886 nt, Artificial Sequence
  SARS-CoV-2__MT846494.1__membrane protein (M) mRNA gc
aggagaaagcuuaccauggccgacagcaacggcaccaucaccguggaggagcugaagaagcuccuggagcaguggaaccuggucaucggguuccucuuccugacguggaucugccugcuccaguucgccuacgcgaaccgcaaccgguuccuguacaucaucaagcugaucuuccucuggcugcuguggcccgugacccucgccugcuucgugcuggccuccgucuaccgcaucaacuggaucaccggcgggaucgccaucgccauggcgugccuggugggccucauguggcugagcuacuucaucgccuccuuccggcuguucgcccgcacccggagcaugugguccuucaacccggagacgaacauccuccugaacgugccccugcacgggaccauccucacccgcccccugcuggagagcgagcucgucaucggcgccgugauccugcggggccaccuccgcaucgcggggcaccaccugggccggugcgacaucaaggaccugcccaaggagaucaccguggccacgucccgcacccugagcuacuacaagcucggggccucccagcgggucgccggcgacagcggguucgccgcguacucccgcuaccggaucggcaacuacaagcugaacaccgaccacagcuccagcuccgacaacaucgcccugcucgugcagugaggacuaguuauaagacugacuagcccgaugggccucccaacgggcccuccuccccuccuugcaccgagauuaauaaaaaaaaaaaaaaaaaaaaaaaaaaaaaaaaaaaaaaaaaaaaaaaaaaaaaaaaaaaaaaaaugcaucccccccccccccccccccccccccccccccaaaggcucuuuucagagccaccagaauu

SEQ ID NO: 20884 - RNA, 886 nt, Artificial Sequence
  SARS-CoV-2__MT846567.1__membrane protein (M) mRNA gc
aggagaaagcuuaccaugguggacagcaacggcaccaucaccgucgaggagcugaagaagcuccuggagcaguggaaccuggugaucggguuccucuuccugacguggaucugccugcuccaguucgccuacgccaaccgcaaccgguuccuguacaucaucaagcugaucuuccucuggcugcuguggcccgugacccucgcgugcuucguccuggccgccguguaccgcaucaacuggaucaccggcgggaucgccaucgccauggcgugccuggugggccucauguggcuguccuacuucaucgccagcuuccggcuguucgcccgcacccgguccauguggagcuucaacccggagacgaacauccuccugaacgucccccugcacgggaccauccucacccgcccccugcuggaguccgagcucgugaucggcgccgugauccugcggggccaccuccgcaucgcggggcaccaccugggccggugcgacaucaaggaccugcccaaggagaucaccgucgccacgagccgcacccuguccuacuacaagcucggggccagccagcggguggccggcgacuccggguucgccgcguacagccgcuaccggaucggcaacuacaagcugaacaccgaccacuccagcuccagcgacaacaucgcccugcucgugcagugaggacuaguuauaagacugacuagcccgaugggccucccaacgggcccuccuccccuccuugcaccgagauuaauaaaaaaaaaaaaaaaaaaaaaaaaaaaaaaaaaaaaaaaaaaaaaaaaaaaaaaaaaaaaaaaaugcaucccccccccccccccccccccccccccccccaaaggcucuuuucagagccaccagaauu

SEQ ID NO: 20885 - RNA, 886 nt, Artificial Sequence
  SARS-CoV-2__MT846668.1__membrane protein (M) mRNA gc
aggagaaagcuuaccauggccgacagcaacggcaccaucaccguggaggagcugaagaagcuccuggagcaguggaaccuggucaucggguuccucuuccugacguggaucugccugcuccaguucgccuacgcgaaccgcaaccgguuccuguacaucaucaagcugaucuuccucuggcugcuguggcccgugacccucgccugcuucgugcuggccgccgucuaccgcaucaacuggaucaccggcgggaucgccaucgcgauggccugccuggugggccucauguggcuguccuacuucaucgccagcuuccggcuguucgcccgcacccgguccauguggagcuucaacccggagacgaacauccuccugaacgugccccugcacgggaccauccucacccgcccccugcuggaguccgagcucgucaucggcgcggugauccugcggggccaccuccgcaucgccgggcaccaccugggccggugcgacaucaaggaccugcccaaggagaucaccguggccacgagccgcacccuguccuacuacaagcucggggccagccagcgggucaccggcgacuccggguucgccgcguacagccgcuaccggaucggcaacuacaagcugaacaccgaccacuccagcuccagcgacaacaucgcccugcucgugcagugaggacuaguuauaagacugacuagcccgaugggccucccaacgggcccuccuccccuccuugcaccgagauuaauaaaaaaaaaaaaaaaaaaaaaaaaaaaaaaaaaaaaaaaaaaaaaaaaaaaaaaaaaaaaaaaaugcaucccccccccccccccccccccccccccccccaaaggcucuuuucagagccaccagaauu

SEQ ID NO: 20886 - RNA, 886 nt, Artificial Sequence
  SARS-CoV-2__MT843737.1__membrane protein (M) mRNA gc
aggagaaagcuuaccauggccgacagcaacggcaccaucaccguggaggagcugaagaagcuccuggagcaguggaaccugcucaucggguuccuguuccugacguggaucugccuccugcaguucgccuacgcgaaccgcaaccgguuccuguacaucaucaagcucaucuuccuguggcugcucuggcccgucacccuggccugcuucgugcuggccgccguguaccgcaucaacuggaucaccggcgggaucgccaucgcgauggccugccucgucggccugauguggcuguccuacuucaucgccagcuuccgccucuucgcccggacccgguccauguggagcuucaacccggagacgaacauccugcugaacgugccccuccacgggaccauccugacccgcccccugcucgaguccgagcuggugaucggcgcggucauccugcggggccaccuccgcaucgccgggcaccaccugggccggugcgacaucaaggaccugcccaaggagaucaccguggccacgagccgcacccucuccuacuacaagcugggggccagccagcggguggccggcgacuccggguucgcggccuacagccgcuaccggaucggcaacuacaagcugaacaccgaccacuccagcuccagcgacaacaucgcccuccugguccagugaggacuaguuauaagacugacuagcccgaugggccucccaacgggcccuccuccccuccuugcaccgagauuaauaaaaaaaaaaaaaaaaaaaaaaaaaaaaaaaaaaaaaaaaaaaaaaaaaaaaaaaaaaaaaaaaugcaucccccccccccccccccccccccccccccccaaaggcucuuuucagagccaccagaauu

SEQ ID NO: 20887 - RNA, 886 nt, Artificial Sequence
  SARS-CoV-2__MT831141.1__membrane protein (M) mRNA gc
aggagaaagcuuaccauggccgacagcaacggcaccaucaccguggaggagcugaagaagcuccuggagcaguggaaccuggucaucggguuccucuuccugacguggaucugccugcuccaguucgccuacgcgaaccgcaaccgguuccuguacaucaucaagcugaucuuccucuggcugcuguggcccgugacccucgccugcuucgugcuggccgccgucuaccgcaucaacuggaucaccggcgggaucgccaucgcgauggccugccuggugggccucauguggcuguccuacuucaucgccagcuuccggcuguucgugcgcacccgguccauguggagcuucaacccggagacgaacauccuccugaacgucccccugcacgggaccauccucacccgcccccugcuggaguccgagcucgugaucggcgccgugauccugcggggccaccuccgcaucgcggggcaccaccugggccggugcgacaucaaggaccugcccaaggagaucaccgucgccacgagccgcacccuguccuacuacaagcucggggccagccagcggguggccggcgacuccggguucgccgcguacagccgcuaccggaucggcaacuacaagcugaacaccgaccacuccagcuccagcgacaacaucgcccugcucgugcagugaggacuaguuauaagacugacuagcccgaugggccucccaacgggcccuccuccccuccuugcaccgagauuaauaaaaaaaaaaaaaaaaaaaaaaaaaaaaaaaaaaaaaaaaaaaaaaaaaaaaaaaaaaaaaaaaugcaucccccccccccccccccccccccccccccccaaaggcucuuuucagagccaccagaauu

SEQ ID NO: 20888 - RNA, 886 nt, Artificial Sequence
  SARS-CoV-2__MT831423.1__membrane protein (M) mRNA gc
aggagaaagcuuaccauggccgacagcaacggcaccaucaccguggaggagcugaagaagcuccuggagcaguggaaccuggucaucggguuccucuuccugacguggaucugccugcuccaguucgccuacgcgaaccgcaaccgguuccuguacaucaucaagcugaucuuccucuggcugcuguggcccgugacccucgccugcuucgugcuggccgccgucuaccgcaucaacuggaucacgugcggcaucgccaucgcgauggccugccugguggggcucauguggcuguccuacuucaucgccagcuuccggcuguucgcccgcacccgguccauguggagcuucaacccggagaccaacauccuccugaacgugccccugcacggcaccauccucacccgcccccugcuggaguccgagcucgucaucggggcggugauccugcggggccaccuccgcaucgccggccaccaccuggggcggugcgacaucaaggaccugcccaaggagaucaccguggccacgagccgcacccuguccuacuacaagcucggcgccagccagcgggucgccggggacuccggcuucgcggccuacagccgcuaccggaucgggaacuacaagcugaacaccgaccacuccagcuccagcgacaacaucgcccugcucgugcagugaggacuaguuauaagacugacuagcccgaugggccucccaacgggcccuccuccccuccuugcaccgagauuaauaaaaaaaaaaaaaaaaaaaaaaaaaaaaaaaaaaaaaaaaaaaaaaaaaaaaaaaaaaaaaaaaugcaucccccccccccccccccccccccccccccccaaaggcucuuuucagagccaccagaauu

SEQ ID NO: 20889 - RNA, 886 nt, Artificial Sequence
  SARS-CoV-2__MT831469.1__membrane protein (M) mRNA gc
aggagaaagcuuaccauggccgacagcaacggcaccaucaccguggaggagcugaagcgccuccuggagcaguggaaccuggucaucggguuccucuuccugacguggaucugccugcuccaguucgccuacgcgaaccggaaccgcuuccuguacaucaucaagcugaucuuccucuggcugcuguggcccgugacccucgccugcuucgugcuggccgccgucuaccggaucaacuggaucaccggcgggaucgccaucgcgauggccugccuggugggccucauguggcuguccuacuucaucgccagcuuccgccuguucgcccggacccgcuccauguggagcuucaacccggagacgaacauccuccugaacgugccccugcacgggaccauccucacccggccccugcuggaguccgagcucgucaucggcgcggugauccugcgcggccaccuccggaucgccgggcaccaccugggccgcugcgacaucaaggaccugcccaaggagaucaccguggccacgagccggacccuguccuacuacaagcucggggccagccagcgcgucgccggcgacuccggguucgcggccuacagccgguaccgcaucggcaacuacaagcugaacaccgaccacuccagcuccagcgacaacaucgcccugcucgugcagugaggacuaguuauaagacugacuagcccgaugggccucccaacgggcccuccuccccuccuugcaccgagauuaauaaaaaaaaaaaaaaaaaaaaaaaaaaaaaaaaaaaaaaaaaaaaaaaaaaaaaaaaaaaaaaaaugcaucccccccccccccccccccccccccccccccaaaggcucuuuucagagccaccagaauu

SEQ ID NO: 20890 - RNA, 886 nt, Artificial Sequence
  SARS-CoV-2__MT834027.1__membrane protein (M) mRNA gc
aggagaaagcuuaccauggccgacagcaacggcaccaucaccguggaggagcugaagaagcuccuggagcaguggaaccuggucaucggguuccucuuccugacguggaucugccugcuccaguucgccuacgcgaaccgcaaccgguuccuguacaucaucaagcugaucuuccucuggcugcuguggcccgugacccucgccugcuucgugcuggccgccgucuaccgcaucaacuggaucaccggcgggaucgccaucgcgauggccugccuggugggccucauguggcuguccuacuucaucgccagcuuccggcuguucgcccgcacccgguccauguggagcuucaacccggagacgaacauccuccugaacgugccccuguacgggaccauccucacccgcccccugcuggaguccgagcucgucaucggcgcggugauccugcggggccaccuccgcaucgccgggcaccaccugggccggugcgacaucaaggaccugcccaaggagaucaccguggccacgagccgcacccuguccuacuacaagcucggggccagccagcgggucgccggcgacuccggguucgcggccuacagccgcuaccggaucggcaacuacaagcugaacaccgaccacuccagcuccagcgacaacaucgcccugcucgugcagugaggacuaguuauaagacugacuagcccgaugggccucccaacgggcccuccuccccuccuugcaccgagauuaauaaaaaaaaaaaaaaaaaaaaaaaaaaaaaaaaaaaaaaaaaaaaaaaaaaaaaaaaaaaaaaaaugcaucccccccccccccccccccccccccccccccaaaggcucuuuucagagccaccagaauu

SEQ ID NO: 20891 - RNA, 886 nt, Artificial Sequence
  SARS-CoV-2__MT834697.1__membrane protein (M) mRNA gc
aggagaaagcuuaccauggccgacagcaacggcaccaucaccguggaggagcugaagaagcuccuggagcaguggaaccuggucaucggguuccucuuccugacguggaucugccugcuccaguucgccuacgcgaaccgcaaccgguuccuguacaucaucaagcugaucuuccucuggcugcuguggcccgugacccucgccugcuucgugcuggccgccgucuaccgcaucaacuggaucaccggcgggaucgccaucgcgauggccugccuggugggccucauguggcuguccuacuucaucagcuccuuccggcuguucgcccgcacccggagcaugugguccuucaacccggagacgaacauccuccugaacgugccccugcacgggaccauccucacccgcccccugcuggagagcgagcucgucaucggcgccgugauccugcggggccaccuccgcaucgcggggcaccaccugggccggugcgacaucaaggaccugcccaaggagaucaccguggccacgucccgcacccugagcuacuacaagcucggggccucccagcgggucgccggcgacagcggguucgccgcguacucccgcuaccggaucggcaacuacaagcugaacaccgaccacagcuccagcuccgacaacaucgcccugcucgugcagugaggacuaguuauaagacugacuagcccgaugggccucccaacgggcccuccuccccuccuugcaccgagauuaauaaaaaaaaaaaaaaaaaaaaaaaaaaaaaaaaaaaaaaaaaaaaaaaaaaaaaaaaaaaaaaaaugcaucccccccccccccccccccccccccccccccaaaggcucuuuucagagccaccagaauu

SEQ ID NO: 20892 - RNA, 886 nt, Artificial Sequence
  SARS-CoV-2__MT825091.1__membrane protein (M) mRNA gc
aggagaaagcuuaccauggccgacagcaacggcaccaucaccguggaggagcuggagaagcuccuggagcaguggaaccuggucaucggguuccucuuccugacguggaucugccugcuccaguucgccuacgcgaaccgcaaccgguuccuguacaucaucaagcugaucuuccucuggcugcuguggaccgugacccucgccugcuucgugcuggccgccgucuaccgcaucaacuggaucaccggcgggaucgccaucgcgauggccugccuggugggccucauguggcuguccuacuucaucgccagcuuccggcuguucgcccgcacgcgguccauguggagcuucaaccccgagaccaacauccuccugaacgugccgcugcacgggaccauccucacccgcccccugcuggaguccgagcucgucaucggcgcggugauccugcggggccaccuccgcaucgccgggcaccaccugggccggugcgacaucaaggaccugcccaaggagaucacgguggccaccagccgcacccuguccuacuacaagcucggggccagccagcgggucgccggcgacuccggguucgcggccuacagccgcuaccggaucggcaacuacaagcugaacaccgaccacuccagcuccagcgacaacaucgcccugcucgugcagugaggacuaguuauaagacugacuagcccgaugggccucccaacgggcccuccuccccuccuugcaccgagauuaauaaaaaaaaaaaaaaaaaaaaaaaaaaaaaaaaaaaaaaaaaaaaaaaaaaaaaaaaaaaaaaaaugcaucccccccccccccccccccccccccccccccaaaggcucuuuucagagccaccagaauu

SEQ ID NO: 20893 - RNA, 886 nt, Artificial Sequence
  SARS-CoV-2__MT821547.1__membrane protein (M) mRNA gc
aggagaaagcuuaccauggccgacagcaacggcaccaucaccguggaggagcuggagaagcuccuggagcaguggaaccuggucaucggguuccucuuccugacguggaucugccugcuccaguucgccuacgcgaaccgcaaccgguuccuguacaucaucaagcugaucuuccucuggcugcuguggcccgugacccucgccugcuucgugcuggccgccgucuaccgcaucaacuggaucaccggcgggaucgccaucgcgauggccugccuggugggccucauguggcuguccuacuucaucgccagcuuccggcuguucgcccgcacccgguccauguggagcuucaacccggagacgaacauccuccugaacgugccccugcacgggaccauccucacccgcccccugcuggaguccgagcucgucaucggcgcggugauccugcggggccaccuccgcaucgccgggcaccaccugggccggugcgacaucaaggaccugcccaaggagaucaccguggccacgagccgcacccuguccuacuacaagcucggggccagccagcgggucgccggcgacuccggguucgcggccuacagccgcuaccggaucggcaacuacaagcugaacaccgaccacuccagcuccagcgacaacaucgcccugcucgugcagugaggacuaguuauaagacugacuagcccgaugggccucccaacgggcccuccuccccuccuugcaccgagauuaauaaaaaaaaaaaaaaaaaaaaaaaaaaaaaaaaaaaaaaaaaaaaaaaaaaaaaaaaaaaaaaaaugcaucccccccccccccccccccccccccccccccaaaggcucuuuucagagccaccagaauu

SEQ ID NO: 20894 - RNA, 886 nt, Artificial Sequence
  SARS-CoV-2__MT821560.1__membrane protein (M) mRNA gc
aggagaaagcuuaccauggccgacagcaacggcaccaucaccguggaggagcuggagaagcuccuggagcaguggaaccuggucaucggguuccucuuccugacguggaucugccugcuccaguucgccuacgcgaaccgcaaccgguuccuguacaucaucaagcugaucuuccucuggcugcuguggcccgugacccucgccuucuucgugcuggccgccgucuaccgcaucaacuggaucaccggcgggaucgccaucgcgauggccugccuggugggccucauguggcuguccuacuucaucgccagcuuccggcuguucgcccgcacccgguccauguggagcuucaacccggagacgaacauccuccugaacgugccccugcacgggaccauccucacccgcccccugcuggaguccgagcucgucaucggcgcggugauccugcggggccaccuccgcaucgccgggcaccaccugggccggugcgacaucaaggaccugcccaaggagaucaccguggccacgagccgcacccuguccuacuacaagcucggggccagccagcgggucgccggcgacuccggguucgcggccuacagccgcuaccggaucggcaacuacaagcugaacaccgaccacuccagcuccagcgacaacaucgcccugcucgugcagugaggacuaguuauaagacugacuagcccgaugggccucccaacgggcccuccuccccuccuugcaccgagauuaauaaaaaaaaaaaaaaaaaaaaaaaaaaaaaaaaaaaaaaaaaaaaaaaaaaaaaaaaaaaaaaaaugcaucccccccccccccccccccccccccccccccaaaggcucuuuucagagccaccagaauu

SEQ ID NO: 20895 - RNA, 886 nt, Artificial Sequence
  SARS-CoV-2__MT811164.1__membrane protein (M) mRNA gc
aggagaaagcuuaccauggccgacagcaacggcaccaucaccguggaggagcugaagaagcuccuggagcaguggaaccuggucaucggguuccucuuccugacguggaucugccugcuccaguucgccuacgcgaaccgcaaccgguuccuguacaucaucaagcugaucuuccucuggcugcuguggcccgugacccucgccugcuucgugcuggccgccgucuaccgcaucaacuggaucaccggcgggaucgccaucgcgauggccugccuggugggccucauguggcuguccuacuucaucgccagcuuccggcuguucgcccgcacccgguccauguggagcuucaacccggagacgaacauccuccugaacgugccccugcacgggaccauccucacccgcccccugcuggagaacgagcucgucaucggcgcggugauccugcggggccaccuccgcaucgccgggcaccaccugggccggugcgacaucaaggaccugcccaaggagaucaccguggccacgucccgcacccugagcuacuacaagcucggggccucccagcgggucgccggcgacagcggguucgcggccuacucccgcuaccggaucggcaacuacaagcugaacaccgaccacagcuccagcuccgacaacaucgcccugcucgugcagugaggacuaguuauaagacugacuagcccgaugggccucccaacgggcccuccuccccuccuugcaccgagauuaauaaaaaaaaaaaaaaaaaaaaaaaaaaaaaaaaaaaaaaaaaaaaaaaaaaaaaaaaaaaaaaaaugcaucccccccccccccccccccccccccccccccaaaggcucuuuucagagccaccagaauu

SEQ ID NO: 20896 - RNA, 886 nt, Artificial Sequence
  SARS-CoV-2__MT811448.1__membrane protein (M) mRNA gc
aggagaaagcuuaccauggccgacagcaacggcaccaucaccguggaggagcugaagaagcuccuggagcaguggaaccuggucaucggguuccucuuccugacguggaucugccugcuccaguucgccuacgcgaaccgcaaccgguuccuguacaucaucaagcugaucuuccucuggcugcuguggcccgugacccucgccugcuucgugcuggccgccgucuaccgcaucaacuggaucaccggcgggaucgccaucuccauggcgugccuggugggccucauguggcugagcuacuucaucgccuccuuccggcuguucgcccgcacccggagcaugugguccuucaacccggagacgaacauccuccugaacgugccccugcacgggaccauccucacccgcccccugcuggagagcgagcucgucaucggcgccgugauccugcggggccaccuccgcaucgcggggcaccaccugggccggugcgacaucaaggaccugcccaaggagaucaccguggccacgucccgcacccugagcuacuacaagcucggggccucccagcgggucgccggcgacagcggguucgccgcguacucccgcuaccggaucggcaacuacaagcugaacaccgaccacagcuccagcuccgacaacaucgcccugcucgugcagugaggacuaguuauaagacugacuagcccgaugggccucccaacgggcccuccuccccuccuugcaccgagauuaauaaaaaaaaaaaaaaaaaaaaaaaaaaaaaaaaaaaaaaaaaaaaaaaaaaaaaaaaaaaaaaaaugcaucccccccccccccccccccccccccccccccaaaggcucuuuucagagccaccagaauu

SEQ ID NO: 20897 - RNA, 886 nt, Artificial Sequence
  SARS-CoV-2__MT806776.1__membrane protein (M) mRNA gc
aggagaaagcuuaccauggccgacagcaacggcaccaucaccguggaggagcugaagaagcuccuggagcaguggaaccuggucaucggguuccucuuccugacguggaucugccugcuccaguucgccuacgcgaaccgcaaccgguuccuguacaucaucaagcugaucuuccucuggcugcuguggcccgugacccucgccugcuucgugcuggccgccgucuaccgcaucaacuggaucaccggcgggaucgccaucgcgauggccugccuggugggccucauguggcugaucuacuucaucgccuccuuccggcuguucgcccgcacccggagcaugugguccuucaacccggagacgaacauccuccugaacgugccccugcacgggaccauccucacccgcccccugcuggagagcgagcucgucaucggcgcggugauccugcggggccaccuccgcaucgccgggcaccaccugggccggugcgacaucaaggaccugcccaaggagaucaccguggccacgucccgcacccugagcuacuacaagcucggggccucccagcgggucgccggcgacagcggguucgcggccuacucccgcuaccggaucggcaacuacaagcugaacaccgaccacagcuccagcuccgacaacaucgcccugcucgugcagugaggacuaguuauaagacugacuagcccgaugggccucccaacgggcccuccuccccuccuugcaccgagauuaauaaaaaaaaaaaaaaaaaaaaaaaaaaaaaaaaaaaaaaaaaaaaaaaaaaaaaaaaaaaaaaaaugcaucccccccccccccccccccccccccccccccaaaggcucuuuucagagccaccagaauu

SEQ ID NO: 20898 - RNA, 886 nt, Artificial Sequence
  SARS-CoV-2__MT806783.1__membrane protein (M) mRNA gc
aggagaaagcuuaccauggccgacagcaacggcaccaucaccguggaggagcugaagaagcuccuggagcaguggaaccuggucaucggguuccucuuccugacguggaucugccugcuccaguucgccuacgcgaaccgcaaccgguuccuguacaucaucaagcugaucuuccucuggcugcuguggcccgugacccucgccugcuucgugcuggccgccgucuaccgcaucaacuggaucaccggcgggaucgccaucgcgauggccugccuggugggccucauguggcuguccuacuucaucgccagcuuccggcuguucgcccgcacccgguccauguggagcuucaacccggagacgaacauccuccugaacgugccccugcacgggaccauccucacccgcccccugcuggaguccgagcucgucaucggcgcggugauccugcggggccaccuccgcaucgccgggcaccaccugggccggugcgacaucaaggaccugcccaaggagaucaccguggccacgagccgcacccuguccuacuacaagcucggggccagccagcgggucgccggcgacuccggguucgcggccuacagccgcuaccggaucggcaacuacaagcugaacaucgaccacuccagcuccagcgacaacaucgcccugcucgugcagugaggacuaguuauaagacugacuagcccgaugggccucccaacgggcccuccuccccuccuugcaccgagauuaauaaaaaaaaaaaaaaaaaaaaaaaaaaaaaaaaaaaaaaaaaaaaaaaaaaaaaaaaaaaaaaaaugcaucccccccccccccccccccccccccccccccaaaggcucuuuucagagccaccagaauu

SEQ ID NO: 20899 - RNA, 886 nt, Artificial Sequence
  SARS-CoV-2__MT799972.1__membrane protein (M) mRNA gc
aggagaaagcuuaccauggccgacagcaacggcaccaucaccguggaggagcugaagaagcuccuggagcaguggaaccuggucaucggguuccucuuccugacguggaucugccugcuccaguucgccuacgcgaaccgcaaccgguuccuguacaucaucaagcugaucuuccucuggcugcuguggcccgugacccucgccugcuucgugcuggccgccgucuaccgcaucaacuggaucaccggcgggaucgccaucgcgauggccugccuggugggccucauguggcuguccuacuucaucgccagcuuccggcuguucgcccgcacccgguccauguggagcuucaacccggagacgaacauccuccugaacgugccccugcacgggaccauccucacccgcccccugcuggaguccgagcucgucaucggcguggugauccugcggggccaccuccgcaucgcggggcaccaccugggccggugcgacaucaaggaccugcccaaggagaucaccgucgccacgagccgcacccuguccuacuacaagcucggggccagccagcggguggccggcgacuccggguucgccgcguacagccgcuaccggaucggcaacuacaagcugaacaccgaccacuccagcuccagcgacaacaucgcccugcucgugcagugaggacuaguuauaagacugacuagcccgaugggccucccaacgggcccuccuccccuccuugcaccgagauuaauaaaaaaaaaaaaaaaaaaaaaaaaaaaaaaaaaaaaaaaaaaaaaaaaaaaaaaaaaaaaaaaaugcaucccccccccccccccccccccccccccccccaaaggcucuuuucagagccaccagaauu

SEQ ID NO: 20900 - RNA, 886 nt, Artificial Sequence
  SARS-CoV-2__MT799976.1__membrane protein (M) mRNA gc
aggagaaagcuuaccauggccgacagcaacggcaccaucaccguggaggagcugaagaagcuccuggagcaguggaaccuggucaucggguuccucuuccugacguggaucugccugcuccaguucgccuacgcgaaccgcaaccgguuccuguacaucaucaagcugaucuuccucuggcugcuguggcccgugacccucgugugcuucguccuggccgccguguaccgcaucaacuggaucaccggcgggaucgccaucgccauggcgugccuggugggccucauguggcuguccuacuucaucgccagcuuccggcuguucgcccgcacccgguccauguggagcuucaacccggagacgaacauccuccugaacgucccccugcacgggaccauccucacccgcccccugcuggaguccgagcucgugaucggcgccgugauccugcggggccaccuccgcaucgcggggcaccaccugggccggugcgacaucaaggaccugcccaaggagaucaccgucgccacgagccgcacccuguccuacuacaagcucggggccagccagcggguggccggcgacuccggguucgccgcguacagccgcuaccggaucggcaacuacaagcugaacaccgaccacuccagcuccagcgacaacaucgcccugcucgugcagugaggacuaguuauaagacugacuagcccgaugggccucccaacgggcccuccuccccuccuugcaccgagauuaauaaaaaaaaaaaaaaaaaaaaaaaaaaaaaaaaaaaaaaaaaaaaaaaaaaaaaaaaaaaaaaaaugcaucccccccccccccccccccccccccccccccaaaggcucuuuucagagccaccagaauu

SEQ ID NO: 20901 - RNA, 886 nt, Artificial Sequence
  SARS-CoV-2__MT795901.1__membrane protein (M) mRNA gc
aggagaaagcuuaccauggccgacagcaacggcaccaucaccguggaggagcugaagaagcuccuggagcaguggaaccuggucaucggguuccucuuccugacguggaucugccugcuccaguucgccuacgcgaaccgcaaccgguuccuguacaucaucaagcugaucuuccucuggcugcuguggcccgugacccucgccugcuucgugcuggccgccgucuaccgcaucaacuggaucaccggcgggaucgccaucgcgauggccugccuggugggccucauguggcuguccuacuucaucgccagcuuccggcuguucgcccgcacccgguccauguggagcuucaacccggagacgaacauccuccugaacgugccccugcacgggaccauccucacccgcccccugcuggaguccgagcucgucaucggcgcggugauccugcggggccaccuccgcaucgccgggcacuaccugggccggugcgacaucaaggaccugcccaaggagaucaccguggccacgagccgcacccuguccuacuacaagcucggggccagccagcgggucgccggcgacuccggguucgcggccuacagccgcuaccggaucggcaacuacaagcugaacaccgaccacuccagcuccagcgacaacaucgcccugcucgugcagugaggacuaguuauaagacugacuagcccgaugggccucccaacgggcccuccuccccuccuugcaccgagauuaauaaaaaaaaaaaaaaaaaaaaaaaaaaaaaaaaaaaaaaaaaaaaaaaaaaaaaaaaaaaaaaaaugcaucccccccccccccccccccccccccccccccaaaggcucuuuucagagccaccagaauu

SEQ ID NO: 20902 - RNA, 886 nt, Artificial Sequence
  SARS-CoV-2__MT791885.1__membrane protein (M) mRNA gc
aggagaaagcuuaccauggccgacagcaacggcaccaucaccguggaggagcugaagaagcuccuggagcaguggaaccuggucaucggguuccucuuccugacguggaucugccugcuccaguucgccuacgcgaaccgcaaccgguuccuguacaucaucaagcugaucuuccucuggcugcuguggcccgugacccucgccugcuucgugcuggccgccgucuaccgcaucaacuggaucaccggcgggaucgccaucgcgauggccugccuggugggccucauguggcuguccuacuucaucgccagcuuccggcuguucgcccgcacccgguccauguggagcuucaacccggagacgaacauccuccugaacgugccccugcacgggaccauccucacccgcccccugcuggaguccgagcucgucaucggcgcggugauccugcggggccaccuccgcaucgccgggcaccaccugggccugugcgacaucaaggaccugcccaaggagaucaccguggccacgagccggacccucuccuacuacaagcugggggccagccagcgcgucgccggcgacuccggguucgcggccuacagccgguaccgcaucggcaacuacaagcugaacaccgaccacuccagcuccagcgacaacaucgcccuccuggugcagugaggacuaguuauaagacugacuagcccgaugggccucccaacgggcccuccuccccuccuugcaccgagauuaauaaaaaaaaaaaaaaaaaaaaaaaaaaaaaaaaaaaaaaaaaaaaaaaaaaaaaaaaaaaaaaaaugcaucccccccccccccccccccccccccccccccaaaggcucuuuucagagccaccagaauu

SEQ ID NO: 20903 - RNA, 886 nt, Artificial Sequence
  SARS-CoV-2__MT759588.1__membrane protein (M) mRNA gc
aggagaaagcuuaccauggccgacagcaacggcaccaucaccguggaggagcugaagaagcuccuggagcaguggaaccuggucaucggguuccucuuccugacguggaucugccugcuccaguucgccuacgcgaaccgcaaccgguuccuguacaucaucaagcugaucuuccucuggcugcuguggcccgugacccucgccugcuucgugcuggccgccgucuaccgcaucaacuggaucaccggcgggaucgccaucgcgauggccugccuggugggccucauguggcuguccuacuucaucgccagcuuccggcuguucgcccgcacccucuccauguggagcuucaacccggagacgaacauccugcugaacgugccccuccacgggaccauccugacccggccccugcucgaguccgagcuggucaucggcgcggugauccugcgcggccaccuccggaucgccgggcaccaccugggccgcugcgacaucaaggaccugcccaaggagaucaccguggccacgagccggacccucuccuacuacaagcugggggccagccagcgcgucgccggcgacuccggguucgcggccuacagccgguaccgcaucggcaacuacaagcugaacaccgaccacuccagcuccagcgacaacaucgcccuccuggugcagugaggacuaguuauaagacugacuagcccgaugggccucccaacgggcccuccuccccuccuugcaccgagauuaauaaaaaaaaaaaaaaaaaaaaaaaaaaaaaaaaaaaaaaaaaaaaaaaaaaaaaaaaaaaaaaaaugcaucccccccccccccccccccccccccccccccaaaggcucuuuucagagccaccagaauu

SEQ ID NO: 20904 - RNA, 886 nt, Artificial Sequence
  SARS-CoV-2__MT745712.1__membrane protein (M) mRNA gc
aggagaaagcuuaccauggccgacagcaacggcaccaucaccguggaggagcugaagaagcuccuggagcaguggaaccuggucaucggguuccucuuccugacguggaucugccugcuccaguucgccuacgcgaaccgcaaccgguuccuguacaucaucaagcugaucuuccucuggcugcuguggcccgugacccucgccugcuucgugcuggccgccgucuaccgcaucaaccugaucaccggcgggaucgccaucgcgauggccugccucgugggccugauguggcuguccuacuucaucgccagcuuccgccucuucgcccggacccgguccauguggagcuucaacccggagacgaacauccugcugaacgugccccuccacgggaccauccugacccgcccccugcucgaguccgagcuggucaucggcgcggugauccugcggggccaccuccgcaucgccgggcaccaccugggccggugcgacaucaaggaccugcccaaggagaucaccguggccacgagccgcacccucuccuacuacaagcugggggccagccagcgggucgccggcgacuccggguucgcggccuacagccgcuaccggaucggcaacuacaagcugaacaccgaccacuccagcuccagcgacaacaucgcccuccuggugcagugaggacuaguuauaagacugacuagcccgaugggccucccaacgggcccuccuccccuccuugcaccgagauuaauaaaaaaaaaaaaaaaaaaaaaaaaaaaaaaaaaaaaaaaaaaaaaaaaaaaaaaaaaaaaaaaaugcaucccccccccccccccccccccccccccccccaaaggcucuuuucagagccaccagaauu

SEQ ID NO: 20905 - RNA, 886 nt, Artificial Sequence
  SARS-CoV-2__MT750032.1__membrane protein (M) mRNA gc
aggagaaagcuuaccauggccgacagcaacggcaccaucaccguggaggagcugaagaagcuccuggagcaguggaaccuggucaucggguuccucuuccugacguggaucugccugcuccaguucgccuacgcgaaccgcaaccgguuccuguacaucaucaagcugaucuuccucuggcugcuguggcccgugacccucgccugcuucgugcuggccgccgucuaccgcaucaacuggaucaccggcgggaucgccaucgcgauggccugccuggugggccucauguggcuguccuacuucaucgccagcuuccggcuguucgcccgcacccgguccauguggagcuucaacccggagacgaacauccuccugaacgugccccugcacgggaccauccucacccgcccccugcuggaguccgagcucgucaucggcgcggugauccugcggggccaccuccgcaucgccgggcaccaccugggccggugcgacaucaaggaccugcccaaggagaucaccguggccacgagccgcacccuguccuacuacaagcucggggccagccagcgggucgccggcgacuccggguucgcggccuacagccgcugccggaucggcaacuacaagcugaacaccgaccacuccagcuccagcgacaacaucgcccugcucgugcagugaggacuaguuauaagacugacuagcccgaugggccucccaacgggcccuccuccccuccuugcaccgagauuaauaaaaaaaaaaaaaaaaaaaaaaaaaaaaaaaaaaaaaaaaaaaaaaaaaaaaaaaaaaaaaaaaugcaucccccccccccccccccccccccccccccccaaaggcucuuuucagagccaccagaauu

SEQ ID NO: 20906 - RNA, 886 nt, Artificial Sequence
  SARS-CoV-2__MT750363.1__membrane protein (M) mRNA gc
aggagaaagcuuaccauggccgacagcaacggcaccaucaccguggaggagcugaagaagcuccuggagcaguggaaccuggucaucggguuccucuuccugacguggaucugccugcuccaguucgccuacgcgaaccgcaaccgguuccuguacaucaucaagcugaucuuccucuggcugcuguggcccgugacccucgccugcuucgugcuggccgccgucuaccgcaucaacuggaucaccggcgggaucgccaucgcgauggccugcuucgugggccugauguggcucuccuacuucaucgccagcuuccggcuguucgcccgcacccgguccauguggagcuucaacccggagacgaacauccugcucaacgugccccugcacgggaccauccugacccgcccccuccuggaguccgagcuggucaucggcgcggugauccuccggggccaccuccgcaucgccgggcaccaccugggccggugcgacaucaaggaccugcccaaggagaucaccguggccacgagccgcacccuguccuacuacaagcugggggccagccagcgggucgccggcgacuccggguucgcggccuacagccgcuaccggaucggcaacuacaagcucaacaccgaccacuccagcuccagcgacaacaucgcccugcuggugcagugaggacuaguuauaagacugacuagcccgaugggccucccaacgggcccuccuccccuccuugcaccgagauuaauaaaaaaaaaaaaaaaaaaaaaaaaaaaaaaaaaaaaaaaaaaaaaaaaaaaaaaaaaaaaaaaaugcaucccccccccccccccccccccccccccccccaaaggcucuuuucagagccaccagaauu

SEQ ID NO: 20907 - RNA, 886 nt, Artificial Sequence
  SARS-CoV-2__MT740395.1__membrane protein (M) mRNA gc
aggagaaagcuuaccauggccgacagcaacggcaccaucaccgccgaggagcugaagaagcuccuggagcaguggaaccuggugaucggguuccucuuccugacguggaucugccugcuccaguucgcguacgccaaccgcaaccgguuccuguacaucaucaagcugaucuuccucuggcugcuguggcccgucacccucgccugcuucgugcuggccgccguguaccgcaucaacuggaucaccggcgggaucgcgaucgccauggccugccuggucggccucauguggcuguccuacuucaucgccagcuuccggcuguucgcgcgcacccgguccauguggagcuucaacccggagacgaacauccuccugaacgugccccugcacgggaccauccucacccgcccccugcuggaguccgagcucgugaucggcgccgucauccugcggggccaccuccgcaucgccgggcaccaccugggccggugcgacaucaaggaccugcccaaggagaucaccguggccacgagccgcacccuguccuacuacaagcucggggccagccagcggguggcgggcgacuccggguucgccgccuacagccgcuaccggaucggcaacuacaagcugaacaccgaccacuccagcuccagcgacaacaucgcccugcucguccagugaggacuaguuauaagacugacuagcccgaugggccucccaacgggcccuccuccccuccuugcaccgagauuaauaaaaaaaaaaaaaaaaaaaaaaaaaaaaaaaaaaaaaaaaaaaaaaaaaaaaaaaaaaaaaaaaugcaucccccccccccccccccccccccccccccccaaaggcucuuuucagagccaccagaauu

SEQ ID NO: 20908 - RNA, 886 nt, Artificial Sequence
  SARS-CoV-2__MT731744.1__membrane protein (M) mRNA gc
aggagaaagcuuaccauggccgacuucaacggcaccaucaccguggaggagcugaagaagcuccuggagcaguggaaccuggucaucggguuccucuuccugacguggaucugccugcuccaguucgccuacgcgaaccgcaaccgguuccuguacaucaucaagcugaucuuccucuggcugcuguggcccgugacccucgccugcuucgugcuggccgccgucuaccgcaucaacuggaucaccggcgggaucgccaucgcgauggccugccuggugggccucauguggcugagcuacuucaucgccuccuuccggcuguucgcccgcacccggagcaugugguccuucaacccggagacgaacauccuccugaacgugccccugcacgggaccauccucacccgcccccugcuggagagcgagcucgucaucggcgcggugauccugcggggccaccuccgcaucgccgggcaccaccugggccggugcgacaucaaggaccugcccaaggagaucaccguggccacgucccgcacccugagcuacuacaagcucggggccucccagcgggucgccggcgacagcggguucgcggccuacucccgcuaccggaucggcaacuacaagcugaacaccgaccacagcuccagcuccgacaacaucgcccugcucgugcagugaggacuaguuauaagacugacuagcccgaugggccucccaacgggcccuccuccccuccuugcaccgagauuaauaaaaaaaaaaaaaaaaaaaaaaaaaaaaaaaaaaaaaaaaaaaaaaaaaaaaaaaaaaaaaaaaugcaucccccccccccccccccccccccccccccccaaaggcucuuuucagagccaccagaauu

SEQ ID NO: 20909 - RNA, 886 nt, Artificial Sequence
  SARS-CoV-2__MT706390.1__membrane protein (M) mRNA gc
aggagaaagcuuaccauggccgacagcaacggcaccaucaccguggaggagcugaagaagcuccuggagcaguggaaccuggucaucggguuccucuuccugacguggaucugccugcuccaguucgccuacgcgaaccgcaaccgguuccuguacaucaucaagcugaucuuccucuggcugcuguggcccgugacccucgccugcuucgugcuggccgccgucuaccgcaucaacuggaucaccggcgggaucgccaucgcgauggccugccuggugggccucauguggcuguccuacuucaucgccagcuuccggcuguucgcccgcacccgguccauguggagcuucaacccggagacgaacauccuccugaacgugccccugcacgggaccaucgucacccgcccccuccuggaguccgagcuggugaucggcgcggugauccuccggggccaccuccgcaucgccgggcaccaccugggccggugcgacaucaaggaccugcccaaggagaucaccgucgccacgagccgcacccuguccuacuacaagcugggggccagccagcggguggccggcgacuccggguucgcggccuacagccgcuaccggaucggcaacuacaagcucaacaccgaccacuccagcuccagcgacaacaucgcccugcuggugcagugaggacuaguuauaagacugacuagcccgaugggccucccaacgggcccuccuccccuccuugcaccgagauuaauaaaaaaaaaaaaaaaaaaaaaaaaaaaaaaaaaaaaaaaaaaaaaaaaaaaaaaaaaaaaaaaaugcaucccccccccccccccccccccccccccccccaaaggcucuuuucagagccaccagaauu

SEQ ID NO: 20910 - RNA, 886 nt, Artificial Sequence
  SARS-CoV-2__MT655135.1__membrane protein (M) mRNA gc
aggagaaagcuuaccauggccgacagcaacggcaccaucaccguggaggagcugaagaagcuccuggagcaguggaaccuggucaucggguuccucuuccugacguggaucugccugcuccaguucgccuacgcgaaccgcaaccgguuccuguacaucaucaagcugaucuuccucuggcugcuguggcccgugacccugaccugcuucgugcuggccgccgucuaccgcaucaacuggaucaccggcgggaucgccaucgccauggcgugccuggugggccucauguggcuguccuacuucaucgccagcuuccggcuguucgcccgcacgcgguccauguggagcuucaacccggagaccaacauccuccugaacgugccccugcacgggaccauccucacccgcccccugcuggaguccgagcucgucaucggcgccgugauccugcggggccaccuccgcaucgcggggcaccaccucggccggugcgacaucaaggaccugcccaaggagaucacgguggccaccagccgcacccuguccuacuacaagcucggggccagccagcgggucgccggcgacuccggguucgccgcguacagccgcuaccggaucggcaacuacaagcugaacaccgaccacuccagcuccagcgacaacaucgcccugcucgugcagugaggacuaguuauaagacugacuagcccgaugggccucccaacgggcccuccuccccuccuugcaccgagauuaauaaaaaaaaaaaaaaaaaaaaaaaaaaaaaaaaaaaaaaaaaaaaaaaaaaaaaaaaaaaaaaaaugcaucccccccccccccccccccccccccccccccaaaggcucuuuucagagccaccagaauu

SEQ ID NO: 20911 - RNA, 886 nt, Artificial Sequence
  SARS-CoV-2__MT641735.1__membrane protein (M) mRNA gc
aggagaaagcuuaccauggccgacagcaacggcaccaucaccguggaggagcugaagaagcuccuggagcaguggaaccuggucaucggguuccucuuccugacguggaucugccugcuccaguucgccuacgcgaaccgcaaccgguucuucuacaucaucaagcugaucuuccuguggcuccuguggcccgugacccuggccugcuucgugcucgccgccgucuaccgcaucaacuggaucaccggcgggaucgccaucgcgauggccugccuggugggccugauguggcucuccuacuucaucgccagcuuccggcuguucgcccgcacccgguccauguggagcuucaacccggagacgaacauccugcucaacgugccccugcacgggaccauccugacccgcccccuccuggaguccgagcuggucaucggcgcggugauccuccggggccaccuccgcaucgccgggcaccaccugggccggugcgacaucaaggaccugcccaaggagaucaccguggccacgagccgcacccuguccuacuacaagcugggggccagccagcgggucgccggcgacuccggguucgcggccuacagccgcuaccggaucggcaacuacaagcucaacaccgaccacuccagcuccagcgacaacaucgcccugcuggugcagugaggacuaguuauaagacugacuagcccgaugggccucccaacgggcccuccuccccuccuugcaccgagauuaauaaaaaaaaaaaaaaaaaaaaaaaaaaaaaaaaaaaaaaaaaaaaaaaaaaaaaaaaaaaaaaaaugcaucccccccccccccccccccccccccccccccaaaggcucuuuucagagccaccagaauu

SEQ ID NO: 20912 - RNA, 886 nt, Artificial Sequence
  SARS-CoV-2__MT641744.1__membrane protein (M) mRNA gc
aggagaaagcuuaccauggccgacagcaacggcaccaucaccguggaggagcugaagaagcuccuggagcaguggaaccuggucaucggguuccucuuccugacguggaucugccugcuccaguucgccuacgcgaaccgcaaccgguuccuguacaucaucaagcugaucuuccucuggcugcuguggcccgugacccucgccugcuucgugcuggccgccgucuaccgcaucaacuggaucaccggcgggaucgccaucgcgauggccugccuggugggccucauguggcuguccuacuucaucgccagcuuccggcuguucgcccgcacccgguccauguggagcuucaacccggagacgaacauccuccugaacgugccccugcacgggaccauccucacccgcccccugcuggaguccgagcucgucaucggcgcggugauccugcacggccaccuccggaucgccgggcaccaccugggccgcugcgacaucaaggaccugcccaaggagaucaccguggccacgagccggacccuguccuacuacaagcucggggccagccagcgcgucgccggcgacuccggguucgcggccuacagccgguaccgcaucggcaacuacaagcugaacaccgaccacuccagcuccagcgacaacaucgcccugcucgugcagugaggacuaguuauaagacugacuagcccgaugggccucccaacgggcccuccuccccuccuugcaccgagauuaauaaaaaaaaaaaaaaaaaaaaaaaaaaaaaaaaaaaaaaaaaaaaaaaaaaaaaaaaaaaaaaaaugcaucccccccccccccccccccccccccccccccaaaggcucuuuucagagccaccagaauu

SEQ ID NO: 20913 - RNA, 886 nt, Artificial Sequence
  SARS-CoV-2__MT642078.1__membrane protein (M) mRNA gc
aggagaaagcuuaccauggccgacagcaacggcaccaucaccguggaggagcugaagaagcuccuggagcaguggaaccuggucaucggguuccucuuccugacguggaucugccugcuccaguucgccuacgcgaaccgcaaccgguuccuguacaucaucaagcugaucuuccucuggcugcuguggcccgugacccucgccuucuucgugcuggccgccgucuaccgcaucaacuggaucaccggcgggaucgccaucgcgauggccugccuggugggccucauguggcuguccuacuucaucgccagcuuccggcuguucgcccgcacccgguccauguggagcuucaacccggagacgaacauccuccugaacgugccccugcacgggaccauccucacccgcccccugcuggaguccgagcucgucaucggcgcggugauccugcggggccaccuccgcaucgccgggcaccaccugggccggugcgacaucaaggaccugcccaaggagaucaccguggccacgagccgcacccuguccuacuacaagcucggggccagccagcgggucgccggcgacuccggguucgcggccuacagccgcuaccggaucggcaacuacaagcugaacaccgaccacuccagcuccagcgacaacaucgcccugcucgugcagugaggacuaguuauaagacugacuagcccgaugggccucccaacgggcccuccuccccuccuugcaccgagauuaauaaaaaaaaaaaaaaaaaaaaaaaaaaaaaaaaaaaaaaaaaaaaaaaaaaaaaaaaaaaaaaaaugcaucccccccccccccccccccccccccccccccaaaggcucuuuucagagccaccagaauu

SEQ ID NO: 20914 - RNA, 886 nt, Artificial Sequence
  SARS-CoV-2__MT627217.1__membrane protein (M) mRNA gc
aggagaaagcuuaccauggccgacagcaacggcaccaucaccguggaggagcugaagaagcuccuggagcaguggaaccuggucaucguguuccucuuccugacguggaucugccugcuccaguucgccuacgcgaaccgcaaccgguuccuguacaucaucaagcugaucuuccucuggcugcuguggcccgugacccucgccugcuucguccuggccgccguguaccgcaucaacuggaucaccgggggcaucgccaucgcgauggccugccugguggggcucauguggcuguccuacuucaucgccagcuuccggcuguucgcccgcacccgguccauguggagcuucaacccggagacgaacauccuccugaacgucccccugcacggcaccauccucacccgcccccugcuggaguccgagcucgugaucggggcggugauccugcggggccaccuccgcaucgccggccaccaccuggggcggugcgacaucaaggaccugcccaaggagaucaccgucgccacgagccgcacccuguccuacuacaagcucggcgccagccagcggguggccggggacuccggcuucgcggccuacagccgcuaccggaucgggaacuacaagcugaacaccgaccacuccagcuccagcgacaacaucgcccugcucgugcagugaggacuaguuauaagacugacuagcccgaugggccucccaacgggcccuccuccccuccuugcaccgagauuaauaaaaaaaaaaaaaaaaaaaaaaaaaaaaaaaaaaaaaaaaaaaaaaaaaaaaaaaaaaaaaaaaugcaucccccccccccccccccccccccccccccccaaaggcucuuuucagagccaccagaauu

SEQ ID NO: 20915 - RNA, 886 nt, Artificial Sequence
  SARS-CoV-2__MT627751.1__membrane protein (M) mRNA gc
aggagaaagcuuaccauggccgacagcaacggcaccaucaccguggaggagcugaagaagcuccuggagcaguggaaccuggucaucggguuccucuuccugacguggaucugccugcuccaguucgccuacgcgaaccgcaaccgguuccuguacaucaucaagcugaucuuccucuggcugcuguggcccgugacccucgccugcuucgugcuggccgccaucuaccgcaucaacuggaucaccggcgggaucgccaucgcgauggccugccuggucggccucauguggcuguccuacuucaucgccagcuuccggcuguucgcccgcacccgguccauguggagcuucaacccggagacgaacauccuccugaacgugccccugcacgggaccauccucacccgcccccugcuggaguccgagcucgugaucggcgcggucauccugcggggccaccuccgcaucgccgggcaccaccugggccggugcgacaucaaggaccugcccaaggagaucaccguggccacgagccgcacccuguccuacuacaagcucggggccagccagcggguggccggcgacuccggguucgcggccuacagccgcuaccggaucggcaacuacaagcugaacaccgaccacuccagcuccagcgacaacaucgcccugcucguccagugaggacuaguuauaagacugacuagcccgaugggccucccaacgggcccuccuccccuccuugcaccgagauuaauaaaaaaaaaaaaaaaaaaaaaaaaaaaaaaaaaaaaaaaaaaaaaaaaaaaaaaaaaaaaaaaaugcaucccccccccccccccccccccccccccccccaaaggcucuuuucagagccaccagaauu

SEQ ID NO: 20916 - RNA, 811 nt, Artificial Sequence
  SARS-CoV-2__MT632615.1__membrane protein (M) mRNA gc
aggagaaagcuuaccuuccuguuccucaccuggaucugccugcugcaguucgccuacgccaaccgcaaccgguuccucuacaucaucaagcugaucuuccuguggcuccuguggcccgugacccuggcgugcuucguccucgccgccguguaccgcaucaacuggaucacgggcgggaucgccaucgccauggcgugccuggugggccugauguggcucagcuacuucaucgccuccuuccggcuguucgcccgcacccggagcaugugguccuucaacccggagaccaacauccugcucaacgucccccugcacgggaccauccugacgcgcccccuccuggagagcgagcuggugaucggcgccgugauccuccgggggcaccuccgcaucgcgggccaccaccugggccggugcgacaucaaggaccugcccaaggagaucaccgucgccaccucccgcacccugagcuacuacaagcugggggccucccagcggguggccggcgacagcggguucgccgcguacucccgcuaccggaucggcaacuacaagcucaacacggaccacagcuccagcuccgacaacaucgcccugcuggugcagugaggacuaguuauaagacugacuagcccgaugggccucccaacgggcccuccuccccuccuugcaccgagauuaauaaaaaaaaaaaaaaaaaaaaaaaaaaaaaaaaaaaaaaaaaaaaaaaaaaaaaaaaaaaaaaaaugcaucccccccccccccccccccccccccccccccaaaggcucuuuucagagccaccagaauu

SEQ ID NO: 20917 - RNA, 886 nt, Artificial Sequence
  SARS-CoV-2__MT568645.1__membrane protein (M) mRNA gc
aggagaaagcuuaccauggccgacagcaacggcaccaucaccguggaggaguucaagaagcugcucgagcaguggaaccuggucaucggguuccuguuccucacguggaucugccugcugcaguucgccuacgcgaaccgcaaccgguuccucuacaucaucaagcugaucuuccuguggcuccuguggcccgugacccuggccugcuucgugcucgccgccgucuaccgcaucaacuggaucaccggcgggaucgccaucgcgauggccugccuggugggccugauguggcucuccuacuucaucgccagcuuccggcuguucgcccgcacccgguccauguggagcuucaacccggagacgaacauccugcucaacgugccccugcacgggaccauccugacccgcccccuccuggaguccgagcuggucaucggcgcggugauccuccggggccaccuccgcaucgccgggcaccaccugggccggugcgacaucaaggaccugcccaaggagaucaccguggccacgagccgcacccuguccuacuacaagcugggggccagccagcgggucgccggcgacuccggguucgcggccuacagccgcuaccggaucggcaacuacaagcucaacaccgaccacuccagcuccagcgacaacaucgcccugcuggugcagugaggacuaguuauaagacugacuagcccgaugggccucccaacgggcccuccuccccuccuugcaccgagauuaauaaaaaaaaaaaaaaaaaaaaaaaaaaaaaaaaaaaaaaaaaaaaaaaaaaaaaaaaaaaaaaaaugcaucccccccccccccccccccccccccccccccaaaggcucuuuucagagccaccagaauu

SEQ ID NO: 20918 - RNA, 886 nt, Artificial Sequence
  SARS-CoV-2__MT520347.1__membrane protein (M) mRNA gc
aggagaaagcuuaccauggccgacagcaacggcaccaucaccguggaggagcugaagaagcuccuggagcaguggaaccuggucaucggguuccucuuccugacguggaucugccugcuccaguucgccuacgcgaaccgcaaccgguuccuguacaucaucaagcugaucuuccucuggcugcuguggcccgugacccucgccugcuucgugcuggccgccgucuaccgcaucaacuggaucaccggcgggaucgccaucgcgauggccugccuggugucccucauguggcugagcuacuucaucgccuccuuccggcuguucgcccgcacccggagcaugugguccuucaacccggagacgaacauccuccugaacgugccccugcacggcaccauccucacccgcccccugcuggagagcgagcucgucaucggggcggugauccugcggggccaccuccgcaucgccggccaccaccuggggcggugcgacaucaaggaccugcccaaggagaucaccguggccacgucccgcacccugagcuacuacaagcucggcgccucccagcgggucgccggggacagcggcuucgcggccuacucccgcuaccggaucgggaacuacaagcugaacaccgaccacagcuccagcuccgacaacaucgcccugcucgugcagugaggacuaguuauaagacugacuagcccgaugggccucccaacgggcccuccuccccuccuugcaccgagauuaauaaaaaaaaaaaaaaaaaaaaaaaaaaaaaaaaaaaaaaaaaaaaaaaaaaaaaaaaaaaaaaaaugcaucccccccccccccccccccccccccccccccaaaggcucuuuucagagccaccagaauu

SEQ ID NO: 20919 - RNA, 886 nt, Artificial Sequence
  SARS-CoV-2__MT520458.1__membrane protein (M) mRNA gc
aggagaaagcuuaccauggccgacagcaacggcaccaucaccguggaggagcugaagaagcuccuggagcaguggaaccuggucaucggguuccucuuccugacguggaucugccugcuccaguucgccuacgcgaaccgcaaccgguuccuguacaucaucaagcugaucuuccucuggcugcuguggcccgugacccucgccugcuucgugcuggccgccgucuaccgcaucaacuggaucaccggcgggaucgccaucgcgauggccugccuggugggccucauguggcuguccuacuucaucgccagcuuccggcuguucgcccgcacccgguccauguggagcuucaacccggagacgaacauccuccugaacgugccccugcacgggaccauccucacccgcucccugcuggagagcgagcucgucaucggcgcggugauccugcggggccaccuccgcaucgccgggcaccaccugggccggugcgacaucaaggaccugcccaaggagaucaccguggccacgucccgcacccugagcuacuacaagcucggggccucccagcgggucgccggcgacagcggguucgcggccuacucccgcuaccggaucggcaacuacaagcugaacaccgaccacagcuccagcuccgacaacaucgcccugcucgugcagugaggacuaguuauaagacugacuagcccgaugggccucccaacgggcccuccuccccuccuugcaccgagauuaauaaaaaaaaaaaaaaaaaaaaaaaaaaaaaaaaaaaaaaaaaaaaaaaaaaaaaaaaaaaaaaaaugcaucccccccccccccccccccccccccccccccaaaggcucuuuucagagccaccagaauu

SEQ ID NO: 20920 - RNA, 886 nt, Artificial Sequence
  SARS-CoV-2__MT558681.1__membrane protein (M) mRNA gc
aggagaaagcuuaccauggccgacagcaacggcaccaucaccguggaggagcugaagaagcuccuggagcaguggaaccuggucaucggguuccucuuccugacguggaucugccugcuccaguucgccuacgcgaaccgcaaccgguuccuguacaucaucaagcugaucuuccucuggcugcuguggcccgugacccucgccugcuucgugcuggccgccgucuaccgcaucaacuggaucaccggcgggaucgccaucgcgauggccugccuggugggccucauguggcuguccuacuucaucgccagcuuccggcuguucgcccgcacccgguccauguggagcuucaacccggagacgaacauccuccugaacgugccccugcacgggaccauccucacccgcccccugcuggaguccgagcucgucaucggcgcggugaucuuccggggccaccuccgcaucgccgggcaccaccugggccggugcgacaucaaggaccugcccaaggagaucaccguggccacgagccgcacccuguccuacuacaagcugggggccagccagcgggucgccggcgacuccggguucgcggccuacagccgcuaccggaucggcaacuacaagcucaacaccgaccacuccagcuccagcgacaacaucgcccugcuggugcagugaggacuaguuauaagacugacuagcccgaugggccucccaacgggcccuccuccccuccuugcaccgagauuaauaaaaaaaaaaaaaaaaaaaaaaaaaaaaaaaaaaaaaaaaaaaaaaaaaaaaaaaaaaaaaaaaugcaucccccccccccccccccccccccccccccccaaaggcucuuuucagagccaccagaauu

SEQ ID NO: 20921 - RNA, 886 nt, Artificial Sequence
  SARS-CoV-2__MT507282.1__membrane protein (M) mRNA gc
aggagaaagcuuaccauggccgacagcaacggcaccaucaccguggaggagcugaagaagcuccuggagcaguggaaccuggucaucggguuccucuuccugacguggaucugccugcuccaguucgccuacgcgaaccgcaaccgguuccuguacaucaucaagcugaucuuccucuggcugcuguggcccgugacccucgccugcuucgugcuggccgccgucuaccgcaucaacuggaucaccggcgggaucgccaucgcgauggccugccuggugggccucauguggcuguccuacuucaucgccagcuuccggcuguucgcccgcacccgguccauguggagcuucaacccggagacgaacauccuccugaacgugccccugcacgggaccauccucacccgcccccugcuggaguccgagaucgucaucggcgcggugauccuccggggccaccuccgcaucgccgggcaccaccugggccggugcgacaucaaggaccugcccaaggagaucaccguggccacgagccgcacccuguccuacuacaagcugggggccagccagcgggucgccggcgacuccggguucgcggccuacagccgcuaccggaucggcaacuacaagcucaacaccgaccacuccagcuccagcgacaacaucgcccugcuggugcagugaggacuaguuauaagacugacuagcccgaugggccucccaacgggcccuccuccccuccuugcaccgagauuaauaaaaaaaaaaaaaaaaaaaaaaaaaaaaaaaaaaaaaaaaaaaaaaaaaaaaaaaaaaaaaaaaugcaucccccccccccccccccccccccccccccccaaaggcucuuuucagagccaccagaauu

SEQ ID NO: 20922 - RNA, 886 nt, Artificial Sequence
  SARS-CoV-2__MT477859.1__membrane protein (M) mRNA gc
aggagaaagcuuaccauggccgacagcaacggcaccaucaccguggaggagcugaagaagcuccuggagcaguggaaccuggucaucggguuccucuuccugacguggaucugccugcuccaguucgccuacgcgaaccgcaaccgguuccuguacaucaucaagcugaucuuccucuggcugcuguggcccgugacccucgccugcuucgugcuggccgccgucuaccgcaucaacuggaucaccggcgggaucgccaucgcgauggccugccuggugggccucauguggcuguccuacuucaucgccagcuuccggcuguucgcccgcacccgguccauguggagcuucaacccggagacgaacauccuccugaacgugcccuuccacgggaccauccugacccgcccccuccuggaguccgagcuggucaucggcgcggugauccuccggggccaccuccgcaucgccgggcaccaccugggccggugcgacaucaaggaccugcccaaggagaucaccguggccacgagccgcacccuguccuacuacaagcugggggccagccagcgggucgccggcgacuccggguucgcggccuacagccgcuaccggaucggcaacuacaagcucaacaccgaccacuccagcuccagcgacaacaucgcccugcuggugcagugaggacuaguuauaagacugacuagcccgaugggccucccaacgggcccuccuccccuccuugcaccgagauuaauaaaaaaaaaaaaaaaaaaaaaaaaaaaaaaaaaaaaaaaaaaaaaaaaaaaaaaaaaaaaaaaaugcaucccccccccccccccccccccccccccccccaaaggcucuuuucagagccaccagaauu

SEQ ID NO: 20923 - RNA, 886 nt, Artificial Sequence
  SARS-CoV-2__MT470125.1__membrane protein (M) mRNA gc
aggagaaagcuuaccauggccgacagcaacggcaccaucaccguggaggagcugaagaagcuccuggagcaguggaaccuggucaucggguuccucuuccugacguggaucugccugcuccaguucgccuacgcgaaccgcaaccgguuccuguacaucaucaagcugaucuuccucuggcugcuguggcccgugacccucgccugcuucgugcuggccgucguguaccgcaucaacuggaucaccggcgggaucgccaucgccauggcgugccuggugggccucauguggcuguccuacuucaucgccagcuuccggcuguucgcccgcacccgguccauguggagcuucaacccggagacgaacauccuccugaacgucccccugcacgggaccauccucacccgcccccugcuggaguccgagcucgugaucggcgccgugauccugcggggccaccuccgcaucgcggggcaccaccugggccggugcgacaucaaggaccugcccaaggagaucaccgucgccacgagccgcacccuguccuacuacaagcucggggccagccagcggguggccggcgacuccggguucgccgcguacagccgcuaccggaucggcaacuacaagcugaacaccgaccacuccagcuccagcgacaacaucgcccugcucgugcagugaggacuaguuauaagacugacuagcccgaugggccucccaacgggcccuccuccccuccuugcaccgagauuaauaaaaaaaaaaaaaaaaaaaaaaaaaaaaaaaaaaaaaaaaaaaaaaaaaaaaaaaaaaaaaaaaugcaucccccccccccccccccccccccccccccccaaaggcucuuuucagagccaccagaauu

SEQ ID NO: 20924 - RNA, 886 nt, Artificial Sequence
  SARS-CoV-2__MT451051.1__membrane protein (M) mRNA gc
aggagaaagcuuaccauggccgacagcaacggcaccaucaccguggaggagcugaagaagcuccuggagcaguggaaccuggucaucggguuccucuuccugacguggaucugccugcuccaguucgccuacgcgaaccgcaaccgguuccuguacaucaucaagcugaucuuccucuggcugcuguggcccgugacccucgccugcuucgugcuggccgccgucuaccgcaucaacuggaucaccggcgggaucgccaucgcgauggccugccuggugggccucauguggcuguccuacuucaucgccagcuuccggcuguucgcccgcacccgguccauguggagcuucaacccggagacgaacauccuccugaacgugccccugcacgggaccauccucacccgcccccugcuggaguccgagcucgucaucggcgcggugauccugcggggccaccuccgcaucgccgggcaccaccugggccggugcgacaucaaggaccugcccaaggagaucaccguggccacgagccgcacccuguccuacuacaagcucggggccagccagcgggucgccggcgacuccggguucgcggccuacagccgcuaccggaucggcaacuacaagcugaacaccgaccacuccagcuccaucgacaacaucgcccugcucgugcagugaggacuaguuauaagacugacuagcccgaugggccucccaacgggcccuccuccccuccuugcaccgagauuaauaaaaaaaaaaaaaaaaaaaaaaaaaaaaaaaaaaaaaaaaaaaaaaaaaaaaaaaaaaaaaaaaugcaucccccccccccccccccccccccccccccccaaaggcucuuuucagagccaccagaauu

SEQ ID NO: 20925 - RNA, 886 nt, Artificial Sequence
  SARS-CoV-2__MT429186.1__membrane protein (M) mRNA gc
aggagaaagcuuaccauggccgacagcaacggcaccaucaccguggaggagcugaagaagcuccuggagcaguggaaccuggucaucggguuccucuuccugacguggaucugccugcuccaguucuccuacgccaaccgcaaccgguuccuguacaucaucaagcugaucuuccucuggcugcuguggcccgugacccucgcgugcuucgugcuggccgccgucuaccgcaucaacuggaucaccggcgggaucgccaucgccauggcgugccuggugggccucauguggcugagcuacuucaucgccuccuuccggcuguucgcccgcacccggagcaugugguccuucaacccggagacgaacauccuccugaacgugccccugcacgggaccauccucacccgcccccugcuggagagcgagcucgucaucggcgccgugauccugcggggccaccuccgcaucgcggggcaccaccugggccggugcgacaucaaggaccugcccaaggagaucaccguggccacgucccgcacccugagcuacuacaagcucggggccucccagcgggucgccggcgacagcggguucgccgcguacucccgcuaccggaucggcaacuacaagcugaacaccgaccacagcuccagcuccgacaacaucgcccugcucgugcagugaggacuaguuauaagacugacuagcccgaugggccucccaacgggcccuccuccccuccuugcaccgagauuaauaaaaaaaaaaaaaaaaaaaaaaaaaaaaaaaaaaaaaaaaaaaaaaaaaaaaaaaaaaaaaaaaugcaucccccccccccccccccccccccccccccccaaaggcucuuuucagagccaccagaauu

SEQ ID NO: 20926 - RNA, 886 nt, Artificial Sequence
  SARS-CoV-2__MT358656.1__membrane protein (M) mRNA gc
aggagaaagcuuaccauggccgacagcaacggcaccaucaccguggaggagcugaagaagcuccuggagcaguggaaccuggucaucggguuccucuuccugacguggaucugccugcuccaguucgccuacgcgaaccgcaaccgguuccuguacaucaucaagcugaucuuccucuggcugcuguggcccgugacccucgccugcuucgugcuggccgccgucuaccgcaucaacuggaucaccggcgggaucgccaucgcgauggccugccuggugggccucauguggcuguccuacuucaucgccagcuuccggcuguucgcccgcacccgguccauguggagcuucaacccggagacgaacauccuccugaacgugccccugcacgggaccauccucacccgcccccugcuggaguccgagcucgucaucggcgcggugauccugcggggccaccuccgcaucgccgggcaccaccugggccggugcgacaucaaggaccugcccaaggagaucaccguggccacgagccgcacccuguccuacuacaagcucggggccagccagcgggucgccggcaacuccggguucgcggccuacagccgcuaccggaucggcaacuacaagcugaacaccgaccacuccagcuccagcgacaacaucgcccugcucgugcagugaggacuaguuauaagacugacuagcccgaugggccucccaacgggcccuccuccccuccuugcaccgagauuaauaaaaaaaaaaaaaaaaaaaaaaaaaaaaaaaaaaaaaaaaaaaaaaaaaaaaaaaaaaaaaaaaugcaucccccccccccccccccccccccccccccccaaaggcucuuuucagagccaccagaauu

SEQ ID NO: 20927 - RNA, 1459 nt, Artificial Sequence
  MERS-CoV/MERS-CoV-Jeddah-human-1__KF958702.1__nucleocapsid protein (N) mRNA gc
aggagaaagcuuaccauggccagccccgccgcgccgcgcgccguguccuucgccgacaacaacgacaucaccaacaccaaccugagccggggccgcgggcggaaccccaagccccgcgccgcccccaacaacacggucuccugguacaccggccucacccagcacgggaaggugccgcugaccuucccgcccggccagggggugccccugaacgcgaacagcacgcccgcccagaacgccggcuacuggcggcgccaggaccggaagaucaacaccggcaacgggaucaagcagcucgcgccccgcugguacuucuacuacaccggcaccgggcccgaggccgcccugcccuuccgggccgucaaggacggcaucgugugggugcacgaggacggggccacggacgccccguccaccuucggcacccgcaaccccaacaacgacagcgcgaucgucacccaguucgcccccggcacgaagcugcccaagaacuuccacaucgaggggaccggcgggaacucccagagcuccagccgggccuccagcgugucccgcaacagcucccggagcuccagccagggcucccgcagcggcaacagcacccgggggaccuccccgggccccagcgggaucggcgccgucgggggcgaccuccuguaccuggaccuccugaaccgccugcaggcccucgaguccggcaaggugaagcagagccagcccaaggugaucacgaagaaggacgcggccgccgccaagaacaagaugcggcacaagcgcaccuccaccaagagcuucaacauggugcaggccuucgggcugcggggccccggggaccugcagggcaacuucggggaccuccagcugaacaagcugggcaccgaggacccgcgcuggccccagaucgcggagcucgcccccacggccuccgccuucaugggcaugagccaguucaagcugacccaccagaacaacgacgaccacgggaaccccgucuacuuccugcgguacuccggcgccaucaagcucgacccgaagaaccccaacuacaacaaguggcuggagcugcucgagcagaacaucgacgcguacaagaccuuccccaagaaggagaagaagcagaaggcccccaaggaggagagcaccgaccagauguccgagccgcccaaggagcagcgcgugcaggggagcaucacgcagcgcacccggacccgccccuccgugcagccgggccccaugaucgacgucaacaccgacugaggacuaguuauaagacugacuagcccgaugggccucccaacgggcccuccuccccuccuugcaccgagauuaauaaaaaaaaaaaaaaaaaaaaaaaaaaaaaaaaaaaaaaaaaaaaaaaaaaaaaaaaaaaaaaaaugcaucccccccccccccccccccccccccccccccaaaggcucuuuucagagccaccagaauu

SEQ ID NO: 20928 - RNA, 1459 nt, Artificial Sequence; identical to SEQ ID NO: 20927
  MERS-CoV/Al-Hasa_4_2013__KF186564.1__nucleocapsid protein (N) mRNA gc

SEQ ID NO: 20929 - RNA, 1459 nt, Artificial Sequence; identical to SEQ ID NO: 20927
  MERS-CoV/Riyadh_14_2013__KJ156934.1__nucleocapsid protein (N) mRNA gc

SEQ ID NO: 20930 - RNA, 1453 nt, Artificial Sequence
  MERS-CoV/England 1__NC_038294.1__nucleocapsid protein (N) mRNA gc
aggagaaagcuuaccauggccagccccgccgcgccgcgcgccguguccuucgccgacaacaacgacaucaccaacaccaaccugagccggggccgcgggcggaaccccaagccccgcgccgcccccaacaacacggucuccugguacaccggccucacccagcacgggaaggugccgcugaccuucccgcccggccagggggugccccugaacgcgaacagcacgcccgcccagaacgccggcuacuggcggcgccaggaccggaagaucaacaccggcaacgggaucaagcagcucgcgccccgcugguacuucuacuacaccggcaccgggcccgaggccgcccugcccuuccgggccgucaaggacggcaucgugugggugcacgaggacggggccacggacgccccguccaccuucggcacccgcaaccccaacaacgacagcgcgaucgucacccaguucgcccccggcacgaagcugcccaagaacuuccacaucgaggggaccggcgggaacucccagagcuccagccgggccuccagcgugucccgcaacagcucccggagcuccagccagggcucccgcagcggcaacagcacccgggggaccuccccgggccccagcgggaucggcgccgucgggggcgaccuccuguaccuggaccuccugaaccgccugcaggcccucgaguccggcaaggugaagcagagccagcccaaggugaucacgaagaaggacgcggccgccgccaagaacaagaugcggcacaagcgcaccuccaccaagagcuucaacauggugcaggccuucgggcugcggggccccggggaccugcagggcaacuucggggaccuccagcugaacaagcugggcaccgaggacccgcgcuggccccagaucgcggagcucgcccccacggccuccgccuucaugggcaugagccaguucaagcugacccaccagaacaacgacgaccacgggaaccccgucuacuuccugcgguacuccggcgccaucaagcucgacccgaagaaccccaacuacaacaaguggcuggagcugcucgagcagaacaucgacgcguacaagaccuuccccaagaaggagaagaagcagaaggcccccaaggaggagagcaccgaccagauguccgagccgcccaaggagcaccgcgugcaggggacgcagcgcacccggacccgccccagcgugcagccgggccccaugaucgacgucaacaccgacugaggacuaguuauaagacugacuagcccgaugggccucccaacgggcccuccuccccuccuugcaccgagauuaauaaaaaaaaaaaaaaaaaaaaaaaaaaaaaaaaaaaaaaaaaaaaaaaaaaaaaaaaaaaaaaaaugcaucccccccccccccccccccccccccccccccaaaggcucuuuucagagccaccagaauu

SEQ ID NO: 20931 - RNA, 1486 nt, Artificial Sequence
  SARS-CoV/Tor2__NC_004718.3__nucleocapsid protein (N) mRNA gc
aggagaaagcuuaccaugagcgacaacggcccccaguccaaccagcgcagcgccccgcggaucaccuucgggggccccaccgacuccacggacaacaaccagaacgggggccgcaacggggcccggcccaagcagcgccggccccagggccugccgaacaacaccgcgagcugguucaccgcccucacccagcacggcaaggaggagcugcgcuucccccgggggcagggcgugcccaucaacacgaacuccgggcccgacgaccagaucggcuacuaccgccgggccacccgccggguccgcgggggcgacggcaagaugaaggagcugagcccgcggugguacuucuacuaccucgggaccggccccgaggccucccugcccuacggggccaacaaggagggcaucguguggguggcgaccgagggcgcccugaacacgcccaaggaccacaucgggacccgcaacccgaacaacaacgccgccaccguccuccagcugccccagggcaccacgcugcccaagggguucuacgcggagggcagccgcgggggcucccaggccagcucccggagcuccagccggucccgcggcaacagccggaacuccacccccgggagcucccgcggcaacagcccggcccggauggccagcgggggcggggagaccgcccucgcgcugcugcuccuggaccgccugaaccagcucgaguccaaggugagcggcaagggccagcagcagcaggggcagaccgugacgaagaaguccgccgccgaggccagcaagaagccccgccagaagcggaccgccaccaagcaguacaacgucacccaggcguucggccgccgggggcccgagcagacgcagggcaacuucggggaccaggaccugauccgccagggcaccgacuacaagcacuggccccagaucgcccaguucgccccguccgccagcgccuucuucggcaugucccggaucgggauggaggugacccccagcggcaccuggcugacguaccacggggcgaucaagcucgacgacaaggacccccaguucaaggacaacgugauccugcugaacaagcacaucgacgccuacaagaccuucccgcccaccgagcccaagaaggacaagaagaagaagaccgacgaggcccagccccucccccagcgccagaagaagcagccgacggucacccugcugcccgccgccgacauggacgacuucucccggcagcuccagaacagcauguccggcgcgagcgccgacuccacccaggccugaggacuaguuauaagacugacuagcccgaugggccucccaacgggcccuccuccccuccuugcaccgagauuaauaaaaaaaaaaaaaaaaaaaaaaaaaaaaaaaaaaaaaaaaaaaaaaaaaaaaaaaaaaaaaaaaugcaucccccccccccccccccccccccccccccccaaaggcucuuuucagagccaccagaauu

SEQ ID NO: 20932 - RNA, 1564 nt, Artificial Sequence
  HCoV/OC43__NC_006213.1__nucleocapsid protein (N) mRNA gc
aggagaaagcuuaccaugagcuucacccccggcaagcaguccagcucccgcgccagcuccgggaaccggagcggcaacgggauccugaagugggccgaccaguccgaccaguuccgcaacgugcagacccggggccgccgggcgcagccgaagcagacggccaccagccagcagcccuccgggggcaacgucgugcccuacuacagcugguucuccggcaucacccaguuccagaaggggaaggaguucgaguucguggagggccaggggguccccaucgccccgggcgugcccgccaccgaggccaagggguacugguaccgccacaaccggcgcagcuucaagacggcggacggcaaccagcggcagcuccugccccgcugguacuucuacuaccugggcaccgggccccacgccaaggaccaguacggcaccgacaucgacgggguguacugggucgccuccaaccaggccgacgugaacaccccggcggacaucguggaccgggaccccagcuccgacgaggccauccccacgcgcuucccgcccggcaccguccucccccagggcuacuacaucgaggggagcggccgguccgcccccaacagccgcuccaccagccggaccagcucccgcgccagcuccgccgggagccggucccgcgcgaacagcggcaaccggacgcccaccuccggggugaccccggacauggccgaccagaucgccagccuggugcuggccaagcucggcaaggacgccaccaagccccagcaggucacgaagcacaccgcgaaggaggugcgccagaagauccugaacaagccccggcagaagcgcucccccaacaagcagugcaccgugcagcagugcuucggcaagcgcgggccgaaccagaacuucggcgggggcgagaugcugaagcucgggaccagcgacccccaguuccccauccuggccgagcuggcccccacggccggcgccuucuucuucggcucccggcucgagcuggcgaagguccagaaccugagcgggaacccggacgagccccagaaggacguguacgagcuccgcuacaacggcgccauccgguucgacuccacccugagcggguucgagaccaucaugaaggugcugaacgagaaccucaacgccuaccagcagcaggacggcaugaugaacaugucccccaagccccagcgccagcgggggcacaagaacggccagggcgagaacgacaacaucagcgucgccgugccgaagucccgcgugcagcagaacaagagccgggagcugaccgccgaggacaucucccugcucaagaagauggacgagcccuacacggaggacaccagcgagaucugaggacuaguuauaagacugacuagcccgaugggccucccaacgggcccuccuccccuccuugcaccgagauuaauaaaaaaaaaaaaaaaaaaaaaaaaaaaaaaaaaaaaaaaaaaaaaaaaaaaaaaaaaaaaaaaaugcaucccccccccccccccccccccccccccccccaaaggcucuuuucagagccaccagaauu

SEQ ID NO: 20933 - RNA, 1543 nt, Artificial Sequence
  HCoV/HKU1__NC_006577.2__nucleocapsid protein (N) mRNA gc
aggagaaagcuuaccaugagcuacacccccggccacuacgccgggucccgcagcuccagcggcaaccgguccgggauccugaagaagaccagcugggccgaccaguccgagcgcaacuaccagacguucaaccggggccgcaagacccagccgaaguucaccgugagcacccagccccaggggaacacgaucccccacuacuccugguucagcggcaucacccaguuccagaagggccgggacuucaaguucuccgacgggcagggcguccccaucgcguucggggugccgcccagcgaggccaagggcuacugguaccgccacucccggcgcagcuucaagaccgccgacgggcagcagaagcagcuccugccccggugguacuucuacuaccugggcaccggccccuacgccaacgccuccuacggggagagccucgagggcguguucugggucgcgaaccaccaggccgacacguccaccccgagcgacguguccagccgcgaccccaccacccaggaggccauccccacgcgguucccgcccgggaccauccugccccagggcuacuacguggagggcagcgggcgcuccgccagcaacucccggcccggcagccgcucccagagccgggggcccaacaaccgcucccugagccgguccaacagcaacuuccgccacuccgacagcaucgucaagccggacauggcggacgagaucgccaaccucgugcuggccaagcugggcaaggacuccaagccccagcaggucaccaagcagaacgccaaggagauccggcacaagauccucaccaagccccgccagaagcggacgcccaacaagcacugcaacgugcagcagugcuucgggaagcgcggcccgagccagaacuucggcaacgccgagaugcugaagcuggggaccaacgacccccaguuccccauccucgcggagcuggcccccaccccgggcgccuucuucuucggguccaagcuggaccucgugaagcgcgacagcgaggccgacucccccgugaaggacgucuucgagcugcacuacagcggcuccauccgguucgacagcacccugcccggguucgagacgaucaugaaggugcucgaggagaaccugaacgccuacgugaacagcaaccagaacaccgacuccgacagccuguccagcaagccccagcgcaagcggggcgucaagcagcucccggagcaguucgacucccugaaccugagcgcgggcacccagcacaucuccaacgacuucacccccgaggaccacagccuccuggccacgcuggacgaccccuacguggaggacuccguggccugaggacuaguuauaagacugacuagcccgaugggccucccaacgggcccuccuccccuccuugcaccgagauuaauaaaaaaaaaaaaaaaaaaaaaaaaaaaaaaaaaaaaaaaaaaaaaaaaaaaaaaaaaaaaaaaaugcaucccccccccccccccccccccccccccccccaaaggcucuuuucagagccaccagaauu

SEQ ID NO: 20934 - RNA, 1387 nt, Artificial Sequence
  HCoV/229E/BN1/GER/2015__KU291448.1__nucleocapsid protein (N) mRNA gc
aggagaaagcuuaccauggccaccgugaagugggccgacgcgagcgagccccagcgcggccggcaggggcgcaucccguacucccuguacagcccccuccuggucgacuccgagcagcccuggaaggugaucccccggaaccuggugccggucaacaagaaggacaagaacaagcucaucggcuacuggaacgugcagaagcgcuuccggacccgcaaggggaagcggguggaccugagccccaagcugcacuucuacuaccucggcacggggccccacaaggacgccaaguuccgcgagcgggucgagggcguggugugggucgccguggacggcgccaagaccgagcccaccggguacggcgugcgccggaagaacuccgagccggagaucccccacuucaaccagaagcugcccaacggggucaccguggccgaggagcccgacagccgcgcgccgucccggagccagucccgcagccagucccggagccgcggcgaguccaagagccagucccggaaccccagcuccgaccgcaaccacaacagccaggacgacaucaugaaggccguggccgccgcgcugaagucccucggguucgacaagccccaggagaaggacaagaaguccgccaagacgggcacccccaagccgagccggaaccagagccccgccagcucccagagcgccgccaagauccuggcgcgcucccagagcuccgagaccaaggagcagaagcacgagaugcagaagccccgguggaagcgccagcccaacgacgacgucaccagcaacgugacgcagugcuucggcccgcgcgaccuggaccacaacuucggguccgccggcguggucgccaacggggugaaggccaagggcuacccccaguucgccgagcucgugcccagcaccgcggccaugcuguucgacucccacaucgucagcaaggaguccggcaacaccguggugcugaccuucacgacccgggucaccgugcccaaggaccacccgcaccucgggaaguuccuggaggagcugaacgccuucacccgcgagaugcagcagcagccccuccugaaccccagcgcccuggaguucaaccccucccagacgagcccggccaccgucgagcccgugcgggacgagguguccaucgagaccgacaucaucgacgaggucaacugaggacuaguuauaagacugacuagcccgaugggccucccaacgggcccuccuccccuccuugcaccgagauuaauaaaaaaaaaaaaaaaaaaaaaaaaaaaaaaaaaaaaaaaaaaaaaaaaaaaaaaaaaaaaaaaaugcaucccccccccccccccccccccccccccccccaaaggcucuuuucagagccaccagaauu

SEQ ID NO: 20935 - RNA, 1351 nt, Artificial Sequence
  HCoV/NL63/RPTEC/2004__JX504050.1__nucleocapsid protein (N) mRNA gc
aggagaaagcuuaccauggccagcgugaacugggccgacgaccgcgcggcccggaagaaguucccgccgcccuccuucuacaugccccugcucgucagcuccgacaaggcccccuaccgcgugaucccccggaaccuggugcccaucggcaaggggaacaaggacgagcagaucggcuacuggaacguccaggagcgcuggcggaugcgccgggggcagcgcguggaccugccgcccaaggugcacuucuacuaccucggcaccgggccccacaaggaccugaaguuccggcagcgcagcgacggcgucguguggguggccaaggagggcgccaagaccgucaacacgucccuggggaaccggaagcgcaaccagaagccccucgagcccaaguucagcaucgcgcugcccccggagcuguccgugguggaguucgaggaccggagcaacaacuccagccgcgccuccagccgguccagcacccgcaacaacucccgggacagcucccgcagcaccucccggcagcagagccgcacccggagcgacuccaaccagagcuccagcgaccucgucgccgccgugacgcuggcgcugaagaaccucggcuucgacaaccaguccaagagccccuccagcuccgggaccagcacccccaagaagcccaacaagccgcugucccagccccgcgccgacaagcccagccagcugaagaagccccgcuggaagcgggugccgacccgcgaggagaacgucauccagugcuucggcccccgggacuucaaccacaacaugggggacuccgaccucgugcagaacggcguggacgccaagggcuucccccagcuggccgagcugauccccaaccaggccgcccucuucuucgacagcgaggucuccacggacgaggugggggacaacgugcagaucaccuacaccuacaagaugcuggucgcgaaggacaacaagaaccugccgaaguucaucgagcagaucagcgccuucaccaagcccuccagcaucaaggagaugcagucccagagcagccacguggcccagaacacggugcucaacgccuccauccccgagagcaagccccuggcggacgacgacuccgccaucaucgagaucgucaacgaggugcugcacugaggacuaguuauaagacugacuagcccgaugggccucccaacgggcccuccuccccuccuugcaccgagauuaauaaaaaaaaaaaaaaaaaaaaaaaaaaaaaaaaaaaaaaaaaaaaaaaaaaaaaaaaaaaaaaaaugcaucccccccccccccccccccccccccccccccaaaggcucuuuucagagccaccagaauu

SEQ ID NO: 20936 - RNA, 1486 nt, Artificial Sequence
  Bat SARS-like CoV/WIV1__KF367457.1__nucleocapsid protein (N) mRNA gc
aggagaaagcuuaccaugagcgacaacggcccccaguccaaccagcgcagcgccccgcggaucaccuucgggggccccaccgacuccacggacaacaaccagaacgggggccgcaacggggcccggcccaagcagcgccggccccagggccugccgaacaacaccgcgagcugguucaccgcccucacccagcacggcaaggaggagcugcgcuucccccgggggcagggcgugcccaucaacacgaacuccgggcccgacgaccagaucggcuacuaccgccgggccacccgccggguccgcgggggcgacggcaagaugaaggagcugagcccgcggugguacuucuacuaccucgggaccggccccgaggccucccugcccuacggggccaacaaggagggcaucguguggguggcgaccgagggcgcccugaacacgcccaaggaccacaucgggacccgcaacccgaacaacaacgccgccaccguccuccagcugccccagggcaccacgcugcccaagggguucuacgcggagggcagccgcgggggcucccaggccagcucccggagcuccagccggucccgcggcaacagccggaacuccacccccgggagcucccgcggcaacagcccggcccggauggccagcgggggcggggagaccgcccucgcgcugcugcuccuggaccgccugaaccagcucgaguccaaggugagcggcaagggccagcagcagcaggggcagaccgugacgaagaaguccgccgccgaggccagccgcaagccccggcagaagcgcaccgccaccaagcaguacaacgucacccaggcguucggccggcgcgggcccgagcagacgcagggcaacuucggggaccaggaccugauccggcagggcaccgacuacaagcacuggccccagaucgcccaguucgccccguccgccagcgccuucuucggcaugucccgcaucgggauggaggugacccccagcggcaccuggcugacguaccacggggcgaucaagcucgacgacaaggacccccaguucaaggacaacgugauccugcugaacaagcacaucgacgccuacaagaccuucccgcccaccgagcccaagaaggacaagaagaagaagaccgacgaggcccagccccucccccagcggcagaagaagcagccgacggucacccugcugcccgccgccgacauggacgacuucucccgccagcuccagaacagcauguccggcgcgagcgccgacuccacccaggccugaggacuaguuauaagacugacuagcccgaugggccucccaacgggcccuccuccccuccuugcaccgagauuaauaaaaaaaaaaaaaaaaaaaaaaaaaaaaaaaaaaaaaaaaaaaaaaaaaaaaaaaaaaaaaaaaugcaucccccccccccccccccccccccccccccccaaaggcucuuuucagagccaccagaauu

SEQ ID NO: 20937 - RNA, 1624 nt, Artificial Sequence
  BatCoV/HKU9-1 BF_005I__NC_009021.1__nucleocapsid protein (N) mRNA gc
aggagaaagcuuaccaugagcggccgcaaccggucccgcagcgggacccccuccccgaaggugaccuucaagcaggagagcgacggcuccgacagcgaguccgagcggcgcaacgggaaccggaacggcgcccgccccaagaacaacaacagccggggguccgcccccaagcccgagaagccgaaggcggccccgccccagaacgucagcugguucgcgccccuggugcagacgggcaaggccgagcuccgcuucccccggggcgagggggugcccgucucccagggcguggacagcaccuacgagcacggguacuggcugcgcacccagcgguccuuccagaagggcgggaagcagguccuggccaacccccgcugguacuucuacuacaccggcacgggccgguucggggaccuccgcuucggcaccaagaaccccgacaucguguggguggggcaggagggcgccaacaucaaccggcugggcgacauggggacccgcaacccgagcaacgacggcgccauccccgugcagcuggccgggggcauccccaagggguucuacgccgagggccggggcucccgcgggaacagccgguccagcucccgcaacagcagccgggcguccagccgcggcaacucccgcgccagcucccgcggggccagccccggccggccggccgccaaccccuccaccgagcccuggauggcguaccucguccagaagcuggagcggcuggagagccagguguccgggacgaagcccgccaccaagaacccggugcaggucaccaagaacgaggccgccgccaacgcgaagaagcuccgccacaagcggaccgcccacaagggcagcggcgugacggugaacuacgggcgccggggccccggggaccuggagggcaacuucggggaccgcgagaugaucaagcugggcaccgacgacccccgguucgccgccgccgcgcagauggcccccaacgucuccagcuuccucuucaugucccaccugagcacccgcgacgaggacgacgcccuguggcuccacuacaagggcgccaucaagcugccgaaggacgaccccaacuacgagcaguggaccaagauccuggccgagaaccucaacgcguacaaggacuucccgcccacggagcccaagaaggacaagaagaagaaggaggagaccgcccaggacaccgugaucuucgaggacgccuccaccgggacggaccagaccguggucaaggugugggugaaggaccaggacgcccagaccgacgacgaguggcugggcggggacgagaccgucuacgaggacgaggacgaccggcccaagacgcagcgccggcacaagaagcgcggcagcaccgcgucccgggugaccaucgccgaccccaccaacgccggcgccgagcgcagcugaggacuaguuauaagacugacuagcccgaugggccucccaacgggcccuccuccccuccuugcaccgagauuaauaaaaaaaaaaaaaaaaaaaaaaaaaaaaaaaaaaaaaaaaaaaaaaaaaaaaaaaaaaaaaaaaugcaucccccccccccccccccccccccccccccccaaaggcucuuuucagagccaccagaauu

SEQ ID NO: 20938 - RNA, 1246 nt, Artificial Sequence
  PDCoV/Swine/Thailand/S5011/2015__KU051641.1__nucleocapsid protein (N) mRNA gc
aggagaaagcuuaccauggccgcccccguggucccgaccaccgacgcgagcugguuccaggugcugaaggcccagaacaagaaggccacgcacccccaguuccgcggcaacggggugccccucaacuccgccaucaagcccgccgagaaccacggcuacuggcugcgguacacccgccagaagcccgggggcacccccaucccgcccagcuacgcguucuacuacaccgggacgggcccgcggggcaaccugaaguacggggagcucccgcccaacgacacccccgccaccacccgcgucacgugggugaagggcuccggggccgacaccagcaucaagccccacguggccaagcggaaccccaacaaccccaagcaccagcugcugccccuccgcuucccgaccggcgacgggcccgcgcagggcuuccgggucgaccccuucaacgcccgcggccggccccaggagcgcggguccggcccgcggagccaguccgugaacccccgcgggaccggcaaccagccccggaagcgcgaccagagcgcccccgccgccgugcggcgcaagacgcagcaccaggcgccgaagcggacccugcccaagggcaagaccaucucccaggucuucgggaaccgcagccggaccggcgccaacgugggguccgccgacacggagaagaccggcauggccgacccccgcaucauggcccuggcgcggcacgugcccgggguccaggagaugcuguucgccggccaccucgagagcaacuuccaggccggcgccaucacccugaccuucuccuacagcaugacggugaaggagggguccccggacuacgagcgccucaaggacgcccugaacaccguggucaaccagaccuacgagccgcccaccaagcccacgaaggacaagaagcccgacaagcaggaccagagcgcgaagcccaagcagcagaagaagcccaagaaggugacccugccggccgacaagcaggacugggagugggacgacgccuucgagaucaagcaggaguccgccgccugaggacuaguuauaagacugacuagcccgaugggccucccaacgggcccuccuccccuccuugcaccgagauuaauaaaaaaaaaaaaaaaaaaaaaaaaaaaaaaaaaaaaaaaaaaaaaaaaaaaaaaaaaaaaaaaaugcaucccccccccccccccccccccccccccccccaaaggcucuuuucagagccaccagaauu

SEQ ID NO: 20939 - RNA, 1543 nt, Artificial Sequence
  PEDV/NPL-PEDv/2013/P10__KJ778616.1__nucleocapsid protein (N) mRNA gc
aggagaaagcuuaccauggccagcguguccuuccaggaccgcggccggaagcgcgucccccugagccucuacgccccgcugcgggugaccaacgacaagccccuguccaaggugcucgcgaacaacgccguccccaccaacaaggggaacaaggaccagcagaucggcuacuggaacgagcagauccgcuggcggaugcgccgcggggagcggaucgagcagcccagcaacuggcacuucuacuaccugggcacggggccgcacgccgaccugcgguaccgcacccggaccgagggcguguucuggguggccaaggagggcgccaagaccgagcccacgaaccucgggguccgcaaggcguccgagaagcccaucauccccaacuucagccagcagcugccguccgugguggagaucgucgagcccaacaccccgcccaccagccgggccaacucccgcagccggucccgcggcaacgggaacaaccggagccgcucccccagcaacaaccggggcaacaaccagucccgcgggaacagccagaaccggggcaacaaccagggccgcggggccucccagaaccgcggcgggaacaacaacaacaacaacaagagccggaaccaguccaagaaccgcaaccagagcaacgaccggggcggcgugaccagccgcgacgaccugguggccgcggucaaggacgcccucaagucccuggggaucggcgagaaccccgacaagcugaagcagcagcagaagcccaagcaggagcggagcgacuccagcgggaagaacacgcccaagaagaacaagucccgcgccaccagcaaggagcgggaccucaaggacaucccggaguggcgccggauccccaagggcgagaacuccguggccgccugcuucgggccccgcggcggcuucaagaacuucggggacgcggaguucguggagaagggcgucgacgccagcggguacgcccagaucgccucccuggcccccaacguggcggcccuccuguucggcgggaacguggccguccgggagcuggccgacagcuacgagaucaccuacaacuacaagaugaccgugccgaaguccgaccccaacguggagcugcucgucagccagguggacgccuucaagacgggcaacgcgaagccccagcgcaagaaggagaagaagaacaagcgggagaccacccagcagcugaacgaggaggccaucuacgacgacgugggcguccccuccgacgugacccacgccaaccuggagugggacacggccgucgacgggggcgacaccgccguggagaucaucaacgagaucuucgacaccgggaacugaggacuaguuauaagacugacuagcccgaugggccucccaacgggcccuccuccccuccuugcaccgagauuaauaaaaaaaaaaaaaaaaaaaaaaaaaaaaaaaaaaaaaaaaaaaaaaaaaaaaaaaaaaaaaaaaugcaucccccccccccccccccccccccccccccccaaaggcucuuuucagagccaccagaauu

SEQ ID NO: 20940 - RNA, 1582 nt, Artificial Sequence
  MHV/A59__NC_048217.1__nucleocapsid protein (N) mRNA gc
aggagaaagcuuaccaugagcuucgugcccggccaggagaacgccgggggccgcuccagcuccgucaaccgggccgggaacggcauccugaagaagaccaccugggcggaccagacggagcgcgggccgaacaaccagaaccggggccgccggaaccagcccaagcagaccgccaccacccagcccaacagcggcuccguggugccccacuacagcugguucuccgggaucacgcaguuccagaagggcaaggaguuccaguucgccgaggggcagggcgucccgaucgccaacgggauccccgccagcgagcagaagggcuacugguaccgccacaaccggcgcuccuucaagacccccgacggccagcagaagcagcuccugccccggugguacuucuacuaccuggggaccggcccgcacgcgggggccagcuacggcgacuccaucgagggcguguucuggguggccaacagccaggccgacaccaacacgcgcuccgacaucgucgagcgggaccccagcucccacgaggcgauccccacccgcuucgcccccgggaccgugcucccgcagggcuucuacguggaggggagcggccgguccgcccccgccagccgcuccgggagccggagccagucccgcggccccaacaaccgggcccgcagcuccagcaaccagcggcagcccgcguccaccgucaagccggacauggccgaggagaucgccgcccuggugcuggccaagcucggcaaggacgcggggcagcccaagcaggucacgaagcagagcgccaaggaggugcgccagaagauccugaacaagccccggcagaagcgcacccccaacaagcagugcccggugcagcagugcuucggcaagcgcgggcccaaccagaacuucggcggguccgagaugcugaagcucggcaccagcgacccccaguuccccauccuggccgagcuggccccgaccgugggcgccuucuucuucggguccaagcucgagcuggucaagaagaacagcggcggggcggacgagcccacgaaggacguguacgagcugcaguacuccggcgccgugcgguucgacagcacccuccccggguucgagaccaucaugaagguccugaacgagaaccugaacgccuaccagaaggacggcggcgccgacguggugucccccaagccgcagcgcaaggggcggcgccaggcccaggagaagaaggacgaggucgacaacgugagcguggcgaagcccaaguccagcguccagcggaacgugucccgcgagcucacccccgaggaccggagccugcuggcccagauccucgacgacggcgucgugccggacgggcuggaggacgacuccaacgugugaggacuaguuauaagacugacuagcccgaugggccucccaacgggcccuccuccccuccuugcaccgagauuaauaaaaaaaaaaaaaaaaaaaaaaaaaaaaaaaaaaaaaaaaaaaaaaaaaaaaaaaaaaaaaaaaugcaucccccccccccccccccccccccccccccccaaaggcucuuuucagagccaccagaauu

SEQ ID NO: 20941 - RNA, 1477 nt, Artificial Sequence
  SARS-CoV-2/Wuhan-Hu-1__NC_045512.2/MN908947.2/EPI_ISL_402128__nuc leocapsid protein (N) mRNA gc R9923
aggagaaagcuuaccaugagcgacaacggcccccagaaccagcgcaacgccccgcggaucaccuucgggggccccuccgacagcaccggguccaaccagaacggcgagcgcagcggggcccgguccaagcagcgccggccccagggccugcccaacaacacggcgagcugguucaccgcccucacccagcacggcaaggaggaccugaaguucccgcgcgggcagggcgugcccaucaacaccaacuccagccccgacgaccagaucggguacuaccggcgcgccacgcggcgcauccggggcggggacggcaagaugaaggaccugagcccccgcugguacuucuacuaccucggcaccgggccggaggccggccugcccuacggggccaacaaggacggcaucaucugggucgcgaccgagggcgcccugaacacccccaaggaccacaucgggacgcggaaccccgccaacaacgccgcgaucgugcuccagcugccgcagggcaccacccugcccaagggguucuacgccgagggcucccgcgggggcucccaggccagcucccggagcuccagccgcucccggaacagcucccgcaacagcacccccggcagcucccgggggacgagccccgcccgcauggccggcaacgggggcgacgcggcccucgcccugcugcuccuggaccggcugaaccagcucgaguccaagaugagcgggaagggccagcagcagcagggccagaccgugaccaagaaguccgccgccgaggcgagcaagaagccgcgccagaagcgcaccgccacgaaggccuacaacgucacccaggccuucgggcggcgcggccccgagcagacccaggggaacuucggcgaccaggagcugauccggcaggggaccgacuacaagcacuggccccagaucgcccaguucgcgcccuccgccagcgccuucuucggcaugucccgcaucggcauggaggugacgccgagcgggaccuggcugaccuacaccggcgccaucaagcucgacgacaaggaccccaacuucaaggaccaggugauccugcugaacaagcacaucgacgccuacaagacguucccgcccaccgagcccaagaaggacaagaagaagaaggcggacgagacccaggcccucccccagcggcagaagaagcagcagaccgucacgcugcugcccgccgccgaccucgacgacuucuccaagcagcugcagcagagcauguccagcgcggacuccacccaggccugaggacuaguuauaagacugacuagcccgaugggccucccaacgggcccuccuccccuccuugcaccgagauuaauaaaaaaaaaaaaaaaaaaaaaaaaaaaaaaaaaaaaaaaaaaaaaaaaaaaaaaaaaaaaaaaaugcaucccccccccccccccccccccccccccccccaaaggcucuuuucagagccaccagaauu

SEQ ID NO: 20942 - RNA, 1477 nt, Artificial Sequence
  SARS-CoV-2__MT919525.1__nucleocapsid protein (N) mRNA gc
aggagaaagcuuaccaugagcgacaacggcccccagaaccagcgcaacgccccgcggaucaccuucgggggccccuccgacagcaccggguccaaccagaacggcgagcgcagcggggcccgguccaagcagcgccggccccagggccugcccaacaacacggcgagcugguucaccgcccucacccagcacggcaaggaggaccugaaguucccgcgcgggcagggcgugcccaucaacaccaacuccagccccgacgaccagaucggguacuaccggcgcgccacgcggcgcauccggggcggggacggcaagaugaaggaccugagcccccgcugguacuucuacuaccucggcaccgggccggaggccggccugcccuacggggccaacaaggacggcaucaucugggucgcgaccgagggcgcccugaacacccccaaggaccacaucgggacgcggaaccccgccaacaacgccgcgaucgugcuccagcugccgcagggcaccacccugcccaagggguucuacgccgagggcucccgcgggggcucccaggccagcucccggagcuccagccgcucccggaacagcucccgcaacagcacccccggcagcuccaagcggacgagccccgcccgcauggccgggaacggcggggacgcggcccucgcccugcugcuccuggaccggcugaaccagcucgaguccaagaugagcggcaaggggcagcagcagcagggccagaccgugaccaagaaguccgccgccgaggcgagcaagaagccgcgccagaagcgcaccgccacgaaggccuacaacgucacccaggccuucggccggcgcgggcccgagcagacccagggcaacuucggggaccaggagcugauccggcagggcaccgacuacaagcacuggccccagaucgcccaguucgcgcccuccgccagcgccuucuucgggaugucccgcaucggcauggaggugacgccgagcggcaccuggcugaccuacaccggggccaucaagcucgacgacaaggaccccaacuucaaggaccaggugauccugcugaacaagcacaucgacgccuacaagacguucccgcccaccgagcccaagaaggacaagaagaagaaggcggacgagacccaggcccucccccagcggcagaagaagcagcagaccgucacgcugcugcccgccgccgaccucgacgacuucuccaagcagcugcagcagagcauguccagcgcggacuccacccaggccugaggacuaguuauaagacugacuagcccgaugggccucccaacgggcccuccuccccuccuugcaccgagauuaauaaaaaaaaaaaaaaaaaaaaaaaaaaaaaaaaaaaaaaaaaaaaaaaaaaaaaaaaaaaaaaaaugcaucccccccccccccccccccccccccccccccaaaggcucuuuucagagccaccagaauu

SEQ ID NO: 20943 - RNA, 1477 nt, Artificial Sequence
  SARS-CoV-2__MT919768.1__nucleocapsid protein (N) mRNA gc
aggagaaagcuuaccaugagcgacaacggcccccagaaccagcgcaacgcccugcggaucaccuucgggggcccguccgacagcaccggguccaaccagaacggcgagcgcagcggggcccgguccaagcagcgccggccccagggccuccccaacaacacggcgagcugguucaccgcccugacccagcacggcaaggaggaccugaaguucccccgcgggcagggcgugccgaucaacaccaacuccagccccgacgaccagaucggguacuaccggcgcgccacgcggcgcauccggggcggggacggcaagaugaaggaccucagcccccgcugguacuucuacuaccugggcaccgggcccgaggccggccugccguacggggccaacaaggacggcaucaucugggucgcgaccgagggcgcccucaacacccccaaggaccacaucgggacgcggaaccccgccaacaacgccgcgaucgugcugcagcugccccagggcaccacccucccgaagggguucuacgccgagggcucccgcgggggcucccaggccagcucccggagcuccagccgcucccggaacagcucccgcaacagcacccccggcagcucccgggggacgagccccgcccgcauggccggcaacgggggcgacgcggcccuggcccugcuccugcuggaccggcucaaccagcuggaguccaagaugagcgggaagggccagcagcagcagggccagaccgugaccaagaaguccgccgccgaggcgagcaagaagccccgccagaagcgcaccgccacgaaggccuacaacgucacccaggccuucgggcggcgcggcccggagcagacccaggggaacuucggcgaccaggagcugauccggcaggggaccgacuacaagcacuggccccagaucgcccaguucgcgcccuccgccagcgccuucuucggcaugucccgcaucggcauggaggugacgcccagcgggaccuggcucaccuacaccggcgccaucaagcuggacgacaaggacccgaacuucaaggaccaggugauccugcucaacaagcacaucgacgccuacaagacguucccgcccaccgagcccaagaaggacaagaagaagaaggcggacgagacccaggcccugccccagcggcagaagaagcagcagaccgucacgcugcuccccgccgccgaccuggacgacuucuccaagcagcugcagcagagcauguccagcgcggacuccacccaggccugaggacuaguuauaagacugacuagcccgaugggccucccaacgggcccuccuccccuccuugcaccgagauuaauaaaaaaaaaaaaaaaaaaaaaaaaaaaaaaaaaaaaaaaaaaaaaaaaaaaaaaaaaaaaaaaaugcaucccccccccccccccccccccccccccccccaaaggcucuuuucagagccaccagaauu

SEQ ID NO: 20944 - RNA, 1477 nt, Artificial Sequence
  SARS-CoV-2__MT919770.1__nucleocapsid protein (N) mRNA gc
aggagaaagcuuaccaugagcgacaacggcccccagaaccagcgcaacgccccgcggaucaccuucgggggccccuccgacagcaccggguccaaccagaacggcgagcgcagcggggcccgguccaagcagcgccggccccagggccugcccaacaacacggcgagcugguucaccgcccucacccagcacggcaaggaggaccugaaguucccgcgcgggcagggcgugcccaucaacaccaacuccagccccgacgaccagaucggguacuaccggcgcgccacgcggcgcauccggggcggggacggcaagaugaaggaccugagcccccgcugguacuucuacuaccucggcaccgggccggaggccggccugcccuacggggccaacaaggacggcaucaucugggucgcgaccgagggcgcccugaacacccccaaggaccacaucgggacgcggaaccccgccaacaacgccgcgaucgugcuccagcugccgcagggcaccacccugcccaagggguucuacgccgagggcucccgcgggggcucccaggccagcucccggagcuccagccgcucccggaacagcucccgcaacagcacccccggcagcuccaagcggacgagccccgcccgcauggccgugaacgggggcgacgcggcccucgcccugcugcuccuggaccggcugaaccagcucgaguccaagaugagcgggaagggccagcagcagcaggggcagaccgucaccaagaaguccgccgccgaggcgagcaagaagccgcgccagaagcgcaccgccacgaaggccuacaacgugacccaggccuucggccggcgcggccccgagcagacccaggggaacuucggcgaccaggagcugauccggcaggggaccgacuacaagcacuggccccagaucgcccaguucgcgcccuccgccagcgccuucuucggcaugucccgcaucgggauggaggugacgccgagcggcaccuggcugaccuacaccggcgccaucaagcucgacgacaaggaccccaacuucaaggaccaggucauccugcugaacaagcacaucgacgccuacaagacguucccgcccaccgagcccaagaaggacaagaagaagaaggcggacgagacccaggcccucccccagcggcagaagaagcagcagaccgugacgcugcugcccgccgccgaccucgacgacuucuccaagcagcugcagcagagcauguccagcgcggacuccacccaggccugaggacuaguuauaagacugacuagcccgaugggccucccaacgggcccuccuccccuccuugcaccgagauuaauaaaaaaaaaaaaaaaaaaaaaaaaaaaaaaaaaaaaaaaaaaaaaaaaaaaaaaaaaaaaaaaaugcaucccccccccccccccccccccccccccccccaaaggcucuuuucagagccaccagaauu

SEQ ID NO: 20945 - RNA, 1456 nt, Artificial Sequence
  SARS-CoV-2__MT919777.1__nucleocapsid protein (N) mRNA gc
aggagaaagcuuaccaugagcgacaacggcccccagaaccagcgcaacgggccgcggaucaccuucggcgggcccuccgacagcaccggcuccaaccagaacggggagcgcagcggcgcccgguccaagcagcgccggccccagggccugcccaacaacacggccagcugguucaccgcgcucacccagcacgggaaggaggaccugaaguucccgcgcggccagggggugcccaucaacaccaacuccagccccgacgaccagaucggcuacuaccggcgcgccacgcggcgcauccgcgggggcgacggcaagaugaaggaccugagcccccggugguacuucuacuaccucgggaccggcccggaggccgggcugcccuacggcgccaacaaggacggcaucaucugggucgccaccgagggggcgcugaacacccccaaggaccacaucggcacgcggaaccccgccaacaacgccgccaucgugcuccagcugccgcaggggaccacccugcccaagggcuucuacgcggaggggagccgcggcggcucccaggccagcucccggagcuccagccgcucccggaacagcucccgcaacagcacccccgggagcuccaagcggacguacggcggggacgccgcccucgcccugcugcuccuggaccgccugaaccagcucgagagcaagauguccggcaaggggcagcagcagcagggccagaccgugaccaagaaguccgcggccgaggccuccaagaagccccggcagaagcgcaccgccacgaaggccuacaacgucacccaggcguucggccgccgggggccggagcagacccagggcaacuucggggaccaggagcugauccgccagggcaccgacuacaagcacuggccccagaucgcccaguucgcccccagcgccuccgccuucuucgggaugagccggaucggcauggaggugacgcccuccggcaccuggcugaccuacaccggggcgaucaagcucgacgacaaggacccgaacuucaaggaccaggugauccugcugaacaagcacaucgacgccuacaagacguucccgcccaccgagcccaagaaggacaagaagaagaaggccgacgagacccaggcccucccccagcgccagaagaagcagcagaccgucacgcugcugcccgccgcggaccucgacgacuucagcaagcagcugcagcaguccaugagcuccgccgacagcacccaggccugaggacuaguuauaagacugacuagcccgaugggccucccaacgggcccuccuccccuccuugcaccgagauuaauaaaaaaaaaaaaaaaaaaaaaaaaaaaaaaaaaaaaaaaaaaaaaaaaaaaaaaaaaaaaaaaaugcaucccccccccccccccccccccccccccccccaaaggcucuuuucagagccaccagaauu

SEQ ID NO: 20946 - RNA, 1477 nt, Artificial Sequence
  SARS-CoV-2__MT919782.1__nucleocapsid protein (N) mRNA gc
aggagaaagcuuaccaugagcgacaacggcccccagaaccagcgcaacgccccgcggaucaccuucgggggccccuccgacagcaccggguccaaccagaacggcgagcgcagcggggcccgguccaagcagcgccggccccagggccugcccaacaacacggcgagcugguucaccgcccucacccagcacggcaaggaggaccugaaguucccgcgcgggcagggcgugcccaucaacaccaacuccagccccgacgaccagaucggguacuaccggcgcgccacgcggcgcauccggggcggggacggcaagaugaaggaccugagcccccgcugguacuucuacuaccucggcaccgggccggaggccggccugcccuacggggccaacaaggacggcaucaucugggucgcgaccgagggcgcccugaacacccccaaggaccacaucgggacgcggaaccccgccaacaacgccgcgaucgugcuccagcugccgcagggcaccacccugcccaagggguucuacgccgagggcucccgcgggggcucccaggccagcucccggagcuccagccgcucccggaacagcucccgcaacagcacccccggcagcuccaagcggacgagccccgccaucauggccgggaacggcggggacgcggcccucgcccugcugcuccuggaccgccugaaccagcucgaguccaagaugagcggcaaggggcagcagcagcagggccagaccgugaccaagaaguccgccgccgaggcgagcaagaagccgcggcagaagcgcaccgccacgaaggccuacaacgucacccaggccuucggccgccgggggcccgagcagacccagggcaacuucggggaccaggagcugauccgccagggcaccgacuacaagcacuggccccagaucgcccaguucgcgcccuccgccagcgccuucuucgggaugucccggaucggcauggaggugacgccgagcggcaccuggcugaccuacaccggggccaucaagcucgacgacaaggaccccaacuucaaggaccaggugauccugcugaacaagcacaucgacgccuacaagacguucccgcccaccgagcccaagaaggacaagaagaagaaggcggacgagacccaggcccucccccagcgccagaagaagcagcagaccgucacgcugcugcccgccgccgaccucgacgacuucuccaagcagcugcagcagagcauguccagcgcggacuccacccaggccugaggacuaguuauaagacugacuagcccgaugggccucccaacgggcccuccuccccuccuugcaccgagauuaauaaaaaaaaaaaaaaaaaaaaaaaaaaaaaaaaaaaaaaaaaaaaaaaaaaaaaaaaaaaaaaaaugcaucccccccccccccccccccccccccccccccaaaggcucuuuucagagccaccagaauu

SEQ ID NO: 20947 - RNA, 1477 nt, Artificial Sequence
  SARS-CoV-2__MT919994.1__nucleocapsid protein (N) mRNA gc
aggagaaagcuuaccaugagcgacaacggcccccagaaccagcgcaacgccacccggaucaccuucgggggcccguccgacagcacgggguccaaccagaacggcgagcgcagcggggcccgguccaagcagcgccggccccagggccugcccaacaacaccgcgagcugguucaccgcccucacccagcacggcaaggaggaccugaaguucccccgcgggcagggcgugccgaucaacacgaacuccagccccgacgaccagaucggguacuaccggcgcgccacccggcgcauccggggcggggacggcaagaugaaggaccugagcccccgcugguacuucuacuaccucggcaccgggcccgaggccggccugccguacggggccaacaaggacggcaucaucugggucgcgaccgagggcgcccugaacacgcccaaggaccacaucgggacccggaaccccgccaacaacgccgcgaucgugcuccagcugccccagggcaccacccugccgaagggguucuacgccgagggcagccgcgggggcauccaggccuccagccgguccagcucccgcagccggaacuccagccgcaacuccacgcccggcagcagccgggggaccucccccgcccgcauggccggcaacgggggcgacgcggcccucgcccugcugcuccuggaccggcugaaccagcucgagagcaagauguccgggaagggccagcagcagcagggccagaccgugaccaagaaguccgccgccgaggcguccaagaagccccgccagaagcgcacggccaccaaggccuacaacgucacccaggccuucgggcggcgcggcccggagcagacccaggggaacuucggcgaccaggagcugauccggcaggggacggacuacaagcacuggccccagaucgcccaguucgcgcccagcgccuccgccuucuucggcaugagccgcaucggcauggaggugacccccuccgggaccuggcugaccuacacgggcgccaucaagcucgacgacaaggacccgaacuucaaggaccaggugauccugcugaacaagcacaucgacgccuacaagaccuucccgcccaccgagcccaagaaggacaagaagaagaaggcggacgagacccaggcccucccccagcggcagaagaagcagcagacggucacccugcugcccgccgccgaccucgacgacuucagcaagcagcugcagcaguccaugagcuccgcggacagcacccaggccugaggacuaguuauaagacugacuagcccgaugggccucccaacgggcccuccuccccuccuugcaccgagauuaauaaaaaaaaaaaaaaaaaaaaaaaaaaaaaaaaaaaaaaaaaaaaaaaaaaaaaaaaaaaaaaaaugcaucccccccccccccccccccccccccccccccaaaggcucuuuucagagccaccagaauu

SEQ ID NO: 20948 - RNA, 1477 nt, Artificial Sequence
  SARS-CoV-2__MT919995.1__nucleocapsid protein (N) mRNA gc
aggagaaagcuuaccaugagcgacaacggcccccagaaccagcgcaacgccccgcggaucaccuucgggggccccuccgacagcaccggguccaaccagaacggcgagcgcagcggggcccgguccaagcagcgccggccccagggccugcccaacaacacggcgagcugguucaccgcccucacccagcacggcaaggaggaccugaaguucccgcgcgggcagggcgugcccaucaacaccaacuccagccccgacgaccagaucggguacuaccggcgcgccacgcggcgcauccggggcggggacggcaagaugaaggaccugagcccccgcugguacuucuacuaccucggcaccgggccggaggccggccugcccuacggggccaacaaggacggcaucaucugggucgcgaccgagggcgcccugaacacccccaaggaccacaucgggacgcggaaccccgccaacaacgccgcgaucgugcuccagcugccgcagggcaccacccugcccaagggguucuacgccgagggcagccgcgggggcucccaggccagcuuccgguccagcucccgcagccggaacuccagccgcaacuccacccccggcagcagccgggggacgucccccgcccgcauggccggcaacgggggcgacgcggcccucgcccugcugcuccuggaccggcugaaccagcucgagagcaagauguccgggaagggccagcagcagcagggccagaccgugaccaagaaguccgccgccgaggcguccaagaagccgcgccagaagcgcaccgccacgaaggccuacaacgucacccaggccuucgggcggcgcggccccgagcagacccaggggaacuucggcgaccaggagcugauccggcaggggaccgacuacaagcacuggccccagaucgcccaguucgcgcccagcgccuccgccuucuucggcaugagccgcaucggcauggaggugacgccguccgggaccuggcugaccuacaccggcgccaucaagcucgacgacaaggaccccaacuucaaggaccaggugauccugcugaacaagcacaucgacgccuacaagacguucccgcccaccgagcccaagaaggacaagaagaagaaggcggacgagacccaggcccucccccagcggcagaagaagcagcagaccgucacgcugcugcccgccgccgaccucgacgacuucagcaagcagcugcagcaguccaugagcuccgcggacagcacccaggccugaggacuaguuauaagacugacuagcccgaugggccucccaacgggcccuccuccccuccuugcaccgagauuaauaaaaaaaaaaaaaaaaaaaaaaaaaaaaaaaaaaaaaaaaaaaaaaaaaaaaaaaaaaaaaaaaugcaucccccccccccccccccccccccccccccccaaaggcucuuuucagagccaccagaauu

SEQ ID NO: 20949 - RNA, 1477 nt, Artificial Sequence
  SARS-CoV-2__MT920005.1__nucleocapsid protein (N) mRNA gc
aggagaaagcuuaccaugagcgacaacggcccccagaaccagcgcaacgccccgcggaucaccuucgggggccccuccgacagcaccggguccaaccagaacggcgagcgcagcggggcccgguccaagcagcgccggccccagggccugcccaacaacacggcgagcugguucaccgcccucacccagcacggcaaggaggaccugaaguucccgcgcgggcagggcgugcccaucaacaccaacuccagccccgacgaccagaucggguacuaccggcgcgccacgcggcgcauccggggcggggacggcaagaugaaggaccugagcccccgcugguacuucuacuaccucggcaccgggccggaggccggccugcccuacggggccaacaaggacggcaucaucugggucgcgaccgagggcgcccugaacacccccaaggaccacaucgggacgcggaaccccgccaacaacgccgcgaucgugcuccagcugccgcagggcaccacccugcccaagggguucuacgccgagggcagccgcgggggcauccaggccuccagccgguccagcucccgcagccggaacuccagccgcaacuccacccccggcagcagccgggggacgucccccgcccgcauggccggcaacgggggcgacgcggcccucgcccugcugcuccuggaccggcugaaccagcucgagagcaagauguccgggaagugccagcagcagcagggccagaccgugaccaagaaguccgccgccgaggcguccaagaagccgcgccagaagcgcaccgccacgaaggccuacaacgucacccaggccuucggccggcgcgggcccgagcagacccagggcaacuucggggaccaggagcugauccggcagggcaccgacuacaagcacuggccccagaucgcccaguucgcgcccagcgccuccgccuucuucgggaugagccgcaucggcauggaggugacgccguccggcaccuggcugaccuacaccggggccaucaagcucgacgacaaggaccccaacuucaaggaccaggugauccugcugaacaagcacaucgacgccuacaagacguucccgcccaccgagcccaagaaggacaagaagaagaaggcggacgagacccaggcccucccccagcggcagaagaagcagcagaccgucacgcugcugcccgccgccgaccucgacgacuucagcaagcagcugcagcaguccaugagcuccgcggacagcacccaggccugaggacuaguuauaagacugacuagcccgaugggccucccaacgggcccuccuccccuccuugcaccgagauuaauaaaaaaaaaaaaaaaaaaaaaaaaaaaaaaaaaaaaaaaaaaaaaaaaaaaaaaaaaaaaaaaaugcaucccccccccccccccccccccccccccccccaaaggcucuuuucagagccaccagaauu

SEQ ID NO: 20950 - RNA, 1477 nt, Artificial Sequence
  SARS-CoV-2__MT913038.1__nucleocapsid protein (N) mRNA gc
aggagaaagcuuaccaugagcgacaacggcccccagaaccagcgcaacgccccgcggaucaccuucgggggccccuccgacagcaccggguccaaccagaacggcgagcgcagcggggcccgguccaagcagcgccggccccagggccugcccaacaacacggcgagcugguucaccgcccucacccagcacggcaaggaggaccugaaguucccgcgcgggcagggcgugcccaucaacaccaacuccagccccgacgaccagaucggguacuaccggcgcgccacgcggcgcauccggggcggggacggcaagaugaaggaccugagcccccgcugguacuucuacuaccucggcaccgggccggaggccggccugcccuacggggccaacaaggacggcaucaucugggucgcgaccgagggcgcccugaacacccccaaggaccacaucgggacgcggaaccccgccaacaacgccgcgaucgugcuccagcugccgcagggcaccacccugcccaagggguucuacgccgagggcagccgcgggggcucccaggccuacagccgguccagcucccgcagccggaacuccagccgcaacuccacccccggcagcagccgggggacgucccccgcccgcauggccggcaacgggggcgacgcggcccucgcccugcugcuccuggaccggcugaaccagcucgagagcaagauguccgggaagggccagcagcagcagggccagaccgugaccaagaaguccgccgccgaggcguccaagaagccgcgccagaagcgcaccgccacgaaggccuacaacgucacccaggccuucgggcggcgcggccccgagcagacccaggggaacuucggcgaccaggagcugauccggcaggggaccgacuacaagcacuggccccagaucgcccaguucgcgcccagcgccuccgccuucuucggcaugagccgcaucggcauggaggugacgccguccgggaccuggcugaccuacaccggcgccaucaagcucgacgacaaggaccccaacuucaaggaccaggugauccugcugaacaagcacaucgacgccuacaagacguucccgcccaccgagcccaagaaggacaagaagaagaaggcggacgagacccaggcccucccccagcggcagaagaagcagcagaccgucacgcugcugcccgccgccgaccucgacgacuucagcaagcagcugcagcaguccaugagcuccgcggacagcacccaggccugaggacuaguuauaagacugacuagcccgaugggccucccaacgggcccuccuccccuccuugcaccgagauuaauaaaaaaaaaaaaaaaaaaaaaaaaaaaaaaaaaaaaaaaaaaaaaaaaaaaaaaaaaaaaaaaaugcaucccccccccccccccccccccccccccccccaaaggcucuuuucagagccaccagaauu

SEQ ID NO: 20951 - RNA, 1477 nt, Artificial Sequence
  SARS-CoV-2__MT913055.1__nucleocapsid protein (N) mRNA gc
aggagaaagcuuaccaugagcgacaacggcccccagaaccagcgcaacgccccgcggaucaccuucgggggccccuccgacagcaccggguccaaccagaacggcgagcgcagcggggcccgguccaagcagcgccggccccagggccugcccaacaacacggcgagcugguucaccgcccucacccagcacggcaaggaggaccugaaguucccgcgcgggcagggcgugcccaucaacaccaacuccagccccgacgaccagaucggguacuaccggcgcgccacgcggcgcauccggggcggggacggcaagaugaaggaccugagcccccgcugguacuucuacuaccucggcaccgggccggaggccggccugcccuacggggccaacaaggacggcaucaucugggucgcgaccgagggcgcccugaacacccccaaggaccacaucgggacgcggaaccccgccaacaacgccgcgaucgugcuccagcugccgcagggcaccacccugcccaagggguucuacgccgagggcagccgcgggggcucccaggccagcucccggagcuccagccgcucccggaacagcucccgcaacagcacccccggcagcucccgggggacgagccccgcccgcauggccggcaacgggggcgacgcggcccucgcccugcugcuccuggaccggcugaaccagcucgagaucaagauguccgggaagggccagcagcagcagggccagaccgugaccaagaaguccgccgccgaggcguccaagaagccgcgccagaagcgcaccgccacgaaggccuacaacgucacccaggccuucgggcggcgcggccccgagcagacccaggggaacuucggcgaccaggagcugauccggcaggggaccgacuacaagcacuggccccagaucgcccaguucgcgcccagcgccuccgccuucuucggcaugagccgcaucggcauggaggugacgccguccgggaccuggcugaccuacaccggcgccaucaagcucgacgacaaggaccccaacuucaaggaccaggugauccugcugaacaagcacaucgacgccuacaagacguucccgcccaccgagcccaagaaggacaagaagaagaaggcggacgagacccaggcccucccccagcggcagaagaagcagcagaccgucacgcugcugcccgccgccgaccucgacgacuucagcaagcagcugcagcaguccaugagcuccgcggacagcacccaggccugaggacuaguuauaagacugacuagcccgaugggccucccaacgggcccuccuccccuccuugcaccgagauuaauaaaaaaaaaaaaaaaaaaaaaaaaaaaaaaaaaaaaaaaaaaaaaaaaaaaaaaaaaaaaaaaaugcaucccccccccccccccccccccccccccccccaaaggcucuuuucagagccaccagaauu

SEQ ID NO: 20952 - RNA, 1477 nt, Artificial Sequence
  SARS-CoV-2__MT913093.1__nucleocapsid protein (N) mRNA gc
aggagaaagcuuaccaugagcgacaacggcccccagaaccagcgcaacgccccgcggaucaccuucgggggccccuccgacagcaccggguccaaccagaacggcgagcgcagcggggcccgguccaagcagcgccggccccagggccugcccaacaacacggcgagcugguucaccgcccucacccagcacggcaaggaggaccugaaguucccgcgcgggcagggcgugcccaucaacaccaacuccagccccgacgaccagaucggguacuaccggcgcgccacgcggcgcauccggggcggggacggcaagaugaaggaccugagcccccgcugguacuucuacuaccucggcaccgggccggaggccggccugcccuacggggccaacaaggacggcaucaucugggucgcgaccgagggcgcccugaacacccccaaggaccacaucgggacgcggaaccccgccaacaacgccgcgaucgugcuccagcugccgcagggcaccacccugcccaagggguucuacgccgagggcucccgcgggggcucccaggccagcucccggagcuccagccgcucccggaacagcucccgcaacagcacccccggcagcucccgggggacgagccccggccgcauggccgggaacggcggggacgccgcgcucgcccugcugcuccuggaccggcugaaccagcucgaguccaagaugagcggcaagggccagcagcagcaggggcagaccgugaccaagaaguccgccgccgaggccagcaagaagccgcgccagaagcgcaccgcgacgaaggccuacaacgucacccaggccuucggccggcgcgggcccgagcagacccagggcaacuucggggaccaggagcugauccggcagggcaccgacuacaagcacuggccccagaucgcccaguucgcccccuccgcgagcgccuucuucggcaugucccgcaucgggauggaggugacgccgagcggcaccuggcugaccuacaccggggccaucaagcucgacgacaaggaccccaacuucaaggaccaggugauccugcugaacaagcacaucgacgccuacaagacguucccgcccaccgagcccaagaaggacaagaagaagaaggccgacgagacccaggcgcucccccagcggcagaagaagcagcagaccgucacgcugcugcccgccgccgaccucgacgacuucuccaagcagcugcagcagagcauguccagcgccgacuccacccaggcgugaggacuaguuauaagacugacuagcccgaugggccucccaacgggcccuccuccccuccuugcaccgagauuaauaaaaaaaaaaaaaaaaaaaaaaaaaaaaaaaaaaaaaaaaaaaaaaaaaaaaaaaaaaaaaaaaugcaucccccccccccccccccccccccccccccccaaaggcucuuuucagagccaccagaauu

SEQ ID NO: 20953 - RNA, 1477 nt, Artificial Sequence
  SARS-CoV-2__MT913104.1__nucleocapsid protein (N) mRNA gc
aggagaaagcuuaccaugagcgacaacggcccccagaaccagcgcaacgccccgcggaucaccuucgggggccccuccgacagcaccggguccaaccagaacggcgagcgcagcggggcccgguccaagcagcgccggccccagggccugcccaacaacacggcgagcugguucaccgcccucacccagcacggcaaggaggaccugaaguucccgcgcgggcagggcgugcccaucaacaccaacuccagccccgacgaccagaucggguacuaccggcgcgccacgcggcgcauccggggcggggacggcaagaugaaggaccugagcccccgcugguacuucuacuaccucggcaccgggccggaggccggccugcccuacggggccaacaaggacggcaucaucugggucgcgaccgagggcgcccugaacacccccaaggaccacaucgggacgcggaaccccgccaacaacgccgcgaucgugcuccagcugccgcagggcaccacccugcccaagggguucuacgccgagggcucccgcgggggcucccaggccagcucccggagcuccagccgcucccggaacagcucccgcaacagcacccccggcagcucccgggggaucagccccgcccgcauggccggcaacgggggcgacgcggcccucgcccugcugcuccuggaccggcugaaccagcucgaguccaagaugagcgggaagggccagcagcagcagggccagacggugaccaagaaguccgccgccgaggcgagcaagaagccgcgccagaagcgcaccgccaccaaggccuacaacgucacgcaggccuucgggcggcgcggccccgagcagacccaggggaacuucggcgaccaggagcugauccggcaggggaccgacuacaagcacuggccccagaucgcccaguucgcgcccuccgccagcgccuucuucggcaugucccgcaucggcauggaggugaccccgagcgggacguggcugaccuacaccggcgccaucaagcucgacgacaaggaccccaacuucaaggaccaggugauccugcugaacaagcacaucgacgccuacaagaccuucccgcccacggagcccaagaaggacaagaagaagaaggcggacgagacccaggcccucccccagcggcagaagaagcagcagaccgucacccugcugcccgccgccgaccucgacgacuucuccaagcagcugcagcagagcauguccagcgcggacuccacgcaggccugaggacuaguuauaagacugacuagcccgaugggccucccaacgggcccuccuccccuccuugcaccgagauuaauaaaaaaaaaaaaaaaaaaaaaaaaaaaaaaaaaaaaaaaaaaaaaaaaaaaaaaaaaaaaaaaaugcaucccccccccccccccccccccccccccccccaaaggcucuuuucagagccaccagaauu

SEQ ID NO: 20954 - RNA, 1477 nt, Artificial Sequence
  SARS-CoV-2__MT913111.1__nucleocapsid protein (N) mRNA gc
aggagaaagcuuaccaugagcgacaacggcccccagaaccagcgcaacgccccgcggaucaccuucgggggccccuccgacagcaccggguccaaccagaacggcgagcgcagcggggcccgguccaagcagcgccggccccagggccugcccaacaacacggcgagcugguucaccgcccucacccagcacggcaaggaggaccugaaguucccgcgcgggcagggcgugcccaucaacaccaacuccagccccgacgaccagaucggguacuaccggcgcgccacgcggcgcauccggggcggggacggcaagaugaaggaccugagcccccgcugguacuucuacuaccucggcaccgggccggaggccggccugcccuacggggccaacaaggacggcaucaucugggucgcgaccgagggcgcccugaacacccccaaggaccacaucgggacgcggaaccccgccaacaacgccgcgaucgugcuccagcugccgcagggcaccacccugcccaagggguucuacgccgagggcagccgcgggggcucccaggccagcucccggagcucccuccgcagccggaacuccagccgcaacuccacccccggcagcagccgggggacgucccccgcccgcauggccggcaacgggggcgacgcggcccuggcccugcuccugcuggaccggcucaaccagcuggagagcaagauguccgggaagggccagcagcagcagggccagaccgugaccaagaaguccgccgccgaggcguccaagaagccgcgccagaagcgcaccgccacgaaggccuacaacgucacccaggccuucgggcggcgcggccccgagcagacccaggggaacuucggcgaccaggagcugauccggcaggggaccgacuacaagcacuggccccagaucgcccaguucgcgcccagcgccuccgccuucuucggcaugagccgcaucggcauggaggugacgccguccgggaccuggcucaccuacaccggcgccaucaagcuggacgacaaggaccccaacuucaaggaccaggugauccugcucaacaagcacaucgacgccuacaagacguucccgcccaccgagcccaagaaggacaagaagaagaaggcggacgagacccaggcccugccccagcggcagaagaagcagcagaccgucacgcugcuccccgccgccgaccuggacgacuucagcaagcagcugcagcaguccaugagcuccgcggacagcacccaggccugaggacuaguuauaagacugacuagcccgaugggccucccaacgggcccuccuccccuccuugcaccgagauuaauaaaaaaaaaaaaaaaaaaaaaaaaaaaaaaaaaaaaaaaaaaaaaaaaaaaaaaaaaaaaaaaaugcaucccccccccccccccccccccccccccccccaaaggcucuuuucagagccaccagaauu

SEQ ID NO: 20955 - RNA, 1477 nt, Artificial Sequence
  SARS-CoV-2__MT913112.1__nucleocapsid protein (N) mRNA gc
aggagaaagcuuaccaugagcgacaacggcccccagaaccagcgcaacgccccgcggaucaccuucgggggccccuccgacagcaccggguccaaccagaacggcgagcgcagcggggcccgguccaagcagcgccggccccagggccugcccaacaacacggcgagcugguucaccgcccucacccagcacggcaaggaggaccugaaguucccgcgcgggcagggcgugcccaucaacaccaacuccagccccgacgaccagaucggguacuaccggcgcgccacgcggcgcauccggggcggggacggcaagaugaaggaccugagcccccgcugguacuucuacuaccucggcaccgggccggaggccggccugcccuacggggccaacaaggacggcaucaucugggucgcgaccgagggcgcccugaacacccccaaggaccacaucgggacgcggaaccccgccaacaacgccgcgaucgugcuccagcugccgcagggcaccacccugcccaagggguucuacgccgagggcucccgcgggggcucccaggccagcucccggagcuccagccgcucccggaacagcucccgcaacagcacccccggcagcucccgggggacgagccccgcccgcauggccggcaacgggggcgacgcggcccucgcccugcugcuccuggaccggcugaaccagcucgaguccaagaugagcgggaagggccagcagcagcagggccagaccgugaccaagaaguccgccgccgaggcgagcaagaagccgcgccagaagcgcaccgccacgaaggccuacaacgucacccaggccuucgggcggcgcggccccgagcagacccaggggaacuucggcgaccaggagcugauccggcaggggaccgacuacaagcacuggccccagaucgcccaguucgcgcccuccgccagcgccuucuucggcaugucccgcaucggcauggaggugaucccgagcgggacguggcugaccuacaccggcgccaucaagcucgacgacaaggaccccaacuucaaggaccaggugauccugcugaacaagcacaucgacgccuacaagaccuucccgcccacggagcccaagaaggacaagaagaagaaggcggacgagacccaggcccucccccagcggcagaagaagcagcagaccgucacccugcugcccgccgccgaccucgacgacuucuccaagcagcugcagcagagcauguccagcgcggacuccacgcaggccugaggacuaguuauaagacugacuagcccgaugggccucccaacgggcccuccuccccuccuugcaccgagauuaauaaaaaaaaaaaaaaaaaaaaaaaaaaaaaaaaaaaaaaaaaaaaaaaaaaaaaaaaaaaaaaaaugcaucccccccccccccccccccccccccccccccaaaggcucuuuucagagccaccagaauu

SEQ ID NO: 20956 - RNA, 1477 nt, Artificial Sequence
  SARS-CoV-2__MT913116.1__nucleocapsid protein (N) mRNA gc
aggagaaagcuuaccaugagcgacaacggcccccagaaccagcgcaacgccccgcggaucaccuucgggggccccuccgacagcaccggguccaaccagaacggcgagcgcagcggggcccgguccaagcagcgccggccccagggccugcccaacaacacggcgagcugguucaccgcccucacccagcacggcaaggaggaccugaaguucccgcgcgggcagggcgugcccaucaacaccaacuccagccccgacgaccagaucggguacuaccggcgcgccacgcggcgcauccggggcggggacggcaagaugaaggaccugagcccccgcugguacuucuacuaccucggcaccgggccggaggccggccugcccuacggggccaacaaggacggcaucaucugggucgcgaccgagggcgcccugaacacccccaaggaccacaucgggacgcggaaccccgccaacaacgccgcgaucgugcuccagcugccgcagggcaccacccugcccaagggguucuacgccgagggcucccgcgggggcucccaggccagcucccggagcuccagccgcucccggaacagcucccgcaacagcacccccggcagcucccgggggacgagccccgcccgcauggccggcaacgggggcgacgcggcccucgcccugcugcuccuggaccggcugaaccagcucgaguccaagaugagcgggaagggccagcagcagcagggccagaccgugaccaagaagccggccgccgaggcguccaagaagccccgccagaagcgcaccgccacgaaggccuacaacgucacccaggccuucgggcggcgcggccccgagcagacccaggggaacuucggcgaccaggagcugauccggcaggggaccgacuacaagcacuggccccagaucgcccaguucgcgccgagcgccuccgccuucuucggcaugagccgcaucggcauggaggugacgcccuccgggaccuggcugaccuacaccggcgccaucaagcucgacgacaaggaccccaacuucaaggaccaggugauccugcugaacaagcacaucgacgccuacaagacguucccgcccaccgagcccaagaaggacaagaagaagaaggcggacgagacccaggcccucccccagcggcagaagaagcagcagaccgucacgcugcugcccgccgccgaccucgacgacuucagcaagcagcugcagcaguccaugagcuccgcggacagcacccaggccugaggacuaguuauaagacugacuagcccgaugggccucccaacgggcccuccuccccuccuugcaccgagauuaauaaaaaaaaaaaaaaaaaaaaaaaaaaaaaaaaaaaaaaaaaaaaaaaaaaaaaaaaaaaaaaaaugcaucccccccccccccccccccccccccccccccaaaggcucuuuucagagccaccagaauu

SEQ ID NO: 20957 - RNA, 1477 nt, Artificial Sequence
  SARS-CoV-2__MT913134.1__nucleocapsid protein (N) mRNA gc
aggagaaagcuuaccaugagcgacaacggcccccagaaccagcgcaacgccccgcggaucaccuucgggggccccuccgacagcaccggguccaaccagaacggcgagcgcagcggggcccgguccaagcagcgccggccccagggccugcccaacaacacggcgagcugguucaccgcccucacccagcacggcaaggaggaccugaaguucccgcgcgggcagggcgugcccaucaacaccaacuccagccccgacgaccagaucggguacuaccggcgcgccacgcggcgcauccggggcggggacggcaagaugaaggaccugagcccccgcugguacuucuacuaccucggcaccgggccggaggccggccugcccuacggggccaacaaggacggcaucaucugggucgcgaccgagggcgcccugaacacccccaaggaccacaucgggacgcggaaccccgccaacaacgccgcgaucgugcuccagcugccgcagggcaccacccugcccaagggguucuacgccgagggcagccgcgggggcucccaggccagcucccggagcuccagccgcucccggaacagcucccgcaacagcaccagcggcuccagccgggggacgucccccgcccgcauggccggcaacgggggcgacgcggcccucgcccugcugcuccuggaccggcugaaccagcucgagagcaagauguccgggaagggccagcagcagcagggccagaccgugaccaagaaguccgccgccgaggcguccaagaagccccgccagaagcgcaccgccacgaaggccuacaacgucacccaggccuucgggcggcgcggcccggagcagacccaggggaacuucggcgaccaggagcugauccggcaggggaccgacuacaagcacuggccccagaucgcccaguucgcgcccagcgccuccgccuucuucggcaugagccgcaucggcauggaggugacgcccuccgggaccuggcugaccuacaccggcgccaucaagcucgacgacaaggacccgaacuucaaggaccaggugauccugcugaacaagcacaucgacgccuacaagacguucccgcccaccgagcccaagaaggacaagaagaagaaggcggacgagacccaggcccucccccagcggcagaagaagcagcagaccgucacgcugcugcccgccgccgaccucgacgacuucagcaagcagcugcagcaguccaugagcuccgcggacagcacccaggccugaggacuaguuauaagacugacuagcccgaugggccucccaacgggcccuccuccccuccuugcaccgagauuaauaaaaaaaaaaaaaaaaaaaaaaaaaaaaaaaaaaaaaaaaaaaaaaaaaaaaaaaaaaaaaaaaugcaucccccccccccccccccccccccccccccccaaaggcucuuuucagagccaccagaauu

SEQ ID NO: 20958 - RNA, 1477 nt, Artificial Sequence
  SARS-CoV-2__MT913151.1__nucleocapsid protein (N) mRNA gc
aggagaaagcuuaccaugagcgacaacggcccccagaaccagcgcaacgccccgcggaucaccuucgggggccccuccgacagcaccggguccaaccagaacggcgagcgcagcggggcccgguccaagcagcgccggccccagggccugcccaacaacacggcgagcugguucaccgcccucacccagcacggcaaggaggaccugaaguucccgcgcgggcagggcgugcccaucaacaccaacuccagccccgacgaccagaucggguacuaccggcgcgccacgcggcgcauccggggcggggacggcaagaugaaggaccugagcccccgcugguacuucuacuaccucggcaccgggccggaggccggccugcccuacggggccaacaaggacggcaucaucugggucgcgaccgagggcgcccugaacacccccaaggaccacaucgggacgcggaaccccgccaacaacgccgcgaucgugcuccagcugccgcagggcaccacccugcccaagggguucuacgccgagggcagccgcgggggcucccaggccagcucccggagcuccagccgcucccggaacaucagccgcaacuccacccccggcagcagccgggggacgucccccgcccgcauggccggcaacgggggcgacgcggcccucgcccugcugcuccuggaccggcugaaccagcucgagagcaagauguccgggaagggccagcagcagcagggccagaccgugaccaagaaguccgccgccgaggcguccaagaagccgcgccagaagcgcaccgccacgaaggccuacaacgucacccaggccuucgggcggcgcggccccgagcagacccaggggaacuucggcgaccaggagcugauccggcaggggaccgacuacaagcacuggccccagaucgcccaguucgcgcccagcgccuccgccuucuucggcaugagccgcaucggcauggaggugacgccguccgggaccuggcugaccuacaccggcgccaucaagcucgacgacaaggaccccaacuucaaggaccaggugauccugcugaacaagcacaucgacgccuacaagacguucccgcccaccgagcccaagaaggacaagaagaagaaggcggacgagacccaggcccucccccagcggcagaagaagcagcagaccgucacgcugcugcccgccgccgaccucgacgacuucagcaagcagcugcagcaguccaugagcuccgcggacagcacccaggccugaggacuaguuauaagacugacuagcccgaugggccucccaacgggcccuccuccccuccuugcaccgagauuaauaaaaaaaaaaaaaaaaaaaaaaaaaaaaaaaaaaaaaaaaaaaaaaaaaaaaaaaaaaaaaaaaugcaucccccccccccccccccccccccccccccccaaaggcucuuuucagagccaccagaauu

SEQ ID NO: 20959 - RNA, 1477 nt, Artificial Sequence
  SARS-CoV-2__MT907515.1__nucleocapsid protein (N) mRNA gc
aggagaaagcuuaccaugagcgacaacggcccccagaaccagcgcaacgccccgcggaucaccuucgggggccccuccgacagcaccggguccaaccagaacggcgagcgcagcggggcccgguccaagcagcgccggccccagggccugcccaacaacacggcgagcugguucaccgcccucacccagcacggcaaggaggaccugaaguucccgcgcgggcagggcgugcccaucaacaccaacuccagccccgacgaccagaucggguacuaccggcgcgccacgcggcgcauccggggcggggacggcaagaugaaggaccugagcccccgcugguacuucuacuaccucggcaccgggccggaggccggccugcccuacggggccaacaaggacggcaucaucugggucgcgaccgagggcgcccugaacacccccaaggaccacaucgggacgcggaaccccgccaacaacgccgcgaucgugcuccagcugccgcagggcaccacccugcccaagggguucuacgccgagggcagccgcgggggcucccaggccagcucccggagcuccagccgcucccggaacagcucccgcaaccucacccccggcagcagccgggggacgucccccgcccgcauggccggcaacgggggcgacgcggcccuggcccugcuccugcuggaccggcucaaccagcuggagagcaagauguccgggaagggccagcagcagcagggccagaccgugaccaagaaguccgccgccgaggcguccaagaagccgcgccagaagcgcaccgccacgaaggccuacaacgucacccaggccuucgggcggcgcggccccgagcagacccaggggaacuucggcgaccaggagcugauccggcaggggaccgacuacaagcacuggccccagaucgcccaguucgcgcccagcgccuccgccuucuucggcaugagccgcaucggcauggaggugacgccguccgggaccuggcucaccuacaccggcgccaucaagcuggacgacaaggaccccaacuucaaggaccaggugauccugcucaacaagcacaucgacgccuacaagacguucccgcccaccgagcccaagaaggacaagaagaagaaggcggacgagacccaggcccugccccagcggcagaagaagcagcagaccgucacgcugcuccccgccgccgaccuggacgacuucagcaagcagcugcagcaguccaugagcuccgcggacagcacccaggccugaggacuaguuauaagacugacuagcccgaugggccucccaacgggcccuccuccccuccuugcaccgagauuaauaaaaaaaaaaaaaaaaaaaaaaaaaaaaaaaaaaaaaaaaaaaaaaaaaaaaaaaaaaaaaaaaugcaucccccccccccccccccccccccccccccccaaaggcucuuuucagagccaccagaauu

SEQ ID NO: 20960 - RNA, 1477 nt, Artificial Sequence
  SARS-CoV-2__MT907519.1__nucleocapsid protein (N) mRNA gc
aggagaaagcuuaccaugagcgacaacggcccccagaaccagcgcaacgccccgcggaucaccuucgggggccccuccgacagcaccggguccaaccagaacggcgagcgcagcggggcccgguccaagcagcgccggccccagggccugcccaacaacacggcgagcugguucaccgcccucacccagcacggcaaggaggaccugaaguucccgcgcgggcagggcgugcccaucaacaccaacuccagccccgacgaccagaucggguacuaccggcgcgccacgcggcgcauccggggcggggacggcaagaugaaggaccugagcccccgcugguacuucuacuaccucggcaccgggccggaggccggccugcccuacggggccaacaaggacggcaucaucugggucgcgaccgagggcgcccugaacacccccaaggaccacaucgggacgcggaaccccgccaacaacgccgcgaucgugcuccagcugccgcagggcaccacccugcccaagggguucuacgccgagggcucccgcgggggcucccaggccagcucccggagcuccagccgcucccggaacagcucccgcaacagcacccccggcagcucccgggggacgagccccgcccgcauggccggcaacgggggcgacgcggcccucgcccugcugcuccuggaccggcugaaccagcucgaguccaagaugagcgggaagggccagcagcagcagggccagaccgugaccaagaaguccgccgccgaggcgagcaagaagccgcgccagaagcgcaccgccacgaaggccuacaacgucacccaggccuucgggcggcgcggccccgagcagacccaggggaacuucggcgaccaggagcugauccggcaggggaccgacuacaagcacuggccccagaucgcccaguucgcgcccuccgccagcuccuucuucggcaugagccgcaucggcauggaggugacgccguccgggaccuggcugaccuacaccggcgccaucaagcucgacgacaaggaccccaacuucaaggaccaggugauccugcugaacaagcacaucgacgccuacaagacguucccgcccaccgagcccaagaaggacaagaagaagaaggccgacgagacccaggcgcucccccagcggcagaagaagcagcagaccgucacgcugcugcccgccgccgaccucgacgacuucagcaagcagcugcagcaguccaugagcuccgccgacagcacccaggcgugaggacuaguuauaagacugacuagcccgaugggccucccaacgggcccuccuccccuccuugcaccgagauuaauaaaaaaaaaaaaaaaaaaaaaaaaaaaaaaaaaaaaaaaaaaaaaaaaaaaaaaaaaaaaaaaaugcaucccccccccccccccccccccccccccccccaaaggcucuuuucagagccaccagaauu

SEQ ID NO: 20961 - RNA, 1477 nt, Artificial Sequence
  SARS-CoV-2__MT911799.1__nucleocapsid protein (N) mRNA gc
aggagaaagcuuaccaugagcgacaacggcccccagaaccagcgcaacgccccgcggaucaccuucgggggccccuccgacagcaccggguccaaccagaacggcgagcgcagcggggcccgguccaagcagcgccggccccagggccugcccaacaacacggcgagcugguucaccgcccucacccagcacggcaaggaggaccugaaguucccgcgcgggcagggcgugcccaucaacaccaacuccagccccgacgaccagaucggguacuaccggcgcgccacgcggcgcauccggggcggggacggcaagaugaaggaccugagcccccgcugguacuucuacuaccucggcaccgggccggaggccggccugcccuacggggccaacaaggacggcaucaucugggucgcgaccgagggcgcccugaacacccccaaggaccacaucgggacgcggaaccccgccaacaacgccgcgaucgugcuccagcugccgcagggcaccacccugcccaagggguucuacgccgagggcucccgcgggggcucccaggccagcucccggagcuccagccgcucccggaacagcucccgcaacagcacccccggcagcucccgggggacgagccccgcccgcauggccggcaacgggggcgacgcggcccucgcccugcugcuccuggaccggcugaaccagcucgaguccaagaugagcgggaagugccagcagcagcagggccagaccgugaccaagaaguccgccgccgaggcgagcaagaagccgcgccagaagcgcaccgccacgaaggccuacaacgucacccaggccuucggccggcgcgggcccgagcagacccagggcaacuucggggaccaggagcugauccggcagggcaccgacuacaagcacuggccccagaucgcccaguucgcgcccuccgccagcgccuucuucgggaugucccgcaucggcauggaggugacgccgagcggcaccuggcugaccuacaccggggccaucaagcucgacgacaaggaccccaacuucaaggaccaggugauccugcugaacaagcacaucgacgccuacaagacguucccgcccaccgagcccaagaaggacaagaagaagaaggcggacgagacccaggcccucccccagcggcagaagaagcagcagaccgucacgcugcugcccgccgccgaccucgacgacuucuccaagcagcugcagcagagcauguccagcgcggacuccacccaggccugaggacuaguuauaagacugacuagcccgaugggccucccaacgggcccuccuccccuccuugcaccgagauuaauaaaaaaaaaaaaaaaaaaaaaaaaaaaaaaaaaaaaaaaaaaaaaaaaaaaaaaaaaaaaaaaaugcaucccccccccccccccccccccccccccccccaaaggcucuuuucagagccaccagaauu

SEQ ID NO: 20962 - RNA, 1477 nt, Artificial Sequence
  SARS-CoV-2__MT911819.1__nucleocapsid protein (N) mRNA gc
aggagaaagcuuaccaugagcgacaacggcccccagaaccagcgcaacgccccgcggaucaccuucgggggccccuccgacagcaccggguccaaccaguacggcgagcgcagcggggcccgguccaagcagcgccggccccagggccugcccaacaacacggcgagcugguucaccgcccucacccagcacggcaaggaggaccugaaguucccgcgcgggcagggcgugcccaucaacaccaacuccagccccgacgaccagaucggguacuaccggcgcgccacgcggcgcauccggggcggggacggcaagaugaaggaccugagcccccgcugguacuucuacuaccucggcaccgggccggaggccggccugcccuacggggccaacaaggacggcaucaucugggucgcgaccgagggcgcccugaacacccccaaggaccacaucgggacgcggaaccccgccaacaacgccgcgaucgugcuccagcugccgcagggcaccacccugcccaagggguucuacgccgagggcagccgcgggggcucccaggccuacagccgguccagcucccgcagccggaacuccagccgcaacuccacccccggcagcagccgggggacgucccccgcccgcauggccggcaacgggggcgacgcggcccucgcccugcugcuccuggaccggcugaaccagcucgagagcaagauguccgggaagggccagcagcagcagggccagaccgugaccaagaaguccgccgccgaggcguccaagaagccgcgccagaagcgcaccgccacgaaggccuacaacgucacccaggccuucgggcggcgcggccccgagcagacccaggggaacuucggcgaccaggagcugauccggcaggggaccgacuacaagcacuggccccagaucgcccaguucgcgcccagcgccuccgccuucuucggcaugagccgcaucggcauggaggugacgccguccgggaccuggcugaccuacaccggcgccaucaagcucgacgacaaggaccccaacuucaaggaccaggugauccugcugaacaagcacaucgacgccuacaagacguucccgcccaccgagcccaagaaggacaagaagaagaaggcggacgagacccaggcccucccccagcggcagaagaagcagcagaccgucacgcugcugcccgccgccgaccucgacgacuucagcaagcagcugcagcaguccaugagcuccgcggacagcacccaggccugaggacuaguuauaagacugacuagcccgaugggccucccaacgggcccuccuccccuccuugcaccgagauuaauaaaaaaaaaaaaaaaaaaaaaaaaaaaaaaaaaaaaaaaaaaaaaaaaaaaaaaaaaaaaaaaaugcaucccccccccccccccccccccccccccccccaaaggcucuuuucagagccaccagaauu

SEQ ID NO: 20963 - RNA, 1477 nt, Artificial Sequence
  SARS-CoV-2__MT911820.1__nucleocapsid protein (N) mRNA gc
aggagaaagcuuaccaugagcgacaacggcccccagaaccagcgcaacgccccgcggaucaccuucgggggccccuccgacagcaccggguccaaccagaacggcgagcgcagcggggcccgguccaagcagcgccggccccagggccugcccaacaacacggcgagcugguucaccgcccucacccagcacggcaaggaggaccugaaguucccgcgcgggcagggcgugcccaucaacaccaacuccagccccgacgaccagaucggguacuaccggcgcgccacgcggcgcauccggggcggggacggcaagaugaaggaccugagcccccgcugguacuucuacuaccucggcaccgggccggaggccggccugcccuacggggccaacaaggacggcaucaucugggucgcgaccgagggcgcccugaacacccccaaggaccacaucgggacgcggaaccccgccaacaacgccgcgaucgugcuccagcugccgcagggcaccacccugcccaagggguucuacgccgagggcucccgcgggggcucccaggccagcucccggagcuccagccgcucccggaacagcucccgcaacagcacccccggcagcucccgggggacgagccccgcccgcauggccggcaacgggggcgacgcggcccucgcccugcugcuccuggaccggcugaaccagcucgaguccaagaugagcgggaagggccagcagcagcagggccagaccgugaccaagaaguccgccgccgaggcgagcaagaagccgcgccagaagcgcaccgccacgaaggccuacaacgucacccaggccuucgggcggcgcggccccgagcagacccaggggaacuucggcgaccaggagcugauccggcaggggaccgacuacaagcacuggccccagaucgcccaguucucccccagcgcguccgccuucuucggcaugagccgcaucggcauggaggugacgccguccgggaccuggcugaccuacaccggcgccaucaagcucgacgacaaggaccccaacuucaaggaccaggugauccugcugaacaagcacaucgacgccuacaagacguucccgcccaccgagcccaagaaggacaagaagaagaaggccgacgagacccaggcgcucccccagcggcagaagaagcagcagaccgucacgcugcugcccgccgccgaccucgacgacuucagcaagcagcugcagcaguccaugagcuccgccgacagcacccaggcgugaggacuaguuauaagacugacuagcccgaugggccucccaacgggcccuccuccccuccuugcaccgagauuaauaaaaaaaaaaaaaaaaaaaaaaaaaaaaaaaaaaaaaaaaaaaaaaaaaaaaaaaaaaaaaaaaugcaucccccccccccccccccccccccccccccccaaaggcucuuuucagagccaccagaauu

SEQ ID NO: 20964 - RNA, 1477 nt, Artificial Sequence
  SARS-CoV-2__MT911827.1__nucleocapsid protein (N) mRNA gc
aggagaaagcuuaccaugagcgacaacggcccccagaaccagcgcaacgccccgcggaucaccuucgggggccccuccgacagcaccggguccaaccagaacggcgagcgcagcggggcccgguccaagcagcgccggccccagggccugcccaacaacacggcgagcugguucaccgcccucacccagcacggcaaggaggaccugaaguucccgcgcgggcagggcgugcccaucaacaccaacuccagccccgacgaccagaucggguacuaccggcgcgccacgcggcgcauccggggcggggacggcaagaugaaggaccugagcccccgcugguacuucuacuaccucggcaccgggccggaggccggccugcccuacggggccaacaaggacggcaucaucugggucgcgaccgagggcgcccugaacacccccaaggaccacaucgggacgcggaaccccgccaacaacgccgcgaucgugcuccagcugccgcagggcaccacccugcccaagggguucuacgccgagggcagccgcgggggcucccaggccuacagccgguccagcucccgcagccggaacuccagccgcaacuccacccccggcagcagccgggggacgucccccgcccgcauggccggcaacgggggcgacgcggcccucgcccugcugcuccuggaccggcugaaccagcucgagagcaagauguccgggaagggccagcagcagcagggccagaccgugaccaagaaguccgccgccgaggcguccaagaagccgcgccagaagcgcaccgccacgaaggccuacaacgucacccaggccuucgggcggcgcggccccgagcagacccaggggaacuucggcgaccaggagcugauccggcaggggaccgacuacaagcacuggccccagaucgcccaguucgcgcccagcgccuccgccuucuucggcaugagccgcaucggcauggaggugacgccguccgggaccuggcugaccuacaccggcgccaucaagcucgacgacaaggaccccaacuucaaggaccaggugauccugcugaacaagcacaucgacagcuacaagacguucccgcccaccgagcccaagaaggacaagaagaagaaggccgacgagacccaggcgcucccccagcggcagaagaagcagcagaccgucacgcugcugcccgccgccgaccucgacgacuucuccaagcagcugcagcagagcauguccagcgccgacuccacccaggcgugaggacuaguuauaagacugacuagcccgaugggccucccaacgggcccuccuccccuccuugcaccgagauuaauaaaaaaaaaaaaaaaaaaaaaaaaaaaaaaaaaaaaaaaaaaaaaaaaaaaaaaaaaaaaaaaaugcaucccccccccccccccccccccccccccccccaaaggcucuuuucagagccaccagaauu

SEQ ID NO: 20965 - RNA, 1477 nt, Artificial Sequence
  SARS-CoV-2__MT893671.1__nucleocapsid protein (N) mRNA gc
aggagaaagcuuaccaugagcgacaacggcccccagaaccagcgcaacgccccgcggaucaccuucgggggccccuccgacagcaccggguccaaccagaacggcgagcgcagcggggcccgguccaagcagcgccggccccagggccugcccaacaacacggcgagcugguucaccgcccucacccagcacggcaaggaggaccugaaguucccgcgcgggcagggcgugcccaucaacaccaacuccagccccgacgaccagaucggguacuaccggcgcgccacgcggcgcauccggggcggggacggcaagaugaaggaccugagcccccgcugguacuucuacuaccucggcaccgggccggaggccggccugcccuacggggccaacaaggacggcaucaucugggucgcgaccgagggcgcccugaacacccccaaggaccacaucgggacgcggaaccccgccaacaacgccgcgaucgugcuccagcugccgcagggcaccacccugcccaagggguucuacgccgagggcucccgcgggggcucccaggccagcucccggagcuccagccgcucccggaacagcucccgcaacagcacccccggcagcucccgggggacgagccccgcccgcauggccggcaacgggggcgacgcggcccucgcccugcugcuccuggaccggcugaaccagcucgaguccaagaugagcgggaagggccagcagcagcagggccagaccgugaacaagaaguccgccgccgaggcgagcaagaagccgcgccagaagcgcaccgccaccaaggccuacaacgucacgcaggccuucgggcggcgcggccccgagcagacccaggggaacuucggcgaccaggagcugauccggcaggggaccgacuacaagcacuggccccagaucgcccaguucgcgcccuccgccagcgccuucuucggcaugucccgcaucggcauggaggugaccccgagcgggacguggcugaccuacaccggcgccaucaagcucgacgacaaggaccccaacuucaaggaccaggugauccugcugaacaagcacaucgacgccuacaagaccuucccgcccacggagcccaagaaggacaagaagaagaaggcggacgagacccaggcccucccccagcggcagaagaagcagcagaccgucacccugcugcccgccgccgaccucgacgacuucuccaagcagcugcagcagagcauguccagcgcggacuccacgcaggccugaggacuaguuauaagacugacuagcccgaugggccucccaacgggcccuccuccccuccuugcaccgagauuaauaaaaaaaaaaaaaaaaaaaaaaaaaaaaaaaaaaaaaaaaaaaaaaaaaaaaaaaaaaaaaaaaugcaucccccccccccccccccccccccccccccccaaaggcucuuuucagagccaccagaauu

SEQ ID NO: 20966 - RNA, 1477 nt, Artificial Sequence
  SARS-CoV-2__MT893675.1__nucleocapsid protein (N) mRNA gc
aggagaaagcuuaccaugagcgacaacggcccccagaaccagcgcaacgccccgcggaucaccuucgggggccccuccgacagcaccggguccaaccagaacggcgagcgcagcggggcccgguccaagcagcgccggccccagggccugcccaacaacacggcgagcugguucaccgcccucacccagcacggcaaggaggaccugaaguucccgcgcgggcagggcgugcccaucaacaccaacuccagccccgacgaccagaucggguacuaccggcgcgccacgcggcgcauccggggcggggacggcaagaugaaggaccugagcccccgcugguacuucuacuaccucggcaccgggccggaggccggccugcccuacggggccaacaaggacggcaucaucugggucgcgaccgagggcgcccugaacacccccaaggaccacaucgggacgcggaaccccgccaacaacgccgcgaucgugcuccagcugccgcagggcaccacccugcccaagggguucuacgccgagggcucccgcgggggcucccaggccagcucccggagcuccagccgcucccggaacagcucccgcaacagcacccccggcagcuccaagcggacgagccccgcccgcauggccgggaacggcggggacgcggcccucgcccugcugcuccuggaccggcugaaccagcucgaguccaagaugagcggcaaggggcagcagcagcagggccagaccgugaccaagaaguccgccgccgaggcgagcaagaagccgcgccagaagcgcaccgccacgaaggccuacaacgucacccaggccuucggccggcgcgggcccgagcagacccagggcaacuucggggaccaggagcugacccggcagggcacggacuacaagcacuggccccagaucgcccaguucgcgcccuccgccagcgccuucuucgggaugucccgcaucggcauggaggugaccccgagcggcaccuggcugaccuacacgggggccaucaagcucgacgacaaggaccccaacuucaaggaccaggugauccugcugaacaagcacaucgacgccuacaagaccuucccgcccaccgagcccaagaaggacaagaagaagaaggcggacgagacccaggcccucccccagcggcagaagaagcagcagacggucacccugcugcccgccgccgaccucgacgacuucuccaagcagcugcagcagagcauguccagcgcggacuccacccaggccugaggacuaguuauaagacugacuagcccgaugggccucccaacgggcccuccuccccuccuugcaccgagauuaauaaaaaaaaaaaaaaaaaaaaaaaaaaaaaaaaaaaaaaaaaaaaaaaaaaaaaaaaaaaaaaaaugcaucccccccccccccccccccccccccccccccaaaggcucuuuucagagccaccagaauu

SEQ ID NO: 20967 - RNA, 1477 nt, Artificial Sequence
  SARS-CoV-2__MT893681.1__nucleocapsid protein (N) mRNA gc
aggagaaagcuuaccaugagcgacaacggcccccagaaccagcgcaacgccccgcggaucaccuucgggggccccuccgacagcaccggguccaaccagaacggcgagcgcagcggggcccgguccaagcagcgccggccccagggccugcccaacaacacggcgagcugguucaccgcccucacccagcacggcaaggaggaccugaaguucccgcgcgggcagggcgugcccaucaacaccaacuccagccccgacgaccagaucggguacuaccggcgcgccacgcggcgcauccggggcggggacggcaagaugaaggaccugagcccccgcugguacuucuacuaccucggcaccgggccggaggccggccugcccuacggggccaacaaggacggcaucaucugggucgcgaccgagggcgcccugaacacccccaaggaccacaucgggacgcggaaccccgccaacaacgccgcgaucgugcuccagcugccgcagggcaccauccugcccaagggguucuacgccgagggcucccgcgggggcucccaggccagcucccggagcuccagccgcucccggaacagcucccgcaacagcacccccggcagcucccgggggaucagccccgcccgcauggccggcaacgggggcgacgcggcccucgcccugcugcuccuggaccggcugaaccagcucgaguccaagaugagcgggaagggccagcagcagcagggccagaccgugacgaagaaguccgccgccgaggcgagcaagaagccgcgccagaagcgcaccgccaccaaggccuacaacgucacccaggccuucgggcggcgcggccccgagcagacgcaggggaacuucggcgaccaggagcugauccggcaggggaccgacuacaagcacuggccccagaucgcccaguucgcgcccuccgccagcgccuucuucggcaugucccgcaucggcauggaggugaccccgagcgggaccuggcugacguacaccggcgccaucaagcucgacgacaaggaccccaacuucaaggaccaggugauccugcugaacaagcacaucgacgccuacaagaccuucccgcccaccgagcccaagaaggacaagaagaagaaggcggacgagacgcaggcccucccccagcggcagaagaagcagcagaccgucacccugcugcccgccgccgaccucgacgacuucuccaagcagcugcagcagagcauguccagcgcggacuccacccaggccugaggacuaguuauaagacugacuagcccgaugggccucccaacgggcccuccuccccuccuugcaccgagauuaauaaaaaaaaaaaaaaaaaaaaaaaaaaaaaaaaaaaaaaaaaaaaaaaaaaaaaaaaaaaaaaaaugcaucccccccccccccccccccccccccccccccaaaggcucuuuucagagccaccagaauu

SEQ ID NO: 20968 - RNA, 1477 nt, Artificial Sequence
  SARS-CoV-2__MT893685.1__nucleocapsid protein (N) mRNA gc
aggagaaagcuuaccaugagcgacaacggcccccagaaccagcgcaacgccccgcggaucaccuucgggggccccuccgacagcaccggguccaaccagaacggcgagcgcagcggggcccgguccaagcagcgccggccccgcggccugcccaacaacacggcgagcugguucaccgcccucacccagcacggcaaggaggaccugaaguucccgcgggggcagggcgugcccaucaacaccaacuccagccccgacgaccagaucggguacuaccgccgggccacgcgccggauccgcggcggggacggcaagaugaaggaccugagcccccggugguacuucuacuaccucggcaccgggccggaggccggccugcccuacggggccaacaaggacggcaucaucugggucgcgaccgagggcgcccugaacacccccaaggaccacaucgggacgcgcaaccccgccaacaacgccgcgaucgugcuccagcugccgcagggcaccacccugcccaagggguucuacgccgagggcagccgcgggggcucccaggccuacagccgguccagcucccggagccgcaacuccagccggaacuccacccccggcagcagccgcgggacgucccccgcccggauggccggcaacgggggcgacgcggcccucgcccugcugcuccuggaccgccugaaccagcucgagagcaagauguccgggaagggccagcagcagcagggccagaccgugaccaagaaguccgccgccgaggcguccaagaagccgcgccagaagcggaccgccacgaaggccuacaacgucacccaggccuucgggcgccggggccccgagcagacccaggggaacuucggcgaccaggagcugauccgccaggggaccgacuacaagcacuggccccagaucgcccaguucgcgcccagcgccuccgccuucuucggcaugagccggaucggcauggaggugacgccguccgggaccuggcugaccuacaccggcgccaucaagcucgacgacaaggaccccaacuucaaggaccaggugauccugcugaacaagcacaucgacgccuacaagacguucccgcccaccgagcccaagaaggacaagaagaagaaggcggacgagacccaggcccucccccagcgccagaagaagcagcagaccgucacgcugcugcccgccgccgaccucgacgacuucagcaagcagcugcagcaguccaugagcuccgcggacagcacccaggccugaggacuaguuauaagacugacuagcccgaugggccucccaacgggcccuccuccccuccuugcaccgagauuaauaaaaaaaaaaaaaaaaaaaaaaaaaaaaaaaaaaaaaaaaaaaaaaaaaaaaaaaaaaaaaaaaugcaucccccccccccccccccccccccccccccccaaaggcucuuuucagagccaccagaauu

SEQ ID NO: 20969 - RNA, 1477 nt, Artificial Sequence
  SARS-CoV-2__MT890230.1__nucleocapsid protein (N) mRNA gc
aggagaaagcuuaccaugagcgacaacggcccccagaaccagcgcaacgccccgcggaucaccuucgggggccccuccgacagcaccggguccaaccagaacggcgagcgcagcggggcccgguccaagcagcgccggccccagggccugcccaacaacacggcgagcugguucaccgcccucacccagcacggcaaggaggaccugaaguucccgcgcgggcagggcgugcccaucaacaccaacuccagccccgacgaccagaucggguacuaccggcgcgccacgcggcgcauccggggcggggacggcaagaugaaggaccugagcccccgcugguacuucuacuaccucggcaccgggccggaggccggccugcccuacggggccaacaaggacggcaucaucugggucgcgaccgagggcgcccugaacacccccaaggaccacaucgggacgcggaaccccgccaacaacgccgcgaucgugcuccagcugccgcagggcaccacccugcccaagggguucuacgccgagggcagccgcgggggcucccaggccagcucccggagcuccagccgcucccggaacagcucccgcaacagcacccccggcagcaaccgggggacgucccccgcccgcauggccggcaacgggggcgacgcggcccucgcccugcugcuccuggaccggcugaaccagcucgagagcaagauguccgggaagggccagcagcagcagggccagaccgugaccaagaaguccgccgccgaggcguccaagaagccgcgccagaagcgcaccgccacgaaggccuacaacgucacccaggccuucgggcggcgcggccccgagcagacccaggggaacuucggcgaccaggagcugauccggcaggggaccgacuacaagcacuggccccagaucgcccaguucgcgcccagcgccuccgccuucuucggcaugagccgcaucggcauggaggugacgccguccgggaccuggcugaccuacaccggcgccaucaagcucgacgacaaggaccccaacuucaaggaccaggugauccugcugaacaagcacaucgacgccuacaagacguucccgcccaccgagcccaagaaggacaagaagaagaaggcggacgagacccaggcccucccccagcggcagaagaagcagcagaccgucacgcugcugcccgccgccgaccucgacgacuucagcaagcagcugcagcaguccaugagcuccgcggacagcacccaggccugaggacuaguuauaagacugacuagcccgaugggccucccaacgggcccuccuccccuccuugcaccgagauuaauaaaaaaaaaaaaaaaaaaaaaaaaaaaaaaaaaaaaaaaaaaaaaaaaaaaaaaaaaaaaaaaaugcaucccccccccccccccccccccccccccccccaaaggcucuuuucagagccaccagaauu

SEQ ID NO: 20970 - RNA, 1477 nt, Artificial Sequence
  SARS-CoV-2__MT890236.1__nucleocapsid protein (N) mRNA gc
aggagaaagcuuaccaugagcgacaacggcccccagaaccagcgcaacgccccgcggaucaccuucgggggccccuccgacagcaccggguccaaccagaacggcgagcgcagcggggcccgguccaagcagcgccggccccagggccugcccaacaacacggcgagcugguucaccgcccucacccagcacggcaaggaggaccugaaguucccgcgcgggcagggcgugcccaucaacaccaacuccagccccgacgaccagaucggguacuaccggcgcgccacgcggcgcauccggggcggggacggcaagaugaaggaccugagcccccgcugguacuucuacuaccucggcaccgggccggaggccggccugcccuacggggccaacaaggacggcaucaucugggucgcgaccgagggcgcccugaacacccccaaggaccacaucgggacgcggaaccccgccaacaacgccgcgaucgugcuccagcugccgcagggcaccacccugcccaagggguucuacgccgagggcagccgcgggggcucccaggccagcucccggagcuccagccgcucccggaacagcucccgcaacagcacccccggcagcucccgggggaucagccccgcccgcauggccggcaacgggggcgacgcggcccucgcccugcugcuccuggaccggcugaaccagcucgagacgaagauguccgggaagggccagcagcagcagggccagaccgugaccaagaaguccgccgccgaggcguccaagaagccgcgccagaagcgcaccgccacgaaggccuacaacgucacccaggccuucgggcggcgcggccccgagcagacccaggggaacuucggcgaccaggagcugauccggcaggggaccgacuacaagcacuggccccagaucgcccaguucgcgcccagcgccuccgccuucuucggcaugagccgcaucggcauggaggugacgccguccgggaccuggcugaccuacaccggcgccaucaagcucgacgacaaggaccccaacuucaaggaccaggugauccugcugaacaagcacaucgacgccuacaagacguucccgcccaccgagcccaagaaggacaagaagaagaaggcggacgagacccaggcccucccccagcggcagaagaagcagcagaccgucacgcugcugcccgccgccgaccucgacgacuucagcaagcagcugcagcaguccaugagcuccgcggacagcacccaggccugaggacuaguuauaagacugacuagcccgaugggccucccaacgggcccuccuccccuccuugcaccgagauuaauaaaaaaaaaaaaaaaaaaaaaaaaaaaaaaaaaaaaaaaaaaaaaaaaaaaaaaaaaaaaaaaaugcaucccccccccccccccccccccccccccccccaaaggcucuuuucagagccaccagaauu

SEQ ID NO: 20971 - RNA, 1477 nt, Artificial Sequence
  SARS-CoV-2__MT890238.1__nucleocapsid protein (N) mRNA gc
aggagaaagcuuaccaugagcgacaacggcccccagaaccagcgcaacgccccgcggaucaccuucgggggccccuccgacagcaccggguccaaccagaacggcgagcgcagcggggcccgguccaagcagcgccggccccagggccugcccaacaacacggcgagcugguucaccgcccucacccagcacggcaaggaggaccugaaguucccgcgcgggcagggcgugcccaucaacaccaacuccagccccgacgaccagaucggguacuaccggcgcgccacgcggcgcauccggggcggggacggcaagaugaaggaccugagcccccgcugguacuucuacuaccucggcaccgggccggaggccggccugcccuacggggccaacaaggacggcaucaucugggucgcgaccgagggcgcccugaacacccccaaggaccacaucgggacgcggaaccccgccaacaacgccgcgaucgugcuccagcugccgcagggcaccacccugcccaagggguucuacgccgagggcucccgcgggggcucccaggccagcucccggagcuccagccgcucccggaacagcucccgcaacagcacccccggcagcaaccgggggacgucccccgcccgcauggccggcaacgggggcgacgcggcccucgcccugcugcuccuggaccggcugaaccagcucgagcgcaagaugagcgggaagggccagcagcagcagggccagaccgugaccaagaaguccgccgccgaggcgagcaagaagccgcgccagaagcggaccgccacgaaggccuacaacgucacccaggccuucgggcgccggggccccgagcagacccaggggaacuucggcgaccaggagcugauccgccaggggaccgacuacaagcacuggccccagaucgcccaguucgcgcccuccgccagcgccuucuucggcaugucccggaucggcauggaggugacgccgagcgggaccuggcugaccuacaccggcgccaucaagcucgacgacaaggaccccaacuucaaggaccaggugauccugcugaacaagcacaucgacgccuacaagacguucccgcccaccgagcccaagaaggacaagaagaagaaggcggacgagacccaggcccucccccagcgccagaagaagcagcagaccgucacgcugcugcccgccgccgaccucgacgacuucuccaagcagcugcagcagagcauguccagcgcggacuccacccaggccugaggacuaguuauaagacugacuagcccgaugggccucccaacgggcccuccuccccuccuugcaccgagauuaauaaaaaaaaaaaaaaaaaaaaaaaaaaaaaaaaaaaaaaaaaaaaaaaaaaaaaaaaaaaaaaaaugcaucccccccccccccccccccccccccccccccaaaggcucuuuucagagccaccagaauu

SEQ ID NO: 20972 - RNA, 1477 nt, Artificial Sequence
  SARS-CoV-2__MT890293.1__nucleocapsid protein (N) mRNA gc
aggagaaagcuuaccaugagcgacaacggcccccagaaccagcgcaacgccccgcggaucaccuucgggggccccuccgacagcaccggguccaaccagaacggcgagcgcagcggggcccgguccaagcagcgccggccccagggccugcccaacaacacggcgagcugguucaccgcccucacccagcacggcaaggaggaccugaaguucccgcgcgggcagggcgugcccaucaacaccaacuccagccccgacgaccagaucggguacuaccggcgcgccacgcggcgcauccggggcggggacggcaagaugaaggaccugagcccccgcugguacuucuacuaccucggcaccgggccggaggccggccugcccuacggggccaacaaggacggcaucaucugggucgcgaccgagggcgcccugaacacccccaaggacuacaucgggacgcggaaccccgccaacaacgccgcgaucgugcuccagcugccgcagggcaccacccugcccaagggguucuacgccgagggcucccgcgggggcucccaggccagcucccggagcuccagccgcucccggaacagcucccgcaacagcacccccggcagcucccgggggacgagccccgcccgcauggccggcaacgggggcgacgcggcccucgcccugcugcuccuggaccggcugaaccagcucgaguccaagaugagcgggaagggccagcagcagcagggccagaccgugaccaagaaguccgccgccgaggcgagcaagaagccgcgccagaagcgcaccgccacgaaggccuacaacgucacccaggccuucgggcggcgcggccccgagcagacccaggggaacuucggcgaccaggagcugauccggcaggggaccgacuacaagcacuggccccagaucgcccaguucgcgcccuccgccagcgccuucuucggcaugucccgcaucggcauggaggugacgccgagcgggaccuggcugaccuacaccggcgccaucaagcucgacgacaaggaccccaacuucaaggaccaggugauccugcugaacaagcacaucgacgccuacaagacguucccgcccaccgagcccaagaaggacaagaagaagaaggcggacgagacccaggcccucccccagcggcagaagaagcagcagaccgucacgcugcugcccgccgccgaccucgacgacuucuccaagcagcugcagcagagcauguccagcgcggacuccacccaggccugaggacuaguuauaagacugacuagcccgaugggccucccaacgggcccuccuccccuccuugcaccgagauuaauaaaaaaaaaaaaaaaaaaaaaaaaaaaaaaaaaaaaaaaaaaaaaaaaaaaaaaaaaaaaaaaaugcaucccccccccccccccccccccccccccccccaaaggcucuuuucagagccaccagaauu

SEQ ID NO: 20973 - RNA, 1477 nt, Artificial Sequence
  SARS-CoV-2__MT890316.1__nucleocapsid protein (N) mRNA gc
aggagaaagcuuaccaugagcgacaacggcccccagaaccagcgcaacgccccgcggaucaccuucgggggccccuccgacagcaccggguccaaccagaacggcgagcgcagcggggcccgguccaagcagcgccggccccagggccugcccaacaacacggcgagcugguucaccgcccucacccagcacggcaaggaggaccugaaguucccgcgcgggcagggcgugcccaucaacaccaacuccagccccgacgaccagaucggguacuaccggcgcgccacgcggcgcauccggggcggggacggcaagaugaaggaccugagcccccgcugguacuucuacuaccucggcaccgggccggaggccggccugcccuacggggccaacaaggacggcaucaucugggucgcgaccgagggcgcccugaacacccccaaggaccacaucgggacgcggaaccccgccaacaacgccgcgaucgugcuccagcugccgcagggcaccacccugcccaagggguucuacgccgagggcucccgcgggggcucccaggccagcucccggagcuccagccgcucccggaacagcucccgcaacagcacccccggcagcucccgggggacgagccccgcccgcauggccggcaacgggggcgacgcggcccucgcccugcugcuccuggaccggcugaaccagcucgaguccaagaugagcgggaagggccagcagcagcagggccagaccgugaccaagaaguccgccgccgaggcgagcaagaagccgcgccagaagcgcaccgccacgaaggccuacaacgucacccaggccuucgggcggcgcggccccgagcagacccaggggaacuucggcgaccaggagcugauccggcaggggaccgacuacaagcacuggccccagaucgcccaguucgcgcccuccgccagcgccuucuucggcaugucccgcaucggcauggaggugacgccgagcgggaccuggcugaccuacaccggcgccaucaagcucgacgacaaggaccccaacuucaaggaccaggugauccugcugaacaagcacaucgacgccuacaagacguucccgcccaccgagcccaagaaggacaagaagaagaaggcggacgagacccaggcccucccccagcggcagaacaagcagcagaccgucacgcugcugcccgccgccgaccucgacgacuucuccaagcagcugcagcagagcauguccagcgcggacuccacccaggccugaggacuaguuauaagacugacuagcccgaugggccucccaacgggcccuccuccccuccuugcaccgagauuaauaaaaaaaaaaaaaaaaaaaaaaaaaaaaaaaaaaaaaaaaaaaaaaaaaaaaaaaaaaaaaaaaugcaucccccccccccccccccccccccccccccccaaaggcucuuuucagagccaccagaauu

SEQ ID NO: 20974 - RNA, 1477 nt, Artificial Sequence
  SARS-CoV-2__MT890320.1__nucleocapsid protein (N) mRNA gc
aggagaaagcuuaccaugagcgacaacggcccccagaaccagcgcaacgccccgcggaucaccuucgggggccccuccgacagcaccggguccaaccagaacggcgagcgcagcggggcccgguccaagcagcgccggccccagggccugcccaacaacacggcgagcugguucaccgcccucacccagcacggcaaggaggaccugaaguucccgcgcgggcagggcgugcccaucaacaccaacuccagccccgacgaccagaucggguacuaccggcgcgccacgcggcgcauccggggcggggacggcaagaugaaggaccugagcccccgcugguacuucuacuaccucggcaccgggccggaggccggccugcccuacggggccaacaaggacggcaucaucugggucgcgaccgagggcgcccugaacacccccaaggaccacaucgggacgcggaaccccgccaacaacgccgcgaucgugcuccagcugccgcagggcaccacccugcccaagggguucuacgccgagggcagccgcgggggcucccaggccagcucccggagcuccagccgcauccggaacuccagccgcaacuccacccccggcagcagccgggggacgucccccgcccgcauggccggcaacgggggcgacgcggcccucgcccugcugcuccuggaccggcugaaccagcucgagagcaagauguccgggaagggccagcagcagcagggccagaccgugaccaagaaguccgccgccgaggcguccaagaagccgcgccagaagcgcaccgccacgaaggccuacaacgucacccaggccuucgggcggcgcggccccgagcagacccaggggaacuucggcgaccaggagcugauccggcaggggaccgacuacaagcacuggccccagaucgcccaguucgcgcccagcgccuccgccuucuucggcaugagccgcaucggcauggaggugacgccguccgggaccuggcugaccuacaccggcgccaucaagcucgacgacaaggaccccaacuucaaggaccaggugauccugcugaacaagcacaucgacgccuacaagacguucccgcccaccgagcccaagaaggacaagaagaagaaggcggacgagacccaggcccucccccagcggcagaagaagcagcagaccgucacgcugcugcccgccgccgaccucgacgacuucagcaagcagcugcagcaguccaugagcuccgcggacagcacccaggccugaggacuaguuauaagacugacuagcccgaugggccucccaacgggcccuccuccccuccuugcaccgagauuaauaaaaaaaaaaaaaaaaaaaaaaaaaaaaaaaaaaaaaaaaaaaaaaaaaaaaaaaaaaaaaaaaugcaucccccccccccccccccccccccccccccccaaaggcucuuuucagagccaccagaauu

SEQ ID NO: 20975 - RNA, 1477 nt, Artificial Sequence
  SARS-CoV-2__MT890321.1__nucleocapsid protein (N) mRNA gc
aggagaaagcuuaccaugagcgacaacggcccccagaaccagcgcaacgccccgcggaucaccuucgggggccccuccgacagcaccggguccaaccagaacggcgagcgcagcggggcccgguccaagcagcgccggccccagggccugcccaacaacacggcgagcugguucaccgcccucacccagcacggcaaggaggaccugaaguucccgcgcgggcagggcgugcccaucaacaccaacuccagccccgacgaccagaucggguacuaccggcgcgccacgcggcgcauccggggcggggacggcaagaugaaggaccugagcccccgcugguacuucuacuaccucggcaccgggccggaggccggccugcccuacggggccaacaaggacggcaucaucugggucgcgaccgagggcgcccugaacacccccaaggaccacaucgggacgcggaaccccgccaacaacgccgcgaucgugcuccagcugccgcagggcaccacccugcccaagggguucuacgccgagggcucccgcgggggcucccaggccagcucccggagcuccagccgcucccggaacagcucccgcaacagcacccccggcagcuccgggggcacgagccccgcccggauggccgggaacggcggggacgcggcccucgcccugcugcuccuggaccgccugaaccagcucgaguccaagaugagcggcaagggccagcagcagcaggggcagaccgugaccaagaaguccgccgccgaggcgagcaagaagccgcggcagaagcgcaccgccacgaaggccuacaacgucacccaggccuucggccgccgggggcccgagcagacccagggcaacuucggggaccaggagcugauccgccagggcaccgacuacaagcacuggccccagaucgcccaguucgcgcccuccgccagcgccuucuucggcaugucccggaucgggauggaggugacgccgagcggcaccuggcugaccuacaccggggccaucaagcucgacgacaaggaccccaacuucaaggaccaggugauccugcugaacaagcacaucgacgccuacaagacguucccgcccaccgagcccaagaaggacaagaagaagaaggcggacgagacccaggcccucccccagcgccagaagaagcagcagaccgucacgcugcugcccgccgccgaccucgacgacuucuccaagcagcugcagcagagcauguccagcgcggacuccacccaggccugaggacuaguuauaagacugacuagcccgaugggccucccaacgggcccuccuccccuccuugcaccgagauuaauaaaaaaaaaaaaaaaaaaaaaaaaaaaaaaaaaaaaaaaaaaaaaaaaaaaaaaaaaaaaaaaaugcaucccccccccccccccccccccccccccccccaaaggcucuuuucagagccaccagaauu

SEQ ID NO: 20976 - RNA, 1477 nt, Artificial Sequence
  SARS-CoV-2__MT892973.1__nucleocapsid protein (N) mRNA gc
aggagaaagcuuaccaugagcgacaacggcccccagaaccagcgcaacgccccgcggaucaccuucgggggccccuccgacagcaccggguccaaccagaacggcgagcgcagcggggcccgguccaagcagcgccggccccagggccugcccaacaacacggcgagcugguucaccgcccucacccagcacggcaaggaggaccugaaguucccgcgcgggcagggcgugcccaucaacaccaacuccagccccgacgaccagaucggguacuaccggcgcgccacgcggcgcauccggggcggggacggcaagaugaaggaccugagcccccgcugguacuucuacuaccucggcaccgggccggaggccggccugcccuacggggccaacaaggacggcaucaucugggucgcgaccgagggcgcccugaacacccccaaggaccacaucgggacgcggaaccccgccaacaacgccgcgaucgugcuccagcugccgcagggcaccacccugcccaagggguucuacgccgagggcagccgcgggggcucccaggccagcucccggagcuccagccgcucccggaacagcucccgcaacagcacccccggcagcucccgggggacgagccccgcccgcauggccggcaacgggggcgacgcggcccucgcccugcugcuccuggaccggcugaaccagcucgaguccaagauguucgggaagggccagcagcagcagggccagaccgugaccaagaaguccgccgccgaggcguccaagaagccgcgccagaagcgcaccgccacgaaggccuacaacgucacccaggccuucgggcggcgcggccccgagcagacccaggggaacuucggcgaccaggagcugauccggcaggggaccgacuacaagcacuggccccagaucgcccaguucgcgcccagcgccuccgccuucuucggcaugagccgcaucggcauggaggugacgccguccgggaccuggcugaccuacaccggcgccaucaagcucgacgacaaggaccccaacuucaaggaccaggugauccugcugaacaagcacaucgacgccuacaagacguucccgcccaccgagcccaagaaggacaagaagaagaaggcggacgagacccaggcccucccccagcggcagaagaagcagcagaccgucacgcugcugcccgccgccgaccucgacgacuucagcaagcagcugcagcaguccaugagcuccgcggacagcacccaggccugaggacuaguuauaagacugacuagcccgaugggccucccaacgggcccuccuccccuccuugcaccgagauuaauaaaaaaaaaaaaaaaaaaaaaaaaaaaaaaaaaaaaaaaaaaaaaaaaaaaaaaaaaaaaaaaaugcaucccccccccccccccccccccccccccccccaaaggcucuuuucagagccaccagaauu

SEQ ID NO: 20977 - RNA, 1477 nt, Artificial Sequence
  SARS-CoV-2__MT892974.1__nucleocapsid protein (N) mRNA gc
aggagaaagcuuaccaugagcgacaacggcccccagaaccagcgcaacgccccgcggaucaccuucgggggccccuccgacagcaccggguccaaccagaacggcgagcgcagcggggcccgguccaagcagcgccggccccagggccugcccaacaacacggcgagcugguucaccgcccucacccagcacggcaaggaggaccugaaguucccgcgcgggcagggcgugcccaucaacaccaacuccagccccgacgaccagaucggguacuaccggcgcgccacgcggcgcauccggggcggggacggcaagaugaaggaccugagcccccgcugguacuucuacuaccucggcaccgggccggaggccggccugcccuacggggccaacaaggacggcaucaucugggucgcgaccgagggcgcccugaacacccccaaggaccacaucgggacgcggaaccccgccaacaacgccgcgaucgugcuccagcugccgcagggcaccacccugcccaagggguucuacgccgagggcagccgcgggggcucccaggccagcucccggagcuccagccgcucccggaacagccuccgcaacuccacccccggcagcagccgggggacgucccccgcccgcauggccggcaacgggggcgacgcggcccuggcccugcuccugcuggaccggcucaaccagcuggagagcaagauguccgggaagggccagcagcagcagggccagaccgugaccaagaaguccgccgccgaggcguccaagaagccgcgccagaagcgcaccgccacgaaggccuacaacgucacccaggccuucgggcggcgcggccccgagcagacccaggggaacuucggcgaccaggagcugauccggcaggggaccgacuacaagcacuggccccagaucgcccaguucgcgcccagcgccuccgccuucuucggcaugagccgcaucggcauggaggugacgccguccgggaccuggcucaccuacaccggcgccaucaagcuggacgacaaggaccccaacuucaaggaccaggugauccugcucaacaagcacaucgacgccuacaagacguucccgcccaccgagcccaagaaggacaagaagaagaaggcggacgagacccaggcccugccccagcggcagaagaagcagcagaccgucacgcugcuccccgccgccgaccuggacgacuucagcaagcagcugcagcaguccaugagcuccgcggacagcacccaggccugaggacuaguuauaagacugacuagcccgaugggccucccaacgggcccuccuccccuccuugcaccgagauuaauaaaaaaaaaaaaaaaaaaaaaaaaaaaaaaaaaaaaaaaaaaaaaaaaaaaaaaaaaaaaaaaaugcaucccccccccccccccccccccccccccccccaaaggcucuuuucagagccaccagaauu

SEQ ID NO: 20978 - RNA, 1477 nt, Artificial Sequence
  SARS-CoV-2__MT892993.1__nucleocapsid protein (N) mRNA gc
aggagaaagcuuaccaugagcgacaacggcccccagaaccagcgcaacgccccgcggaucaccuucgggggccccuccgacagcaccggguccaaccagaacggcgagcgcagcggggcccgguccaagcagcgccggccccagggccugcccaacaacacggcgagcugguucaccgcccucacccagcacggcaaggaggaccugaaguucccgcgcgggcagggcgugcccaucaacaccaacuccagccccgacgaccagaucggguacuaccggcgcgccacgcggcgcauccggggcggggacggcaagaugaaggaccugagcccccgcugguacuucuacuaccucggcaccgggccggaggccggccugcccuacggggccaacaaggacggcaucaucugggucgcgaccgagggcgcccugaacacccccaaggaccacaucgggacgcggaaccccgccaacaacgccgcgaucgugcuccagcugccgcagggcaccacccugcccaagggguucuacgccgagggcagccgcgggggcauccaggccuccagccgguccagcucccgcagccggaacuccagccgcaacuccacccccggcagcagccgggggacgucccccgcccgcauggccggcaacgggggcgacgcggcccucgcccugcugcuccuggaccggcugaaccagcucgagagcaagauguccgggaagggccagcagcagcagggccagaccgugaccaagaaguccgccgccgaggcguccaagaagccgcgccagaagcgcaccgccacgaaggccuacaacgucacccaggccuucgggcggcgcggccccgagcagacccaggggaacuucggcgaccaggagcugauccggcaggggaccgacuacaagcacuggccccagaucgcccaguucgcgcccagcgccuccgccuucuucggcaugagccgcaucggcauggaggugacgccguccgggaccuggcugaccuacaccggcgccaucaagcucgacgacaaggaccccaacuucaaggaccaggugauccugcugaacaagcacaucgacgccuacaagacguucccgcccaccgagcccaagaaggacaagaagaagaaggcggacgagacccaggcccucccccagcggcagaagaagcagcagaccgucacgcugcugcccgccgccgaccucgacgacuucagcaagcagcugcagcaguccaugagcuccgcggacagcacccaggccugaggacuaguuauaagacugacuagcccgaugggccucccaacgggcccuccuccccuccuugcaccgagauuaauaaaaaaaaaaaaaaaaaaaaaaaaaaaaaaaaaaaaaaaaaaaaaaaaaaaaaaaaaaaaaaaaugcaucccccccccccccccccccccccccccccccaaaggcucuuuucagagccaccagaauu

SEQ ID NO: 20979 - RNA, 1477 nt, Artificial Sequence
  SARS-CoV-2__MT893011.1__nucleocapsid protein (N) mRNA gc
aggagaaagcuuaccaugagcgacaacggcccccagaaccagcgcaacgccccgcggaucaccuucgggggccccuccgacagcaccggguccaaccagaacggcgagcgcagcggggcccgguccaagcagcgccggccccagggccugcccaacaacacggcgagcugguucaccgcccucacccagcacggcaaggaggaccugaaguucccgcgcgggcagggcgugcccaucaacaccaacuccagccccgacgaccagaucggguacuaccggcgcgccacgcggcgcauccggggcggggacggcaagaugaaggaccugagcccccgcugguacuucuacuaccucggcaccgggccggaggccggccugcccuacggggccaacaaggacggcaucaucugggucgcgaccgagggcgcccugaacacccccaaggaccacaucgggacgcggaaccccgccaacaacgccgcgaucgugcuccagcugccgcagggcaccacccugcccaagggguucuacgccgagggcagccgcgggggcucccaggccagcucccggagcuccagccgcucccggaacaccagccgcaacuccacgcccggcagcagccgggggaccucccccgcccgcauggccggcaacgggggcgacgcggcccucgcccugcugcuccuggaccggcugaaccagcucgagagcaagauguccgggaagggccagcagcagcagggccagaccgugaccaagaaguccgccgccgaggcguccaagaagccgcgccagaagcgcacggccaccaaggccuacaacgucacccaggccuucgggcggcgcggccccgagcagacccaggggaacuucggcgaccaggagcugauccggcaggggacggacuacaagcacuggccccagaucgcccaguucgcgcccagcgccuccgccuucuucggcaugagccgcaucggcauggaggugaccccguccgggaccuggcugaccuacacgggcgccaucaagcucgacgacaaggaccccaacuucaaggaccaggugauccugcugaacaagcacaucgacgccuacaagaccuucccgcccaccgagcccaagaaggacaagaagaagaaggcggacgagacccaggcccucccccagcggcagaagaagcagcagacggucacccugcugcccgccgccgaccucgacgacuucagcaagcagcugcagcaguccaugagcuccgcggacagcacccaggccugaggacuaguuauaagacugacuagcccgaugggccucccaacgggcccuccuccccuccuugcaccgagauuaauaaaaaaaaaaaaaaaaaaaaaaaaaaaaaaaaaaaaaaaaaaaaaaaaaaaaaaaaaaaaaaaaugcaucccccccccccccccccccccccccccccccaaaggcucuuuucagagccaccagaauu

SEQ ID NO: 20980 - RNA, 1477 nt, Artificial Sequence
  SARS-CoV-2__MT893013.1__nucleocapsid protein (N) mRNA gc
aggagaaagcuuaccaugagcgacaacggcccccagaaccagcgcaacgccccgcggaucaccuucgggggccccuccgacagcaccggguccaaccagaacggcgagcgcagcggggcccgguccaagcagcgccggccccagggccugcccaacaacacggcgagcugguucaccgcccucacccagcacggcaaggaggaccugaaguucccgcgcgggcagggcgugcccaucaacaccaacuccagccccgacgaccagaucggguacuaccggcgcacgacccggcgcauccggggcggggacggcaagaugaaggaccugagcccccgcugguacuucuacuaccucggcaccgggccggaggccggccugcccuacggggccaacaaggacggcaucaucugggucgccaccgagggcgcgcugaacacgcccaaggaccacaucgggacccggaaccccgccaacaacgccgccaucgugcuccagcugccgcagggcaccacccugcccaagggguucuacgcggagggcucccgcgggggcucccaggccagcucccggagcuccagccgcucccggaacagcucccgcaacagcacgcccggcagcucccgggggaccagccccgcccgcauggccggcaacgggggcgacgccgcgcucgcccugcugcuccuggaccggcugaaccagcucgaguccaagaugagcgggaagggccagcagcagcagggccagaccgugaccaagaaguccgccgccgaggccagcaagaagccgcgccagaagcgcacggcgaccaaggccuacaacgucacccaggccuucgggcggcgcggccccgagcagacccaggggaacuucggcgaccaggagcugauccggcaggggacggacuacaagcacuggccccagaucgcccaguucgcccccuccgcgagcgccuucuucggcaugucccgcaucggcauggaggugaccccgagcgggaccuggcugaccuacacgggcgccaucaagcucgacgacaaggaccccaacuucaaggaccaggugauccugcugaacaagcacaucgacgccuacaagaccuucccgcccaccgagcccaagaaggacaagaagaagaaggccgacgagacccaggcgcucccccagcggcagaagaagcagcagacggucacccugcugcccgccgccgaccucgacgacuucuccaagcagcugcagcagagcauguccagcgccgacuccacccaggcgugaggacuaguuauaagacugacuagcccgaugggccucccaacgggcccuccuccccuccuugcaccgagauuaauaaaaaaaaaaaaaaaaaaaaaaaaaaaaaaaaaaaaaaaaaaaaaaaaaaaaaaaaaaaaaaaaugcaucccccccccccccccccccccccccccccccaaaggcucuuuucagagccaccagaauu

SEQ ID NO: 20981 - RNA, 1477 nt, Artificial Sequence
  SARS-CoV-2__MT883501.1__nucleocapsid protein (N) mRNA gc
aggagaaagcuuaccaugagcgacaacggcccccagaaccagcgcaacgccccgcggaucaccuucgggggccccuccgacagcaccggguccaaccagaacggcgagcgcagcggggcccgguccaagcagcgccggccccagggccugcccaacaacacggcgagcugguucaccgcccucacccagcacggcaaggaggaccugaaguucccgcgcgggcagggcgugcccaucaacaccaacuccagccccgacgaccagaucggguacuaccggcgcgccacgcggcgcauccggggcggggacggcaagaugaaggaccugagcccccgcugguacuucuacuaccucggcaccgggccggaggccggccugcccuacggggccaacaaggacggcaucaucugggucgcgaccgagggcgcccugaacacccccaaggaccacaucgggacgcggaaccccgccaacaacgccgcgaucgugcuccagcugccgcagggcaccacccugcccaagggguucuacgccgagggcucccgcgggggcucccaggccagcucccggagcuccagccgcucccggaacagcucccgcaacagcacccccggcagcucccgggggacgagccccgcccgcauggccggcuacgggggcgacgcggcccucgcccugcugcuccuggaccggcugaaccagcucgaguccaagaugagcgggaagggccagcagcagcagggccagaccgugaccaagaaguccgccgccgaggcgagcaagaagccgcgccagaagcgcaccgccacgaaggccuacaacgucacccaggccuucgggcggcgcggccccgagcagacccaggggaacuucggcgaccaggagcugauccggcaggggaccgacuacaagcacuggccccagaucgcccaguucgcgcccuccgccagcgccuucuucggcaugucccgcaucggcauggaggugacgccgagcgggaccuggcugaccuacaccggcgccaucaagcucgacgacaaggaccccaacuucaaggaccaggugauccugcugaacaagcacaucgacgccuacaagacguucccgcccaccgagcccaagaaggacaagaagaagaaggcggacgagacccaggcccucccccagcggcagaagaagcagcagaccgucacgcugcugcccgccgccgaccucgacgacuucuccaagcagcugcagcagagcauguccagcgcggacuccacccaggccugaggacuaguuauaagacugacuagcccgaugggccucccaacgggcccuccuccccuccuugcaccgagauuaauaaaaaaaaaaaaaaaaaaaaaaaaaaaaaaaaaaaaaaaaaaaaaaaaaaaaaaaaaaaaaaaaugcaucccccccccccccccccccccccccccccccaaaggcucuuuucagagccaccagaauu

SEQ ID NO: 20982 - RNA, 1477 nt, Artificial Sequence
  SARS-CoV-2__MT883502.1__nucleocapsid protein (N) mRNA gc
aggagaaagcuuaccaugagcgacaacggcccccagaaccagcgcaacgccccgcggaucaccuucgggggccccuccgacagcaccggguccaaccagaacggcgagcgcagcggggcccgguccaagcagcgccggccccagggccugcccaacaacacggcgagcugguucaccgcccucacccagcacggcaaggaggaccugaaguucccgcgcgggcagggcgugcccaucaacaccaacuccagccccgacgaccagaucggguacuaccggcgcgccacgcggcgcauccggggcggggacggcaagaugaaggaccugagcccccgcugguacuucuacuaccucggcaccgggccggaggccggccugcccuacggggccaacaaggacggcaucaucugggucgcgaccgagggcgcccugaacacccccaaggaccacaucgggacgcggaaccccgccaacaacgccgcgaucgugcuccagcugccgcagggcaccacccugcccaagggguucuacgccgagggcucccgcgggggcucccaggccagcucccggagcuccagccgcucccggaacagcucccgcaacagcacccccggcagcuccaagcggacgagccccgcccgcauggccgggaacggcggggacgcggcccucgcccugcugcuccuggaccggcugaaccagcucgaguccaagaugagcggcaaggggcagcagcagcagggccagaccgugaccaagaaguccgccgccgaggcgagcaagaagccgcgccagaagcgcaccgccacgaaggccuacaacgucacccaggccuucggccggcgcgggcccgagcagacccagggcaacuucggggaccaggagcugauccggcagggcaccgacuacaagcacuggccccagaucgcccaguucgcgcccuccgccagcgccuucuucgggaugucccgcaucggcauggaggugacgccgagcggcaccuggcugaccuacaccggggccaucaagcucgacgacaaggaccccaacuucaaggaccaggugauccugcugaacaagcacaucgacgccuacaagacguucccgcccaccgagcccaagaaggacaagaagaagaaggcggacgagacccaggcccucccccagcggcagaagaagcagcagaccgucacgcugcugcccgccgccgaccucgacgacuucuccaagcagcugcagcagagcauguccaucgcggacagcacccaggccugaggacuaguuauaagacugacuagcccgaugggccucccaacgggcccuccuccccuccuugcaccgagauuaauaaaaaaaaaaaaaaaaaaaaaaaaaaaaaaaaaaaaaaaaaaaaaaaaaaaaaaaaaaaaaaaaugcaucccccccccccccccccccccccccccccccaaaggcucuuuucagagccaccagaauu

SEQ ID NO: 20983 - RNA, 1477 nt, Artificial Sequence
  SARS-CoV-2__MT883503.1__nucleocapsid protein (N) mRNA gc
aggagaaagcuuaccaugagcgacaacggcccccagaaccagcgcaacgccccgcggaucaccuucgggggccccuccgacagcaccggguccaaccagaacggcgagcgcagcggggcccgguccaagcagcgccggccccagggccugcccaacaacacggcgagcugguucaccgcccucacccagcacggcaaggaggaccugaaguucccgcgcgggcagggcgugcccaucaacaccaacuccagccccgacgaccagaucggguacuaccggcgcgccacgcggcgcauccggggcggggacggcaagaugaaggaccugagcccccgcugguacuucuacuaccucggcaccgggccggaggccggccugcccuacggggccaacaaggacggcaucaucugggucgugaccgagggcgcgcugaacacccccaaggaccacaucgggacgcggaaccccgccaacaacgccgccaucgugcuccagcugccgcagggcaccacccugcccaagggguucuacgcggagggcucccgcgggggcucccaggccagcucccggagcuccagccgcucccggaacagcucccgcaacagcacccccggcagcuccaagcggacgagccccgcccgcauggccgggaacggcggggacgccgcgcucgcccugcugcuccuggaccggcugaaccagcucgaguccaagaugagcggcaaggggcagcagcagcagggccagaccgucaccaagaaguccgccgccgaggccagcaagaagccgcgccagaagcgcaccgcgacgaaggccuacaacgugacccaggccuucggccggcgcgggcccgagcagacccagggcaacuucggggaccaggagcugauccggcagggcaccgacuacaagcacuggccccagaucgcccaguucgcccccuccgcgagcgccuucuucgggaugucccgcaucggcauggaggugacgccgagcggcaccuggcugaccuacaccggggccaucaagcucgacgacaaggaccccaacuucaaggaccaggucauccugcugaacaagcacaucgacgccuacaagacguucccgcccaccgagcccaagaaggacaagaagaagaaggccgacgagacccaggcgcucccccagcggcagaagaagcagcagaccgugacgcugcugcccgccgccgaccucgacgacuucuccaagcagcugcagcagagcauguccagcgccgacuccacccaggcgugaggacuaguuauaagacugacuagcccgaugggccucccaacgggcccuccuccccuccuugcaccgagauuaauaaaaaaaaaaaaaaaaaaaaaaaaaaaaaaaaaaaaaaaaaaaaaaaaaaaaaaaaaaaaaaaaugcaucccccccccccccccccccccccccccccccaaaggcucuuuucagagccaccagaauu

SEQ ID NO: 20984 - RNA, 1477 nt, Artificial Sequence
  SARS-CoV-2__MT886312.1__nucleocapsid protein (N) mRNA gc
aggagaaagcuuaccaugagcgacaacggcccccagaaccagcgcaacgccccgcggaucaccuucgggggccccuccgacagcaccggguccaaccagaacggcgagcgcagcggggcccgguccaagcagcgccggccccagggccugcccaacaacacggcgagcugguucaccgcccucacccagcacggcaaggaggaccugaaguucccgcgcgggcagggcgugcccaucaacaccaacuccagccccgacgaccagaucggguacuaccggcgcgccacgcggcgcauccggggcggggacggcaagaugaaggaccugagcccccgcugguacuucuacuaccucggcaccgggccggaggccggccugcccuacggggccaacaaggacggcaucaucugggucgcgaccgagggcgcccugaacacccccaaggaccacaucgggacgcggaaccccgccaacaacgccgcgaucgugcuccagcugccgcagggcaccacccugcccaagggguucuacgccgagggcucccgcgggggcucccaggccagcucccggagcuccagccgcucccggaacagcucccgcaacagcacccccggcagcucccgggggacgagccccgcccgcauggccggcaacgggggcgacgcggcccucgcccugcugcuccuggaccggcugaaccagcucgaguccaagaugagcgggaagggccagcagcagcagggccagaccgugaccaagaaguccgccgccgaggcgagcaagaagccgcgccagaagcgcaccgccacgaaggccuacaacgucacccaggccuucgggcggcgcggccccgagcagacccaggggaacuucggcgaccaggagcugauccggcaggggaccgacuacaagcacuggccccagaucgcccaguucgcgcccuccgccagcgccuucuucggcaugucccgcaucggcauggaggugacgccgcuggggaccuggcucaccuacaccggcgccaucaagcuggacgacaaggaccccaacuucaaggaccaggugauccugcucaacaagcacaucgacgccuacaagacguucccgcccaccgagcccaagaaggacaagaagaagaaggcggacgagacccaggcccugccccagcggcagaagaagcagcagaccgucacgcugcuccccgccgccgaccuggacgacuucagcaagcagcugcagcaguccaugagcuccgcggacagcacccaggccugaggacuaguuauaagacugacuagcccgaugggccucccaacgggcccuccuccccuccuugcaccgagauuaauaaaaaaaaaaaaaaaaaaaaaaaaaaaaaaaaaaaaaaaaaaaaaaaaaaaaaaaaaaaaaaaaugcaucccccccccccccccccccccccccccccccaaaggcucuuuucagagccaccagaauu

SEQ ID NO: 20985 - RNA, 1477 nt, Artificial Sequence
  SARS-CoV-2__MT886346.1__nucleocapsid protein (N) mRNA gc
aggagaaagcuuaccaugagcgacaacggcccccagaaccagcgcaacgccccgcggaucaccuucgggggccccuccgacagcaccggguccaaccagaacggcgagcgcagcggggcccgguccaagcagcgccggccccagggccugcccaacaacacggcgagcugguucaccgcccucacccagcacggcaaggaggaccugaaguucccgcgcgggcagggcgugcccaucaacaccaacuccagccccgacgaccagaucggguacuaccggcgcgccacgcggcgcauccggggcggggacggcaagaugaaggaccugagcccccgcugguacuucuacuaccucggcaccgggccggaggccggccugcccuacggggccaacaaggacggcaucaucugggucgcgaccgagggcgccuucaacacccccaaggaccacaucgggacgcggaaccccgccaacaacgccgcgaucgugcugcagcucccgcagggcaccacccugcccaagggguucuacgccgagggcucccgcgggggcucccaggccagcucccggagcuccagccgcucccggaacagcucccgcaacagcacccccggcagcuccaagcggacgagccccgcccgcauggccgggaacggcggggacgcggcccuggcccuccugcugcucgaccggcugaaccagcuggaguccaagaugagcggcaaggggcagcagcagcagggccagaccgugaccaagaaguccgccgccgaggcgagcaagaagccgcgccagaagcgcaccgccacgaaggccuacaacgucacccaggccuucggccggcgcgggcccgagcagacccagggcaacuucggggaccaggagcucauccggcagggcaccgacuacaagcacuggccccagaucgcccaguucgcgcccuccgccagcgccuucuucgggaugucccgcaucggcauggaggugacgccgagcggcaccuggcugaccuacaccggggccaucaagcuggacgacaaggaccccaacuucaaggaccaggugauccuccugaacaagcacaucgacgccuacaagacguucccgcccaccgagcccaagaaggacaagaagaagaaggcggacgagacccaggcccugccccagcggcagaagaagcagcagaccgucacgcuccugcccgccgccgaccuggacgacuucuccaagcagcuccagcagagcauguccagcgcggacuccacccaggccugaggacuaguuauaagacugacuagcccgaugggccucccaacgggcccuccuccccuccuugcaccgagauuaauaaaaaaaaaaaaaaaaaaaaaaaaaaaaaaaaaaaaaaaaaaaaaaaaaaaaaaaaaaaaaaaaugcaucccccccccccccccccccccccccccccccaaaggcucuuuucagagccaccagaauu

SEQ ID NO: 20986 - RNA, 1477 nt, Artificial Sequence
  SARS-CoV-2__MT886413.1__nucleocapsid protein (N) mRNA gc
aggagaaagcuuaccaugagcgacaacggcccccagaaccagcgcaacgccccgcggaucaccuucgggggccccuccgacagcaccggguccaaccagaacggcgagcgcagcggggcccgguccaagcagcgccggccccagggccugcccaacaacacggcgagcugguucaccgcccucacccagcacggcaaggaggaccugaaguucacccgcgggcagggcgugccgaucaacacgaacuccagccccgacgaccagaucggguacuaccggcgcgccacccggcgcauccggggcggggacggcaagaugaaggaccugagcccccgcugguacuucuacuaccucggcaccgggcccgaggccggccugccguacggggccaacaaggacggcaucaucugggucgcgaccgagggcgcccugaacacgcccaaggaccacaucgggacccggaaccccgccaacaacgccgcgaucgugcuccagcugccccagggcaccacccugccgaagggguucuacgccgagggcucccgcgggggcucccaggccagcucccggagcuccagccgcucccggaacagcucccgcaacagcacgcccggcagcucccgggggaccagccccgcccgcauggccggcaacgggggcgacgcggcccucgcccugcugcuccuggaccggcugaaccagcucgaguccaagaugagcgggaagggccagcagcagcagggccagaccgugaccaagaaguccgccgccgaggcgagcaagaagccccgccagaagcgcacggccaccaaggccuacaacgucacccaggccuucgggcggcgcggcccggagcagacccaggggaacuucggcgaccaggagcugauccggcaggggacggacuacaagcacuggccccagaucgcccaguucgcgcccuccgccagcgccuucuucggcaugucccgcaucggcauggaggugacccccagcgggaccuggcugaccuacacgggcgccaucaagcucgacgacaaggacccgaacuucaaggaccaggugauccugcugaacaagcacaucgacgccuacaagaccuucccgcccaccgagcccaagaaggacaagaagaagaaggcggacgagacccaggcccucccccagcggcagaagaagcagcagacggucacccugcugcccgccgccgaccucgacgacuucuccaagcagcugcagcagagcauguccagcgcggacuccacccaggccugaggacuaguuauaagacugacuagcccgaugggccucccaacgggcccuccuccccuccuugcaccgagauuaauaaaaaaaaaaaaaaaaaaaaaaaaaaaaaaaaaaaaaaaaaaaaaaaaaaaaaaaaaaaaaaaaugcaucccccccccccccccccccccccccccccccaaaggcucuuuucagagccaccagaauu

SEQ ID NO: 20987 - RNA, 1477 nt, Artificial Sequence
  SARS-CoV-2__MT880886.1__nucleocapsid protein (N) mRNA gc
aggagaaagcuuaccaugagcgacaacggcccccagaaccagcgcaacgccccgcggaucaccuucgggggccccuccgacagcaccggguccaaccagaacggcgagcgcagcggggcccgguccaagcagcgccggccccagggccugcccaacaacacggcgagcugguucaccgcccucacccagcacggcaaggaggaccugaaguucccgcgcgggcagggcgugcccaucaacaccaacuccagccccgacgaccagaucggguacuaccggcgcgccacgcggcgcauccggggcggggacggcaagaugaaggaccugagcccccgcugguacuucuacuaccucggcaccgggccggaggccggccugcccuacggggccaacaaggacggcaucaucugggucgcgaccgagggcgcccugaacacccccaaggaccacaucgggacgcggaaccccgccaacaacgccgcgaucgugcuccagcugccgcagggcaccacccugcccaagggguucuacgccgagggcagccgcgggggcucccagagcuccagccgguccagcucccgcagccggaacuccagccgcaacagcacccccggcuccagcaagcggacgucccccgcccgcauggccgggaacggcggggacgccgcgcucgcccugcugcuccuggaccggcugaaccagcucgagagcaagauguccggcaaggggcagcagcagcagggccagaccgugaccaagaaguccgccgccgaggccuccaagaagccgcgccagaagcgcaccgcgacgaaggccuacaacgucacccaggccuucggccggcgcgggcccgagcagacccagggcaacuucggggaccaggagcugauccggcagggcaccgacuacaagcacuggccccagaucgcccaguucgcccccagcgcguccgccuucuucgggaugagccgcaucggcauggaggugacgccguccggcaccuggcugaccuacaccggggccaucaagcucgacgacaaggaccccaacuucaaggaccaggugauccugcugaacaagcacaucgacgccuacaagacguucccgcccaccgagcccaagaaggacaagaagaagaaggccgacgagacccaggcgcucccccagcggcagaagaagcagcagaccgucacgcugcugcccgccgccgaccucgacgacuucagcaagcagcugcagcaguccaugagcuccgccgacagcacccaggcgugaggacuaguuauaagacugacuagcccgaugggccucccaacgggcccuccuccccuccuugcaccgagauuaauaaaaaaaaaaaaaaaaaaaaaaaaaaaaaaaaaaaaaaaaaaaaaaaaaaaaaaaaaaaaaaaaugcaucccccccccccccccccccccccccccccccaaaggcucuuuucagagccaccagaauu

SEQ ID NO: 20988 - RNA, 1477 nt, Artificial Sequence
  SARS-CoV-2__MT882317.1__nucleocapsid protein (N) mRNA gc
aggagaaagcuuaccaugagcgacaacggcccccagaaccagcgcaacgccccgcggaucaccuucgggggccccuccgacagcaccggguccaaccagaaccgcgagcggagcggcgcccgcuccaagcagcggcgcccccaggggcugcccaacaacacggcgagcugguucaccgcccucacccagcacggcaaggaggaccugaaguucccgcggggccagggggugcccaucaacaccaacuccagccccgacgaccagaucggcuacuaccgccgggccacgcgccggauccgcgggggcgacgggaagaugaaggaccugagcccccggugguacuucuacuaccucggcaccggcccggaggccgggcugcccuacggcgccaacaaggacgggaucaucugggucgcgaccgagggcgcccugaacacccccaaggaccacaucggcacgcgcaaccccgccaacaacgccgcgaucgugcuccagcugccgcaggggaccacccugcccaagggcuucuacgccgaggggucccggggcgggucccaggccagcucccgcagcuccagccggucccgcaacagcucccggaacagcacccccggcagcuccaagcgcacgagccccgcccggauggccggcaacgggggcgacgcggcccucgcccugcugcuccuggaccgccugaaccagcucgaguccaagaugagcgggaagggccagcagcagcaggggcagaccgugaccaagaaguccgccgccgaggcgagcaagaagccgcgccagaagcggaccgccacgaaggccuacaacgucacccaggccuucggccgccggggccccgagcagacccaggggaacuucggcgaccaggagcugauccgccaggggaccgacuacaagcacuggccccagaucgcccaguucgcgcccuccgccagcgccuucuucggcaugucccggaucgggauggaggugacgccgagcggcaccuggcugaccuacaccggcgccaucaagcucgacgacaaggaccccaacuucaaggaccaggugauccugcugaacaagcacaucgacgccuacaagacguucccgcccaccgagcccaagaaggacaagaagaagaaggcggacgagacccaggcccucccccagcgccagaagaagcagcagaccgucacgcugcugcccgccgccgaccucgacgacuucuccaagcagcugcagcagagcauguccagcgcggacuccacccaggccugaggacuaguuauaagacugacuagcccgaugggccucccaacgggcccuccuccccuccuugcaccgagauuaauaaaaaaaaaaaaaaaaaaaaaaaaaaaaaaaaaaaaaaaaaaaaaaaaaaaaaaaaaaaaaaaaugcaucccccccccccccccccccccccccccccccaaaggcucuuuucagagccaccagaauu

SEQ ID NO: 20989 - RNA, 1477 nt, Artificial Sequence
  SARS-CoV-2__MT873051.1__nucleocapsid protein (N) mRNA gc
aggagaaagcuuaccaugagcgacaacggcccccagaaccagcgcaacgccccgcggaucaccuucgggggccccuccgacagcaccggguccaaccagaacggcgagcgcagcggggcccgguccaagcagcgccggccccagggccugcccaacaacacggcgagcugguucaccgcccucacccagcacggcaaggaggaccugaaguucccgcgcgggcagggcgugcccaucaacaccaacuccagccccgacgaccagaucggguacuaccggcgcgccacgcggcgcauccggggcggggacggcaagaugaaggaccugagcccccgcugguacuucuacuaccucggcaccgggccggaggccggccugcccuacggggccaacaaggacggcaucaucugggucgcgaccgagggcgcccugaacacccccaaggaccacaucgggacgcggaaccccgccaacaacgccgcgaucgugcuccagcugccgcagggcaccacccugcccaagggguucuacgccgagggcucccgcgggggcucccaggccagcucccggagcuccagccgcucccggaacagcucccgcaacagcacccccggcagcucccgggggacgagccccgccaucauggccggcaacgggggcgacgcggcccucgcccugcugcuccuggaccgccugaaccagcucgaguccaagaugagcgggaagggccagcagcagcagggccagaccgugaccaagaaguccgccgccgaggcgagcaagaagccgcggcagaagcgcaccgccacgaaggccuacaacgucacccaggccuucgggcgccggggccccgagcagacccaggggaacuucggcgaccaggagcugauccgccaggggaccgacuacaagcacuggccccagaucgcccaguucgcgcccuccgccagcgccuucuucggcaugucccggaucggcauggaggugacgccgagcgggaccuggcugaccuacaccggcgccaucaagcucgacgacaaggaccccaacuucaaggaccaggugauccugcugaacaagcacaucgacgccuacaagacguucccgcccaccgagcccaagaaggacaagaagaagaaggcggacgagacccaggcccucccccagcgccagaagaagcagcagaccgucacgcugcugcccgccgccgaccucgacgacuucuccaagcagcugcagcagagcauguccagcgcggacuccacccaggccugaggacuaguuauaagacugacuagcccgaugggccucccaacgggcccuccuccccuccuugcaccgagauuaauaaaaaaaaaaaaaaaaaaaaaaaaaaaaaaaaaaaaaaaaaaaaaaaaaaaaaaaaaaaaaaaaugcaucccccccccccccccccccccccccccccccaaaggcucuuuucagagccaccagaauu

SEQ ID NO: 20990 - RNA, 1477 nt, Artificial Sequence
  SARS-CoV-2__MT873056.1__nucleocapsid protein (N) mRNA gc
aggagaaagcuuaccaugagcgacaacggcccccagaaccagcgcaacgccccgcggaucaccuucgggggccccuccgacagcaccggguccaaccagaacggcgagcgcagcggggcccgguccaagcagcgccggccccagggccugcccaacaacacggcgagcugguucaccgcccucacccagcacggcaaggaggaccugaaguucccgcgcgggcagggcgugcccaucaacaccaacuccagccccgacgaccagaucggguacuaccggcgcgccacgcggcgcauccggggcggggacggcaagaugaaggaccugagcccccgcugguacuucuacuaccucggcaccgggccggaggccggccugcccuacggggccaacaaggacggcaucaucugggucgcgaccgagggcgcccugaacacccccaaggaccacaucgggacgcggaaccccgccaacaacgccgcgaucgugcuccagcugccgcagggcaccacccugcccaagggguucuacgccgagggcucccgcgggggcucccaggccagcucccggagcuccagccgcucccggaacagcucccgcaacagcacccccggcagcucccgggggacgagccccgcccgcauggccggcaacgggggcgacgcggcccucgcccugcugcuccuggaccggcugaaccagcucgaguccaagaugagcgggaagggccagcagcagcagggccagaccgugaccaagaaguccgccgccgaggcgagcaagaagccgcgccagaagcgcaccgccacgaaggccuacaacgucacccaggccuucgggcggcgcggccccgagcagacccaggggaacuucggcgaccaggagcugauccggcaggggaccgacuacaaguacuggccccagaucgcccaguucgcgcccuccgccagcgccuucuucggcaugucccgcaucggcauggaggugacgccgagcgggaccuggcugaccuacaccggcgccaucaagcucgacgacaaggaccccaacuucaaggaccaggugauccugcugaacaagcacaucgacgccuacaagacguucccgcccaccgagcccaagaaggacaagaagaagaaggcggacgagacccaggcccucccccagcggcagaagaagcagcagaccgucacgcugcugcccgccgccgaccucgacgacuucuccaagcagcugcagcagagcauguccagcgcggacuccacccaggccugaggacuaguuauaagacugacuagcccgaugggccucccaacgggcccuccuccccuccuugcaccgagauuaauaaaaaaaaaaaaaaaaaaaaaaaaaaaaaaaaaaaaaaaaaaaaaaaaaaaaaaaaaaaaaaaaugcaucccccccccccccccccccccccccccccccaaaggcucuuuucagagccaccagaauu

SEQ ID NO: 20991 - RNA, 1477 nt, Artificial Sequence
  SARS-CoV-2__MT873062.1__nucleocapsid protein (N) mRNA gc
aggagaaagcuuaccaugagcgacaacggcccccagaaccagcgcaacgccccgcggaucaccuucgggggccccuccgacagcaccggguccaaccagaacggcgagcgcagcggggcccgguccaagcagcgccggccccagggccugcccaacaacacggcgagcugguucaccgcccucacccagcacggcaaggaggaccugaaguucccgcgcgggcagggcgugcccaucaacaccaacuccagccccgacgaccagaucggguacuaccggcgcgccacgcggcgcauccggggcggggacggcaagaugaaggaccugagcccccgcugguacuucuacuaccucggcaccgggccggaggccggccugcccuacggggccaacaaggacggcaucaucugggucgcgaccgagggcgcccugaacacccccaaggaccacaucgggacgcggaaccccgccaacaacgccgcgaucgugcuccagcugccgcagggcaccacccugcccaagggguucuacgccgagggcucccgcgggggcucccaggccagcucccggagcuccagccgcucccggaacagcucccgcaacagcacccccggcagcucccgggggacgagccccgcccgcauggccggcaacgggggcgacgcggcccucgcccugcugcuccuggaccggcugaaccagcucgaguccaagaugagcgggaagggccagcagcagcagggccagaccgugaccaagaaguccgccgccgaggcgagcaagaagccgcgccagaagcgcaccgccacgaaggccuacaacgucacccaggccuucgggcggcgcggccccgagcagacccaggggaacuucggcgaccaggagcugauccggcaggggaccgacuacaagcacuggccccagaucgcccaguucgcgcccuccgccagcgccuucuucggcaugucccgcaucggcauggaggugacgccgagcgggaccuggcugaccuacaccggcgccaucaagcucgacgacaaggaccccaacuucaaggaccaggugauccugcugaacaagcacaucgacgccuacaagacguucccgcccaccgagcccaagaaggacaagaagaagaaggcggacgagacccaggcccucccccagcggcagaagaagcagcagaccgucacgcugcugcccgccgccgaccucuacgacuucuccaagcagcugcagcagagcauguccagcgcggacuccacccaggccugaggacuaguuauaagacugacuagcccgaugggccucccaacgggcccuccuccccuccuugcaccgagauuaauaaaaaaaaaaaaaaaaaaaaaaaaaaaaaaaaaaaaaaaaaaaaaaaaaaaaaaaaaaaaaaaaugcaucccccccccccccccccccccccccccccccaaaggcucuuuucagagccaccagaauu

SEQ ID NO: 20992 - RNA, 1477 nt, Artificial Sequence
  SARS-CoV-2__MT873087.1__nucleocapsid protein (N) mRNA gc
aggagaaagcuuaccaugagcgacaacggcccccagaaccaccgcaacgccccgcggaucaccuucgggggccccuccgacagcaccggguccaaccagaacggcgagcgcagcggggcccgguccaagcagcgccggccccagggccugcccaacaacacggcgagcugguucaccgcccucacccagcacggcaaggaggaccugaaguucccgcgcgggcagggcgugcccaucaacaccaacuccagccccgacgaccagaucggguacuaccggcgcgccacgcggcgcauccggggcggggacggcaagaugaaggaccugagcccccgcugguacuucuacuaccucggcaccgggccggaggccggccugcccuacggggccaacaaggacggcaucaucugggucgcgaccgagggcgcccugaacacccccaaggaccacaucgggacgcggaaccccgccaacaacgccgcgaucgugcuccagcugccgcagggcaccacccugcccaagggguucuacgccgagggcucccgcgggggcucccaggccagcucccggagcuccagccgcucccggaacagcucccgcaacagcacccccggcagcucccgggggacgagccccgcccgcauggccggcaacgggggcgacgcggcccucgcccugcugcuccuggaccggcugaaccagcucgaguccaagaugagcgggaagggccagcagcagcagggccagaccgugaccaagaaguccgccgccgaggcgagcaagaagccgcgccagaagcgcaccgccacgaaggccuacaacgucacccaggccuucgggcggcgcggccccgagcagacccaggggaacuucggcgaccaggagcugauccggcaggggaccgacuacaagcacuggccccagaucgcccaguucgcgcccuccgccagcgccuucuucggcaugucccgcaucggcauggaggugacgccgagcgggaccuggcugaccuacaccggcgccaucaagcucgacgacaaggaccccaacuucaaggaccaggugauccugcugaacaagcacaucgacgccuacaagacguucccgcccaccgagcccaagaaggacaagaagaagaaggcggacgagacccaggcccucccccagcggcagaagaagcagcagaccgucacgcugcugcccgccgccgaccucgacgacuucuccaagcagcugcagcagagcauguccagcgcggacuccacccaggccugaggacuaguuauaagacugacuagcccgaugggccucccaacgggcccuccuccccuccuugcaccgagauuaauaaaaaaaaaaaaaaaaaaaaaaaaaaaaaaaaaaaaaaaaaaaaaaaaaaaaaaaaaaaaaaaaugcaucccccccccccccccccccccccccccccccaaaggcucuuuucagagccaccagaauu

SEQ ID NO: 20993 - RNA, 1477 nt, Artificial Sequence
  SARS-CoV-2__MT873108.1__nucleocapsid protein (N) mRNA gc
aggagaaagcuuaccaugagcgacaacggcccccagaaccagcgcaacgccccgcggaucaccuucgggggccccuccgacagcaccggguccaaccagaacggcgagcgcagcggggcccgguccaagcagcgccggccccagggccugcccaacaacacggcgagcugguucaccgcccucacccagcacggcaaggaggaccugaaguucccgcgcgggcagggcgugcccaucaacaccaacuccagccccgacgaccagaucggguacuaccggcgcgccacgcggcgcauccggggcggggacggcaagaugaaggaccugagcccccgcugguacuucuacuaccucggcaccgggccggaggccggccugcccuacggggccaacaaggacggcaucaucugggucgcgaccgagggcgcccugaacacccccaaggaccacaucgggacgcggaaccccgccaacaacgccgcgaucgugcuccagcugccgcagggcaccacccugcccaagggguucuacgccgagggcagccgcgggggcucccaggccagcucccggagcuccagccgcucccggaacagcucccgcaacagcacccccggcagcucccgggggacguuccccgcccgcauggccggcaacgggggcgacgcggcccucgcccugcugcuccuggaccggcugaaccagcucgagagcaagauguccgggaagggccagcagcagcagggccagaccgugaccaagaaguccgccgccgaggcguccaagaagccgcgccagaagcgcaccgccacgaaggccuacaacgucacccaggccuucgggcggcgcggccccgagcagacccaggggaacuucggcgaccaggagcugauccggcaggggaccgacuacaagcacuggccccagaucgcccaguucgcgcccagcgccuccgccuucuucggcaugagccgcaucggcauggaggugacgccguccgggaccuggcugaccuacaccggcgccaucaagcucgacgacaaggaccccaacuucaaggaccaggugauccugcugaacaagcacaucgacgccuacaagacguucccgcccaccgagcccaagaaggacaagaagaagaaggcggacgagacccaggcccucccccagcggcagaagaagcagcagaccgucacgcugcugcccgccgccgaccucgacgacuucagcaagcagcugcagcaguccaugagcuccgcggacagcacccaggccugaggacuaguuauaagacugacuagcccgaugggccucccaacgggcccuccuccccuccuugcaccgagauuaauaaaaaaaaaaaaaaaaaaaaaaaaaaaaaaaaaaaaaaaaaaaaaaaaaaaaaaaaaaaaaaaaugcaucccccccccccccccccccccccccccccccaaaggcucuuuucagagccaccagaauu

SEQ ID NO: 20994 - RNA, 1477 nt, Artificial Sequence
  SARS-CoV-2__MT873173.1__nucleocapsid protein (N) mRNA gc
aggagaaagcuuaccaugagcgacaacggcccccagaaccagcgcaacgccccgcggaucaccuucgggggccccuccgacagcaccggguccaaccagaacggcgagcgcagcggggcccgguccaagcagcgccggccccagggccugcccaacaacacggcgagcugguucaccgcccucacccagcacggcaaggaggaccugaaguucccgcgcgggcagggcgugcccaucaacaccaacuccagccccgacgaccagaucggguacuaccggcgcgccacgcggcgcauccggggcggggacggcaagaugaaggaccugagcccccgcugguacuucuacuaccucggcaccgggccggaggccggccugcccuacggggccaacaaggacggcaucaucugggucgcgaccgagggcgcccugaacacccccaaggaccacaucgggacgcggaaccccgccaacaacgccgcgaucgugcuccagcugccgcagggcaccacccugcccaagggguucuacgccgagggcucccgcgggggcucccaggccagcucccggagcuccagccgcucccggaacagcucccgcaacagcacccccggcagcuccaaggggacgagccccggccggauggccgggaacggcggggacgccgcgcucgcccugcugcuccuggaccgccugaaccagcucgaguccaagaugagcggcaagggccagcagcagcaggggcagaccgugaccaagaaguccgccgccgaggccagcaagaagccgcggcagaagcgcaccgcgacgaaggccuacaacgucacccaggccuucggccgccgggggcccgagcagacccagggcaacuucggggaccaggagcugauccgccagggcaccgacuacaagcacuggccccagaucgcccaguucgcccccuccgcgagcgccuucuucggcaugucccggaucgggauggaggugacgccgagcggcaccuggcugaccuacaccggggccaucaagcucgacgacaaggaccccaacuucaaggaccaggugauccugcugaacaagcacaucgacgccuacaagacguucccgcccaccgagcccaagaaggacaagaagaagaaggccgacgagacccaggcgcucccccagcgccagaagaagcagcagaccgucacgcugcugcccgccgccgaccucgacgacuucuccaagcagcugcagcagagcauguccagcgccgacuccacccaggcgugaggacuaguuauaagacugacuagcccgaugggccucccaacgggcccuccuccccuccuugcaccgagauuaauaaaaaaaaaaaaaaaaaaaaaaaaaaaaaaaaaaaaaaaaaaaaaaaaaaaaaaaaaaaaaaaaugcaucccccccccccccccccccccccccccccccaaaggcucuuuucagagccaccagaauu

SEQ ID NO: 20995 - RNA, 1477 nt, Artificial Sequence
  SARS-CoV-2__MT873184.1__nucleocapsid protein (N) mRNA gc
aggagaaagcuuaccaugagcgacaacggcccccagaaccagcgcaacgccccgcggaucaccuucgggggccccuccgacagcaccggguccaaccagaacggcgagcgcagcggggcccgguccaagcagcgccggccccagggccugcccaacaacacggcgagcugguucaccgcccucacccagcacggcaaggaggaccugaaguucccgcgcgggcagggcgugcccaucaacaccaacuccagccccgacgaccagaucggguacuaccggcgcgccacgcggcgcauccggggcggggacggcaagaugaaggaccugagcccccgcugguacuucuacuaccucggcaccgggccggaggccggccugcccuacggggccaacaaggacggcaucaucugggucgcgaccgagggcgcccugaacacccccaaggaccacaucgggacgcggaaccccgccaacaacgccgcgaucgugcuccagcugccgcagggcaccacccugcccaagggguucuacgccgagggcucccgcgggugcucccaggccagcucccggagcuccagccgcucccggaacagcucccgcaacagcacccccggcagcucccggggcacgagccccgcccgcauggccgggaacggcggggacgcggcccucgcccugcugcuccuggaccggcugaaccagcucgaguccaagaugagcggcaaggggcagcagcagcagggccagaccgugaccaagaaguccgccgccgaggcgagcaagaagccgcgccagaagcgcaccgccacgaaggccuacaacgucacccaggccuucggccggcgcgggcccgagcagacccagggcaacuucggggaccaggagcugauccggcagggcaccgacuacaagcacuggccccagaucgcccaguucgcgcccuccgccagcgccuucuucgggaugucccgcaucggcauggaggugacgccgagcggcaccuggcugaccuacaccggggccaucaagcucgacgacaaggaccccaacuucaaggaccaggugauccugcugaacaagcacaucgacgccuacaagacguucccgcccaccgagcccaagaaggacaagaagaagaaggcggacgagacccaggcccucccccagcggcagaagaagcagcagaccgucacgcugcugcccgccgccgaccucgacgacuucuccaagcagcugcagcagagcauguccagcgcggacuccacccaggccugaggacuaguuauaagacugacuagcccgaugggccucccaacgggcccuccuccccuccuugcaccgagauuaauaaaaaaaaaaaaaaaaaaaaaaaaaaaaaaaaaaaaaaaaaaaaaaaaaaaaaaaaaaaaaaaaugcaucccccccccccccccccccccccccccccccaaaggcucuuuucagagccaccagaauu

SEQ ID NO: 20996 - RNA, 1477 nt, Artificial Sequence
  SARS-CoV-2__MT873208.1__nucleocapsid protein (N) mRNA gc
aggagaaagcuuaccaugagcgacaacggcccccagaaccagcgcaacgccccgcggaucaccuucgggggccccuccgacagcaccggguccaaccagaacggcgagcgcgggggcgcccggagcaagcagcgccggccccagggccugcccaacaacacggcguccugguucaccgcccucacccagcacgggaaggaggaccugaaguucccgcgcggccagggggugcccaucaacaccaacagcucccccgacgaccagaucggcuacuaccggcgcgccacgcggcgcauccgcgggggcgacggcaagaugaaggaccugagcccccggugguacuucuacuaccucgggaccggcccggaggccgggcugcccuacggcgccaacaaggacggcaucaucugggucgcgaccgagggggcccugaacacccccaaggaccacaucggcacgcggaaccccgccaacaacgccgcgaucgugcuccagcugccgcaggggaccacccugcccaagggcuucuacgccgaggggucccgcggcggcagccaggccuccagccgguccagcucccgcagccggaacuccagccgcaacuccacccccgggagcagccggggcacgucccccgcccgcauggccgggaacggcggggacgcggcccucgcccugcugcuccuggaccggcugaaccagcucgagagcaagauguccggcaagggccagcagcagcaggggcagaccgugaccaagaaguccgccgccgaggcgagcaagaagccgcgccagaagcgcaccgccacgaaggccuacaacgucacccaggccuucggccggcgcgggcccgagcagacccagggcaacuucggggaccaggagcugauccggcagggcaccgacuacaagcacuggccccagaucgcccaguucgcgcccagcgccuccgccuucuucggcaugagccgcaucgggauggaggugacgccguccggcaccuggcugaccuacaccggggccaucaagcucgacgacaaggaccccaacuucaaggaccaggugauccugcugaacaagcacaucgacgccuacaagacguucccgcccaccgagcccaagaaggacaagaagaagaaggcggacgagacccaggcccucccccagcggcagaagaagcagcagaccgucacgcugcugcccgccgccgaccucgacgacuucagcaagcagcugcagcaguccaugagcuccgcggacagcacccaggccugaggacuaguuauaagacugacuagcccgaugggccucccaacgggcccuccuccccuccuugcaccgagauuaauaaaaaaaaaaaaaaaaaaaaaaaaaaaaaaaaaaaaaaaaaaaaaaaaaaaaaaaaaaaaaaaaugcaucccccccccccccccccccccccccccccccaaaggcucuuuucagagccaccagaauu

SEQ ID NO: 20997 - RNA, 1477 nt, Artificial Sequence
  SARS-CoV-2__MT873268.1__nucleocapsid protein (N) mRNA gc
aggagaaagcuuaccaugagcgacaacggcccccagaaccagcgcaacgccccgcggaucaccuucgggggccccuccgacagcaccggguccaaccagaacggcgagcgcagcggggcccgguccaagcagcgccggccccagggccugcccaacaacacggcgagcugguucaccgcccucacccagcacggcaaggaggaccugaaguucccgcgcgggcagggcgugcccaucaacaccaacuccagccccgacgaccagaucggguacuaccggcgcgccacgcggcgcauccggggcggggacggcaagaugaaggaccugagcccccgcugguacuucuacuaccucggcaccgggccggaggccggccugcccuacggggccaacaaggacggcaucaucugggucgcgaccgagggcgcccugaacacccccaaggaccacaucgggacgcggaaccccgccaacaacgccgcgaucgugcuccagcugccgcagggcaccacccugcccaagggguucuacgccgagggcucccgcgggggcucccaggccagcucccggagcuccagccgcucccggaacagcucccgcaacagcacccccggcagcucccgggggacgagccccgcccgcauggccggcaacgggggcgacgcggcccucgcccugcugcuccuggaccggcugaaccagcucgaguccaagaugagcgggaagggccagcagcagcagggccagaccgugaccaagaaguccgccgccgaggcgagcaagaagccgcgccagaagcgcaccgccacgaaggccuacaacgucacccaggccuucgggcggcgcggccccgagcagacccaggggaacuucggcgaccaggagcugauccggcaggggaccgacuacaagcacuggccccagaucgcccaguucgcgcccuccgccagcgccuucuucggcaugucccgcaucggcauggaggugacgcugagcgggaccuggcucaccuacaccggcgccaucaagcuggacgacaaggacccgaacuucaaggaccaggugauccugcucaacaagcacaucgacgccuacaagacguucccgcccaccgagcccaagaaggacaagaagaagaaggcggacgagacccaggcccugccccagcggcagaagaagcagcagaccgucacgcugcuccccgccgccgaccuggacgacuucuccaagcagcugcagcagagcauguccagcgcggacuccacccaggccugaggacuaguuauaagacugacuagcccgaugggccucccaacgggcccuccuccccuccuugcaccgagauuaauaaaaaaaaaaaaaaaaaaaaaaaaaaaaaaaaaaaaaaaaaaaaaaaaaaaaaaaaaaaaaaaaugcaucccccccccccccccccccccccccccccccaaaggcucuuuucagagccaccagaauu

SEQ ID NO: 20998 - RNA, 1477 nt, Artificial Sequence
  SARS-CoV-2__MT873270.1__nucleocapsid protein (N) mRNA gc
aggagaaagcuuaccaugagcgacaacggcccccagaaccagcgcaacgccccgcggaucaccuucgggggccccuccgacagcaccggguccaaccagaacggcgagcgcaucggggcccggagcaagcagcgccggccccagggccugcccaacaacacggcguccugguucaccgcccucacccagcacggcaaggaggaccugaaguucccgcgcgggcagggcgugcccaucaacaccaacagcucccccgacgaccagaucggguacuaccggcgcgccacgcggcgcauccggggcggggacggcaagaugaaggaccugagcccccgcugguacuucuacuaccucggcaccgggccggaggccggccugcccuacggggccaacaaggacggcaucaucugggucgcgaccgagggcgcccugaacacccccaaggaccacaucgggacgcggaaccccgccaacaacgccgcgaucgugcuccagcugccgcagggcaccacccugcccaagggguucuacgccgagggcucccgcgggggcagccaggccuccagccgguccagcucccgcagccggaacuccagccgcaacuccacccccggcagcagccgggggacgucccccgcccgcauggccggcaacgggggcgacgcggcccucgcccugcugcuccuggaccggcugaaccagcucgagagcaagauguccgggaagggccagcagcagcagggccagaccgugaccaagaaguccgccgccgaggcgagcaagaagccgcgccagaagcgcaccgccacgaaggccuacaacgucacccaggccuucgggcggcgcggccccgagcagacccaggggaacuucggcgaccaggagcugauccggcaggggaccgacuacaagcacuggccccagaucgcccaguucgcgcccagcgccuccgccuucuucggcaugagccgcaucggcauggaggugacgccguccgggaccuggcugaccuacaccggcgccaucaagcucgacgacaaggaccccaacuucaaggaccaggugauccugcugaacaagcacaucgacgccuacaagacguucccgcccaccgagcccaagaaggacaagaagaagaaggcggacgagacccaggcccucccccagcggcagaagaagcagcagaccgucacgcugcugcccgccgccgaccucgacgacuucagcaagcagcugcagcaguccaugagcuccgcggacagcacccaggccugaggacuaguuauaagacugacuagcccgaugggccucccaacgggcccuccuccccuccuugcaccgagauuaauaaaaaaaaaaaaaaaaaaaaaaaaaaaaaaaaaaaaaaaaaaaaaaaaaaaaaaaaaaaaaaaaugcaucccccccccccccccccccccccccccccccaaaggcucuuuucagagccaccagaauu

SEQ ID NO: 20999 - RNA, 1477 nt, Artificial Sequence
  SARS-CoV-2__MT873290.1__nucleocapsid protein (N) mRNA gc
aggagaaagcuuaccaugagcgacaacggcccccagaaccagcgcaacgccccgcggaucaccuucgggggccccuccgacagcaccggguccaaccagaacggcgagcgcagcggggcccgguccaagcagcgccggccccagggccugcccaacaacacggcgagcugguucaccgcccucacccagcacggcaaggaggaccugaaguucccgcgcgggcagggcgugcccaucaacaccaacuccagccccgacgaccagaucggguacuaccggcgcgccacgcggcgcauccggggcggggacggcaagaugaaggaccugagcccccgcugguacuucuacuaccucggcaccgggccggaggccggccugcccuacggggccaacaaggacggcaucaucugggucgcgaccgagggcgcccugaacacccccaaggaccacaucgggacgcggaaccccgccaacaacgccgcgaucgugcuccagcugagccagggcaccacccugccgaagggguucuacgccgagggcucccgcgggggcagccaggccuccagccgguccagcucccgcagccggaacuccagccgcaacagcacccccggcuccagccgggggacgucccccgcccgcauggccggcaacgggggcgacgcggcccucgcccugcugcuccuggaccggcugaaccagcucgagagcaagauguccgggaagggccagcagcagcagggccagaccgugaccaagaaguccgccgccgaggcguccaagaagccccgccagaagcgcaccgccacgaaggccuacaacgucacccaggccuucgggcggcgcggcccggagcagacccaggggaacuucggcgaccaggagcugauccggcaggggaccgacuacaagcacuggccccagaucgcccaguucgcgcccagcgccuccgccuucuucggcaugagccgcaucggcauggaggugacgcccuccgggaccuggcugaccuacaccggcgccaucaagcucgacgacaaggacccgaacuucaaggaccaggugauccugcugaacaagcacaucgacgccuacaagacguucccgcccaccgagcccaagaaggacaagaagaagaaggcggacgagacccaggcccucccccagcggcagaagaagcagcagaccgucacgcugcugcccgccgccgaccucgacgacuucagcaagcagcugcagcaguccaugagcuccgcggacagcacccaggccugaggacuaguuauaagacugacuagcccgaugggccucccaacgggcccuccuccccuccuugcaccgagauuaauaaaaaaaaaaaaaaaaaaaaaaaaaaaaaaaaaaaaaaaaaaaaaaaaaaaaaaaaaaaaaaaaugcaucccccccccccccccccccccccccccccccaaaggcucuuuucagagccaccagaauu

SEQ ID NO: 21000 - RNA, 1477 nt, Artificial Sequence
  SARS-CoV-2__MT873300.1__nucleocapsid protein (N) mRNA gc
aggagaaagcuuaccaugagcgacaacggcccccagaaccagcgcaacgccccgcggaucaccuucgggggccccuccgacagcaccggguccaaccagaacggcgagcgcagcgggucccggagcaagcagcgccggccccagggccugcccaacaacacggccuccugguucaccgcgcucacccagcacggcaaggaggaccugaaguucccgcgcgggcagggcgugcccaucaacaccaacagcucccccgacgaccagaucggguacuaccggcgcgccacgcggcgcauccggggcggggacggcaagaugaaggaccugagcccccgcugguacuucuacuaccucggcaccgggccggaggccggccugcccuacggggccaacaaggacggcaucaucugggucgccaccgagggcgcgcugaacacccccaaggaccacaucgggacgcggaaccccgccaacaacgccgccaucgugcuccagcugccgcagggcaccacccugcccaagggguucuacgcggagggcucccgcgggggcagccaggccuccagccgguccagcucccgcagccggaacuccagccgcaacagcacccccggcuccagccgggggacgucccccgcccgcauggccggcaacgggggcgacgccgcgcucgcccugcugcuccuggaccggcugaaccagcucgagagcaagauguccgggaagggccagcagcagcagggccagaccgugaccaagaaguccgccgccgaggccagcaagaagccgcgccagaagcgcaccgcgacgaaggccuacaacgucacccaggccuucgggcggcgcggccccgagcagacccaggggaacuucggcgaccaggagcugauccggcaggggaccgacuacaagcacuggccccagaucgcccaguucgcccccagcgcguccgccuucuucggcaugagccgcaucggcauggaggugacgccguccgggaccuggcugaccuacaccggcgccaucaagcucgacgacaaggaccccaacuucaaggaccaggugauccugcugaacaagcacaucgacgccuacaagacguucccgcccaccgagcccaagaaggacaagaagaagaaggccgacgagacccaggcgcucccccagcggcagaagaagcagcagaccgucacgcugcugcccgccgccgaccucgacgacuucagcaagcagcugcagcaguccaugagcuccgccgacagcacccaggcgugaggacuaguuauaagacugacuagcccgaugggccucccaacgggcccuccuccccuccuugcaccgagauuaauaaaaaaaaaaaaaaaaaaaaaaaaaaaaaaaaaaaaaaaaaaaaaaaaaaaaaaaaaaaaaaaaugcaucccccccccccccccccccccccccccccccaaaggcucuuuucagagccaccagaauu

SEQ ID NO: 21001 - RNA, 1477 nt, Artificial Sequence
  SARS-CoV-2__MT873324.1__nucleocapsid protein (N) mRNA gc
aggagaaagcuuaccaugagcgacaacggcccccagaaccagcgcaacgccccgcggaucaccuucgggggccccuccgacagcaccggguccaaccagaacggcgagcgcagcggggcccgguccaagcagcgccggccccagggccugcccaacaacacggcgagcugguucaccgcccucacccagcacggcaaggaggaccugaaguucccgcgcgggcagggcgugcccaucaacaccaacuccagccccgacgaccagaucggguacuaccggcgcgccacgcggcgcauccggggcggggacggcaagaugaaggaccugagcccccgcugguacuucuacuaccucggcaccgggccggaggccggccugcccuacggggccaacaaggacggcaucaucugggucgcgaccgagggcgcccugaacacccccaaggaccacaucgggacgcggaaccccgccaacaacgccgcgaucgugcuccagcugccgcagggcaccacccugcccaagggguucuacgccgagggcucccgcgggggcucccaggccagcucccggagcuccagccgcucccggaacagcucccgcaacagcacccccggcagcucccgggggacgagccccgcccgcauggccggcaacgggggcgacgcggcccucgcccugcugcuccuggaccggcugaaccagcucgaguccaagaugagcgggaagggccagcagcagcagggccagaccgugaccaagaaguccgccgccgaggcgagcaagaagccgcgccagaagcgcaccgccacgaaggccuacaacgucacccaggccuucgggcggcgcggccccgagcagacccaggggaacuucggcgaccaggagcugauccggcaggggaccgacuacaagcacuggccccagaucgcccaguucgcgcccuccgccagcgccuucuucggcaugucccgcaucggcauggaggugacgccgagcgggaccuggcugaccuacaccggcuccaucaagcucgacgacaaggaccccaacuucaaggaccaggugauccugcugaacaagcacaucgacgccuacaagacguucccgcccaccgagcccaagaaggacaagaagaagaaggccgacgagacccaggcgcucccccagcggcagaagaagcagcagaccgucacgcugcugcccgccgccgaccucgacgacuucagcaagcagcugcagcaguccaugagcuccgccgacagcacccaggcgugaggacuaguuauaagacugacuagcccgaugggccucccaacgggcccuccuccccuccuugcaccgagauuaauaaaaaaaaaaaaaaaaaaaaaaaaaaaaaaaaaaaaaaaaaaaaaaaaaaaaaaaaaaaaaaaaugcaucccccccccccccccccccccccccccccccaaaggcucuuuucagagccaccagaauu

SEQ ID NO: 21002 - RNA, 1477 nt, Artificial Sequence
  SARS-CoV-2__MT873376.1__nucleocapsid protein (N) mRNA gc
aggagaaagcuuaccaugagcgacaacggcccccagaaccagcgcaacgccccgcggaucaccuucgggggccccuccgacagcaccggguccaaccagaacggcgagcgcagcggggcccgguccaagcagcgccggccccagggccugcccaacaacacggcgagcugguucaccgcccucacccagcacggcaaggaggaccugaaguucccgcgcgggcagggcgugcccaucaacaccaacuccagccccgacgaccagaucggguacuaccggcgcgccacgcggcgcauccggggcggggacggcaagaugaaggaccugagcccccgcugguacuucuacuaccucggcaccgggccggaggccggccugcccuacggggccaacaaggacggcaucaucugggucgcgaccgagggcgcccugaacacccccaaggaccacaucgggacgcggaaccccgccaacaacgccgcgaucgugcuccagcugccgcagggcaccacccugcccaagggguucuacgccgagggcucccgcgggggcucccaggccagcucccggagcuccagccgcucccggaacagcucccgcaacagcacccccggcagcucccgggggacgagccccgcccgcauggccggcaacgggggcgacgcggcccucgcccugcugcuccuggaccggcugaaccagcucgaguccaagaugagcgggaagggccagcagcagcagggccagaccgugaccaagaaguccgccgccgaggcgagcaagaagccgcgccagaagcgcaccgccacgaaggccuacaacgucacccaggccuucgggcggcgcggccccgagcagacccaggggaacuucggcgaccaggagcugauccggcaggggaccgacuacaagcacuggccccagaucgcccaguucgcgcccuccgccagcgccuucuucggcaugucccgcaucggcauggaggugacgccgagcgggaccuggcugaccuacaccggcgccaucaagcucgacgacaaggaccccaacuucaaggaccaggugauccugcugaacaagcacaucgacgccuacaagacguucccgcccaccgagcccaagaaggacaagaagaagaaggcguacgagacccaggcccucccccagcggcagaagaagcagcagaccgucacgcugcugcccgccgccgaccucgacgacuucuccaagcagcugcagcagagcauguccagcgcggacuccacccaggccugaggacuaguuauaagacugacuagcccgaugggccucccaacgggcccuccuccccuccuugcaccgagauuaauaaaaaaaaaaaaaaaaaaaaaaaaaaaaaaaaaaaaaaaaaaaaaaaaaaaaaaaaaaaaaaaaugcaucccccccccccccccccccccccccccccccaaaggcucuuuucagagccaccagaauu

SEQ ID NO: 21003 - RNA, 1477 nt, Artificial Sequence
  SARS-CoV-2__MT873378.1__nucleocapsid protein (N) mRNA gc
aggagaaagcuuaccaugagcgacaacggcccccagaaccagcgcaacgccccgcggaucaccuucgggggccccuccgacagcaccggguccaaccagaacggcgagcgcagcggggcccgguccaagcagcgccggccccagggccugcccaacaacacggcgagcugguucaccgcccucacccagcacggcaaggaguaccugaaguucccgcgcgggcagggcgugcccaucaacaccaacuccagccccgacgaccagaucggguacuaccggcgcgccacgcggcgcauccggggcggggacggcaagaugaaggaccugagcccccgcugguacuucuacuaccucggcaccgggccggaggccggccugcccuacggggccaacaaggacggcaucaucugggucgcgaccgagggcgcccugaacacccccaaggaccacaucgggacgcggaaccccgccaacaacgccgcgaucgugcuccagcugccgcagggcaccacccugcccaagggguucuacgccgagggcucccgcgggggcucccaggccagcucccggagcuccagccgcucccggaacagcucccgcaacagcacccccggcagcucccgggggacgagccccgcccgcauggccggcaacgggggcgacgcggcccucgcccugcugcuccuggaccggcugaaccagcucgaguccaagaugagcgggaagggccagcagcagcagggccagaccgugaccaagaaguccgccgccgaggcgagcaagaagccgcgccagaagcgcaccgccacgaaggccuacaacgucacccaggccuucgggcggcgcggccccgagcagacccaggggaacuucggcgaccaggagcugauccggcaggggaccgacuacaagcacuggccccagaucgcccaguucgcgcccuccgccagcgccuucuucggcaugucccgcaucggcauggaggugacgccgagcgggaccuggcugaccuacaccggcgccaucaagcucgacgacaaggaccccaacuucaaggaccaggugauccugcugaacaagcacaucgacgccuacaagacguucccgcccaccgagcccaagaaggacaagaagaagaaggcggacgagacccaggcccucccccagcggcagaagaagcagcagaccgucacgcugcugcccgccgccgaccucgacgacuucuccaagcagcugcagcagagcauguccagcgcggacuccacccaggccugaggacuaguuauaagacugacuagcccgaugggccucccaacgggcccuccuccccuccuugcaccgagauuaauaaaaaaaaaaaaaaaaaaaaaaaaaaaaaaaaaaaaaaaaaaaaaaaaaaaaaaaaaaaaaaaaugcaucccccccccccccccccccccccccccccccaaaggcucuuuucagagccaccagaauu

SEQ ID NO: 21004 - RNA, 1477 nt, Artificial Sequence
  SARS-CoV-2__MT873381.1__nucleocapsid protein (N) mRNA gc
aggagaaagcuuaccaugagcgacaacggcccccagaaccagcgcaacgccccgcggaucaccuucgggggccccuccgacagcaccggguccaaccagaacggcgagcgcagcggggcccgguccaagcagcgccggccccagggccugcccaacaacacggcgagcugguucaccgcccucacccagcacggcaaggaggaccugaaguucccgcgcgggcagggcgugcccaucaacaccaacuccagccccgacgaccagaucggguacuaccggcgcgccacgcggcgcauccggggcggggacggcaagaugaaggaccugagcccccgcugguacuucuacuaccucggcaccgggccggaggccggccugcccuacggggccaacaaggacggcaucaucugggucgcgaccgagggcgcccugaacacccccaaggaccacaucgggacgcggaaccccgccaacaacgccgcgaucgugcuccagcugccgcagggcaccacccugcccaagggguucuacgccgagggcucccgcgggggcucccaggccagcucccggagcuccagccgcucccggaacagcucccgcaacagcacccccggcagcucccgggggacgagccccgcccgcauggccggcaacgggggcgacgcggcccucgcccugcugcuccuggaccggcugaaccagcucgaguccaagaugagcgggaagggccagcagcagcagggccagaccgugaccaagaaguccgccgccgaggcgagcaagaagccgcgccagaagcgcaccgccacgaaggccuacaacgucacccaggccuucgggcggcgcggccccgagcagacccaggggaacuucggcgaccaggagcugauccggcaggggaccgacuacaagcacuggccccagaucgcccaguucgcgcccuccgccagcgccuucuucggcaugucccgcaucggcauggaggugacgccgagcgggaccuggcugaccuacaccggcgccaucaagcucgacgacaaggaccccaacuucaaggaccaggugauccugcugaacaagcacaucgacgccuacaagacguucccgcccaccgagcccaagaaggacaagaagaagaaggcggacgagacccaggcccucccccagcggcagaagaagcagcagaccgucauccugcugcccgccgccgaccucgacgacuucuccaagcagcugcagcagagcauguccagcgcggacuccacgcaggccugaggacuaguuauaagacugacuagcccgaugggccucccaacgggcccuccuccccuccuugcaccgagauuaauaaaaaaaaaaaaaaaaaaaaaaaaaaaaaaaaaaaaaaaaaaaaaaaaaaaaaaaaaaaaaaaaugcaucccccccccccccccccccccccccccccccaaaggcucuuuucagagccaccagaauu

SEQ ID NO: 21005 - RNA, 1477 nt, Artificial Sequence
  SARS-CoV-2__MT873396.1__nucleocapsid protein (N) mRNA gc
aggagaaagcuuaccaugagcgacaacggcccccagaaccagcgcaacgccccgcggaucaccuucgggggccccuccgacagcaccggguccaaccagaacggcgagcgcagcggggcccgguccaagcagcgccggccccagggccugcccaacaacacggcgagcugguucaccgcccucacccagcacggcaaggaggaccugaaguucccgcgcgggcagggcgugcccaucaacaccaacuccagccccgacgaccagaucggguacuaccggcgcgccacgcggcgcauccggggcggggacggcaagaugaaggaccugagcccccgcugguacuucuacuaccucggcaccgggccggaggccggccugcccuacggggccaacaaggacggcaucaucugggucgcgaccgagggcgcccugaacacccccaaggaccacaucgggacgcggaaccccgccaacaacgccgcgaucgugcuccagcugccgcagggcaccacccugcccaagggguucuacgccgagggcucccgcgggggcucccaggccagcucccggagcuccagccgcucccggaacagcucccgcaacagcacccccggcagcucccgggggacgagccccgcccgcauggugggcaacgggggcgacgccgcgcucgcccugcugcuccuggaccggcugaaccagcucgaguccaagaugagcgggaagggccagcagcagcagggccagaccgucaccaagaaguccgccgccgaggccagcaagaagccgcgccagaagcgcaccgcgacgaaggccuacaacgugacccaggccuucgggcggcgcggccccgagcagacccaggggaacuucggcgaccaggagcugauccggcaggggaccgacuacaagcacuggccccagaucgcccaguucgcccccuccgcgagcgccuucuucggcaugucccgcaucggcauggaggugacgccgagcgggaccuggcugaccuacaccggcgccaucaagcucgacgacaaggaccccaacuucaaggaccaggucauccugcugaacaagcacaucgacgccuacaagacguucccgcccaccgagcccaagaaggacaagaagaagaaggccgacgagacccaggcgcucccccagcggcagaagaagcagcagaccgugacgcugcugcccgccgccgaccucgacgacuucuccaagcagcugcagcagagcauguccagcgccgacuccacccaggcgugaggacuaguuauaagacugacuagcccgaugggccucccaacgggcccuccuccccuccuugcaccgagauuaauaaaaaaaaaaaaaaaaaaaaaaaaaaaaaaaaaaaaaaaaaaaaaaaaaaaaaaaaaaaaaaaaugcaucccccccccccccccccccccccccccccccaaaggcucuuuucagagccaccagaauu

SEQ ID NO: 21006 - RNA, 1477 nt, Artificial Sequence
  SARS-CoV-2__MT873497.1__nucleocapsid protein (N) mRNA gc
aggagaaagcuuaccaugagcgacaacggcccccagaaccagcgcaacgccccgcggaucaccuucgggggccccuccgacagcaccggguccaaccagaacggcgagcgcagcggggcccgguccaagcagcgccggccccagggccugcccaacaacacggcgagcugguucaccgcccucacccagcacggcaaggaggaccugaaguucccgcgcgggcagggcgugcccaucaacaccaacuccagccccgacgaccagaucggguacuaccggcgcgccacgcggcgcauccggggcggggacggcaagaugaaggaccugagcccccgcugguacuucuacuaccucggcaccgggccggaggccggccugcccuacggggccaacaaggacggcaucaucugggucgcgaccgagggcgcccugaacacccccaaggaccacaucgggacgcggaaccccgccaacaacgccgcgaucgugcuccagcugccgcagggcaccacccugcccaagggguucuacgccgagggcagccgcgggggcucccaggccagcucccggagcuccagccgcucccggaacagcucccgcaacagcacccccggcagcucccgggggacgagccccucccgcauggccggcaacgggggcgacgccgcgcucgcccugcugcuccuggaccggcugaaccagcucgagagcaagauguccgggaagggccagcagcagcagggccagaccgugaccaagaaguccgccgccgaggccuccaagaagccgcgccagaagcgcaccgcgacgaaggccuacaacgucacccaggccuucgggcggcgcggccccgagcagacccaggggaacuucggcgaccaggagcugauccggcaggggaccgacuacaagcacuggccccagaucgcccaguucgcccccagcgcguccgccuucuucggcaugagccgcaucggcauggaggugacgccguccgggaccuggcugaccuacaccggcgccaucaagcucgacgacaaggaccccaacuucaaggaccaggugauccugcugaacaagcacaucgacgccuacaagacguucccgcccaccgagcccaagaaggacaagaagaagaaggccgacgagacccaggcgcucccccagcggcagaagaagcagcagaccgucacgcugcugcccgccgccgaccucgacgacuucagcaagcagcugcagcaguccaugagcuccgccgacagcacccaggcgugaggacuaguuauaagacugacuagcccgaugggccucccaacgggcccuccuccccuccuugcaccgagauuaauaaaaaaaaaaaaaaaaaaaaaaaaaaaaaaaaaaaaaaaaaaaaaaaaaaaaaaaaaaaaaaaaugcaucccccccccccccccccccccccccccccccaaaggcucuuuucagagccaccagaauu

SEQ ID NO: 21007 - RNA, 1477 nt, Artificial Sequence
  SARS-CoV-2__MT876556.1__nucleocapsid protein (N) mRNA gc
aggagaaagcuuaccaugagcgacaacggcccccagaaccagcgcgacgccccgcggaucaccuucgggggccccuccgacagcaccggguccaaccagaacggcgagcgcagcggggcccgguccaagcagcgccggccccagggccugcccaacaacacggcgagcugguucaccgcccucacccagcacggcaaggaggaccugaaguucccgcgcgggcagggcgugcccaucaacaccaacuccagccccgacgaccagaucggguacuaccggcgcgccacgcggcgcauccggggcggggacggcaagaugaaggaccugagcccccgcugguacuucuacuaccucggcaccgggccggaggccggccugcccuacggggccaacaaggacggcaucaucugggucgcgaccgagggcgcccugaacacccccaaggaccacaucgggacgcggaaccccgccaacaacgccgcgaucgugcuccagcugccgcagggcaccacccugcccaagggguucuacgccgagggcucccgcgggggcucccaggccagcucccggagcuccagccgcucccggaacagcucccgcaacagcacccccggcagcuccaagcggacgagccccgcccgcauggccgggaacggcggggacgcggcccucgcccugcugcuccuggaccggcugaaccagcucgaguccaagaugagcggcaaggggcagcagcagcagggccagaccgugaccaagaaguccgccgccgaggcgagcaagaagccgcgccagaagcgcaccgccacgaaggccuacaacgucacccaggccuucggccggcgcgggcccgagcagacccagggcaacuucggggaccaggagcugauccggcagggcaccgacuacaagcacuggccccagaucgcccaguucgcgcccuccgccagcgccuucuucgggaugucccgcaucggcauggaggugacgccgagcggcaccuggcugaccuacaccggggccaucaagcucgacgacaaggaccccaacuucaaggaccaggugauccugcugaacaagcacaucgacgccuacaagacguucccgcccaccgagcccaagaaggacaagaagaagaaggcggacgagacccaggcccucccccagcggcagaagaagcagcagaccgucacgcugcugcccgccgccgaccucgacgacuucuccaagcagcugcagcagagcauguccagcgcggacuccacccaggccugaggacuaguuauaagacugacuagcccgaugggccucccaacgggcccuccuccccuccuugcaccgagauuaauaaaaaaaaaaaaaaaaaaaaaaaaaaaaaaaaaaaaaaaaaaaaaaaaaaaaaaaaaaaaaaaaugcaucccccccccccccccccccccccccccccccaaaggcucuuuucagagccaccagaauu

SEQ ID NO: 21008 - RNA, 1477 nt, Artificial Sequence
  SARS-CoV-2__MT877324.1__nucleocapsid protein (N) mRNA gc
aggagaaagcuuaccaugagcgacaacggcccccagaaccagcgcaacgccccgcggaucaccuucgggggccccuccgacagcaccggguccaaccagaacggcgagcgcagcggggcccgguccaagcagcgccggccccagggccugcccaacaacacggcgagcugguucaccgcccucacccagcacggcaaggaggaccugaaguucccgcgcgggcagggcgugcccaucaacaccaacuccagccccgacgaccagaucggguacuaccggcgcgccacgcggcgcauccggggcggggacggcaagaugaaggaccugagcccccgcugguacuucuacuaccucggcaccgggccggaggccggccugcccuacggggccaacaaggacggcaucaucugggucgcgaccgagggcgcccugaacacccccaaggaccacaucgggacgcggaaccccgccaacaacgccgcgaucgugcuccagcugccgcagggcaccacccugcccaagggguucuacgccgagggcagccgcgggggcucccaggccagcucccggagcucccuccgcagccggaacuccagccgcaacuccacccccggcagcagccgggggacgucccccgcccgcauggccggcaacgggggcgacgcggcccuggcccugcuccugcuggaccggcucaaccagcuggagagcaagauguccgggaagggccagcagcagcagugccagaccgugaccaagaaguccgccgccgaggcguccaagaagccgcgccagaagcgcaccgccacgaaggccuacaacgucacccaggccuucggccggcgcgggcccgagcagacccagggcaacuucggggaccaggagcugauccggcagggcaccgacuacaagcacuggccccagaucgcccaguucgcgcccagcgccuccgccuucuucgggaugagccgcaucggcauggaggugacgccguccggcaccuggcucaccuacaccggggccaucaagcuggacgacaaggaccccaacuucaaggaccaggugauccugcucaacaagcacaucgacgccuacaagacguucccgcccaccgagcccaagaaggacaagaagaagaaggcggacgagacccaggcccugccccagcggcagaagaagcagcagaccgucacgcugcuccccgccgccgaccuggacgacuucagcaagcagcugcagcaguccaugagcuccgcggacagcacccaggccugaggacuaguuauaagacugacuagcccgaugggccucccaacgggcccuccuccccuccuugcaccgagauuaauaaaaaaaaaaaaaaaaaaaaaaaaaaaaaaaaaaaaaaaaaaaaaaaaaaaaaaaaaaaaaaaaugcaucccccccccccccccccccccccccccccccaaaggcucuuuucagagccaccagaauu

SEQ ID NO: 21009 - RNA, 1477 nt, Artificial Sequence
  SARS-CoV-2__MT872501.1__nucleocapsid protein (N) mRNA gc
aggagaaagcuuaccaugagcgacaacggcccccagaaccagcgcaacgccccgcggaucaccuucgggggccccuccgacagcaccggguccaaccagaacggcgagcgcagcggggcccgguccaagcagcgccggccccagggccugcccaacaacacggcgagcugguucaccgcccucacccagcacggcaaggaggaccugaaguucccgcgcgggcagggcgugcccaucaacaccaacuccagccccgacgaccagaucggguacuaccggcgcgccacgcggcgcauccggggcggggacggcaagaugaaggaccugagcccccgcugguacuucuacuaccucggcaccgggccggaggccggccugcccuacggggccaacaaggacggcaucaucugggucgcgaccgagggcgcccugaacacccccaaggaccacaucgggacgcggaaccccgccaacaacgccgcgaucgugcuccagcugccgcagggcaccacccugcccaagggguucuacgccgagggcagccgcgggggcucccaggccagcucccggagcuccagccgcucccggaacagcucccgcaacagcacccccggcagcaaccgggggaucucccccgcccgcauggccggcaacgggggcgacgcggcccucgcccugcugcuccuggaccggcugaaccagcucgagagcaagauguccgggaagggccagcagcagcagggccagacggugaccaagaaguccgccgccgaggcguccaagaagccgcgccagaagcgcaccgccaccaaggccuacaacgucacgcaggccuucgggcggcgcggccccgagcagacccaggggaacuucggcgaccaggagcugauccggcaggggaccgacuacaagcacuggccccagaucgcccaguucgcgcccagcgccuccgccuucuucggcaugagccgcaucggcauggaggugaccccguccgggacguggcugaccuacaccggcgccaucaagcucgacgacaaggaccccaacuucaaggaccaggugauccugcugaacaagcacaucgacgccuacaagaccuucccgcccacggagcccaagaaggacaagaagaagaaggcggacgagacccaggcccucccccagcggcagaagaagcagcagaccgucacccugcugcccgccgccgaccucgacgacuucagcaagcagcugcagcaguccaugagcuccgcggacagcacgcaggccugaggacuaguuauaagacugacuagcccgaugggccucccaacgggcccuccuccccuccuugcaccgagauuaauaaaaaaaaaaaaaaaaaaaaaaaaaaaaaaaaaaaaaaaaaaaaaaaaaaaaaaaaaaaaaaaaugcaucccccccccccccccccccccccccccccccaaaggcucuuuucagagccaccagaauu

SEQ ID NO: 21010 - RNA, 1477 nt, Artificial Sequence
  SARS-CoV-2__MT856459.1__nucleocapsid protein (N) mRNA gc
aggagaaagcuuaccaugagcgacaacggcccccagaaccagcgcaacgccucccggaucaccuucgggggcccgagcgacuccaccgggagcaaccagaacggcgagcgcuccggggcccggagcaagcagcgccggccccagggccugcccaacaacacggcguccugguucaccgcccucacccagcacggcaaggaggaccugaaguucccccgcgggcagggcgugccgaucaacaccaacagcucccccgacgaccagaucggguacuaccggcgcgccacgcggcgcauccggggcggggacggcaagaugaaggaccugagcccccgcugguacuucuacuaccucggcaccgggcccgaggccggccugccguacggggccaacaaggacggcaucaucugggucgcgaccgagggcgcccugaacacccccaaggaccacaucgggacgcggaaccccgccaacaacgccgcgaucgugcuccagcugccccagggcaccacccugccgaagggguucuacgccgagggcucccgcgggggcagccaggccuccagccgguccagcucccgcagccggaacuccagccgcaacagcacccccggcuccagcaagcggacgucccccgcccgcauggccgggaacggcggggacgcggcccucgcccugcugcuccuggaccggcugaaccagcucgagagcaagauguccggcaaggggcagcagcagcagggccagaccgugaccaagaaguccgccgccgaggcgagcaagaagccccgccagaagcgcaccgccacgaaggccuacaacgucacccaggccuucggccggcgcgggccggagcagacccagggcaacuucggggaccaggagcugauccggcagggcaccgacuacaagcacuggccccagaucgcccaguucgcgcccagcgccuccgccuucuucgggaugagccgcaucggcauggaggugacgcccuccggcaccuggcugaccuacaccggggccaucaagcucgacgacaaggacccgaacuucaaggaccaggugauccugcugaacaagcacaucgacgccuacaagacguucccgcccaccgagcccaagaaggacaagaagaagaaggcggacgagacccaggcccucccccagcggcagaagaagcagcagaccgucacgcugcugcccgccgccgaccucgacgacuucagcaagcagcugcagcaguccaugagcuccgcggacagcacccaggccugaggacuaguuauaagacugacuagcccgaugggccucccaacgggcccuccuccccuccuugcaccgagauuaauaaaaaaaaaaaaaaaaaaaaaaaaaaaaaaaaaaaaaaaaaaaaaaaaaaaaaaaaaaaaaaaaugcaucccccccccccccccccccccccccccccccaaaggcucuuuucagagccaccagaauu

SEQ ID NO: 21011 - RNA, 1477 nt, Artificial Sequence
  SARS-CoV-2__MT846004.1__nucleocapsid protein (N) mRNA gc
aggagaaagcuuaccaugagcgacaacggcccccagaaccagcgcaacgccccgcggaucaccuucgggggccccuccgacagcaccggguccaaccagaacggcgagcgcagcggggcccgguccaagcagcgccggccccagggccugcccaacaacacggcgagcugguucaccgcccucacccagcacggcaaggaggaccugaaguucccgcgcgggcagggcgugcccaucaacaccaacuccagccccgacgaccagaucggguacuaccggcgcgccacgcggcgcauccggggcggggacggcaagaugaaggaccugagcccccgcugguacuucuacuaccucggcaccgggccggaggccggccugcccuacggggccaacaaggacggcaucaucugggucgcgaccgagggcgcccugaacacccccaaggaccacaucgggacgcggaaccccgccaacaacgccgcgaucgugcuccagcugccgcagggcaccacccugcccaagggguucuacgccgagggcucccgcgggggcucccaggccagcucccggagcuccagccgcucccggaacagcucccgcaacagcacccccggcagcuccaagcggacgagccccgcccgcauggccgggaacggcggggacgcggcccucgcccugcugcuccuggaccggcugaaccagcucgaguccaagaugagcggcaaggggcagcagcagcagggccagaccgugaccaagaaguccgccgccgaggcgagcaagaagccgcgccagaagcgcaccgccacgaaggccuacaacgucacccaggccuucggccggcgcgggcccgagcagauccagggcaacuucggggaccaggagcugauccggcagggcaccgacuacaagcacuggccccagaucgcccaguucgcgcccuccgccagcgccuucuucgggaugucccgcaucggcauggaggugaccccgagcggcacguggcugaccuacaccggggccaucaagcucgacgacaaggaccccaacuucaaggaccaggugauccugcugaacaagcacaucgacgccuacaagaccuucccgcccacggagcccaagaaggacaagaagaagaaggcggacgagacccaggcccucccccagcggcagaagaagcagcagaccgucacccugcugcccgccgccgaccucgacgacuucuccaagcagcugcagcagagcauguccagcgcggacuccacgcaggccugaggacuaguuauaagacugacuagcccgaugggccucccaacgggcccuccuccccuccuugcaccgagauuaauaaaaaaaaaaaaaaaaaaaaaaaaaaaaaaaaaaaaaaaaaaaaaaaaaaaaaaaaaaaaaaaaugcaucccccccccccccccccccccccccccccccaaaggcucuuuucagagccaccagaauu

SEQ ID NO: 21012 - RNA, 1477 nt, Artificial Sequence
  SARS-CoV-2__MT846007.1__nucleocapsid protein (N) mRNA gc
aggagaaagcuuaccaugagcgacaacggcccccagaaccagcgcaacgccccgcggaucaccuucgggggccccuccgacagcaccggguccaaccagaacggcgagcgcagcggggcccgguccaagcagcgccggccccagggccugcccaacaacacggcgagcugguucaccgcccucacccagcacggcaaggaggaccugaaguucccgcgcgggcagggcgugcccaucaacaccaacuccagccccgacgaccagaucggguacuaccggcgcgccacgcggcgcauccggggcggggacggcaagaugaaggaccugagcccccgcugguacuucuacuaccucggcaccgggccggaggccggccugcccuacggggccaacaaggacggcaucaucugggucgcgaccgagggcgcccugaacacccccaaggaccacaucgggacgcggaaccccgccaacaacgccgcgaucgugcuccagcugccgcagggcaccacccugcccaagggguucuacgccgagggcucccgcgggggcucccaggccagcucccggagcuccagccgcucccggaacagcucccgcaacagcacccccggcagcuccaagcggacgagccccgcccgcauggccgggaacggcggggacgcggcccucgcccugcugcuccuggaccggcugaaccagcucgaguccaagaugagcggcaaggggcagcagcagcagggccagaccgugaccaagaaguccgccgccgaggcgagcaagaagccgcgccagaagcgcaccgccacgaaggccuacaacgucacccaggccuucggccggcgcgggcccgagcagacccagggcaacuucggggaccaggagcugauccggcagggcaccgacuacaagcacuggccccagaucgcccaguucgcgcccuccgccagcgccuucuucgggaugucccgcaucggcauggaggugacgccgagcggcaccuggcugaccuacaccggggccaucaagcucgacgacaaggaccccaacuucaaggaccaggugauccugcugaacaagcacaucgacgccuacaagacguucccgcccaccgagcccaagaaggacaagaagaagaaggcguacgagacccaggcccucccccagcggcagaagaagcagcagaccgucacgcugcugcccgccgccgaccucgacgacuucuccaagcagcugcagcagagcauguccagcgcggacuccacccaggccugaggacuaguuauaagacugacuagcccgaugggccucccaacgggcccuccuccccuccuugcaccgagauuaauaaaaaaaaaaaaaaaaaaaaaaaaaaaaaaaaaaaaaaaaaaaaaaaaaaaaaaaaaaaaaaaaugcaucccccccccccccccccccccccccccccccaaaggcucuuuucagagccaccagaauu

SEQ ID NO: 21013 - RNA, 1477 nt, Artificial Sequence
  SARS-CoV-2__MT846010.1__nucleocapsid protein (N) mRNA gc
aggagaaagcuuaccaugagcgacaacggcccccagaaccagcgcaacgccccgcggaucaccuucgggggccccuccgacagcaccggguccaaccagaacggcgagcgcagcggggcccgguccaagcagcgccggccccagggccugcccaacaacacggcgagcugguucaccgcccucacccagcacggcaaggaggaccugaaguucccgcgcgggcagggcgugcccaucaacaccaacuccagcccccacgaccagaucggguacuaccggcgcgccacgcggcgcauccggggcggggacggcaagaugaaggaccugagcccccgcugguacuucuacuaccucggcaccgggccggaggccggccugcccuacggggccaacaaggacggcaucaucugggucgcgaccgagggcgcccugaacacccccaaggaccacaucgggacgcggaaccccgccaacaacgccgcgaucgugcuccagcugccgcagggcaccacccugcccaagggguucuacgccgagggcucccgcgggggcucccaggccagcucccggagcuccagccgcucccggaacagcucccgcaacagcacccccggcagcuccaagcggacgagccccgcccgcauggccgggaacggcggggacgcggcccucgcccugcugcuccuggaccggcugaaccagcucgaguccaagaugagcggcaaggggcagcagcagcagggccagaccgugaccaagaaguccgccgccgaggcgagcaagaagccgcgccagaagcgcaccgccacgaaggccuacaacgucacccaggccuucggccggcgcgggcccgagcagacccagggcaacuucggggaccaggagcugauccggcagggcaccgacuacaagcacuggccccagaucgcccaguucgcgcccuccgccagcgccuucuucgggaugucccgcaucggcauggaggugacgccgagcggcaccuggcugaccuacaccggggccaucaagcucgacgacaaggaccccaacuucaaggaccaggugauccugcugaacaagcacaucgacgccuacaagacguucccgcccaccgagcccaagaaggacaagaagaagaaggcggacgagacccaggcccucccccagcggcagaagaagcagcagaccgucacgcugcugcccgccgccgaccucgacgacuucuccaagcagcugcagcagagcauguccagcgcggacuccacccaggccugaggacuaguuauaagacugacuagcccgaugggccucccaacgggcccuccuccccuccuugcaccgagauuaauaaaaaaaaaaaaaaaaaaaaaaaaaaaaaaaaaaaaaaaaaaaaaaaaaaaaaaaaaaaaaaaaugcaucccccccccccccccccccccccccccccccaaaggcucuuuucagagccaccagaauu

SEQ ID NO: 21014 - RNA, 1477 nt, Artificial Sequence
  SARS-CoV-2__MT846480.1__nucleocapsid protein (N) mRNA gc
aggagaaagcuuaccaugagcgacaacggcccccagaaccagcgcaacgccccgcggaucaccuucgggggccccuccgacagcaccggguccaaccagaacggcgagcgcagcggggcccgguccaagcagcgccggccccagggccugcccaacaacacggcgagcugguucaccgcccucacccagcacggcaaggaggaccugaaguucccgcgcgggcagggcgugcccaucaacaccaacuccagccccgacgaccagaucggguacuaccggcgcgccacgcggcgcauccggggcggggacggcaagaugaaggaccugagcccccgcugguacuucuacuaccucggcaccgggccggaggccggccugcccuacggggccaacaaggacggcaucaucugggucgcgaccgagggcgcccugaacacccccaaggaccacaucgggacgcggaaccccgccaacaacgccgcgaucgugcuccagcugccgcagggcaccacccugcccaagggguucuacgccgagggcucccgcgggggcucccaggccagcucccggagcuccagccgcucccggaacagcucccgcaacagcacccccggcagcuccgggggcacgagccccgcccggauggccgggaacggcggggacgcggcccucgcccugcugcuccuggaccgccugaaccagcucgaguccaagaugagcggcaagggccagcagcagcaggggcagaccgugaccaagaaguccgccgccgaggcgagcaagaagccgcggcagaagcgcaccgccacgaaggccuacaacgucacccaggccuucggccgccgggggcccgagcagacccagggcaacuucggggaccaggagcugauccgccagggcaccgacuacaagcacuggccccagaucgcccaguucgcgcccuccgccagcgccuucuucggcaugucccggaucgggauggaggugacgccgagcggcaccuggcugaccuacaccggggccaucaagcucgacgacaaggaccccaacuucaaggaccaggugauccugcugaacaagcacaucgacgccuacaagacguucucccccaccgagcccaagaaggacaagaagaagaaggcggacgagacccaggcccucccgcagcgccagaagaagcagcagaccgucacgcugcugcccgccgccgaccucgacgacuucagcaagcagcugcagcaguccaugagcuccgcggacagcacccaggccugaggacuaguuauaagacugacuagcccgaugggccucccaacgggcccuccuccccuccuugcaccgagauuaauaaaaaaaaaaaaaaaaaaaaaaaaaaaaaaaaaaaaaaaaaaaaaaaaaaaaaaaaaaaaaaaaugcaucccccccccccccccccccccccccccccccaaaggcucuuuucagagccaccagaauu

SEQ ID NO: 21015 - RNA, 1477 nt, Artificial Sequence
  SARS-CoV-2__MT846494.1__nucleocapsid protein (N) mRNA gc
aggagaaagcuuaccaugagcgacaacggcccccagaaccagcgcaacgccccgcggaucaccuucgggggccccuccgacagcaccggguccaaccagaacggcgagcgcagcggggcccgguccaagcagcgccggccccagggccugcccaacaacacggcgagcugguucaccgcccucacccagcacggcaaggaggaccugaaguucccgcgcgggcagggcgugcccaucaacaccaacuccagccccgacgaccagaucggguacuaccggcgcgccacgcggcgcauccggggcggggacggcaagaugaaggaccugagcccccgcugguacuucuacuaccucggcaccgggccggaggccggccugcccuacggggccaacaaggacggcaucaucugggucgcgaccgagggcgcccugaacacccccaaggaccacaucgggacgcggaaccccgccaacaacgccgcgaucgugcuccagcugccgcagggcaccacccugcccaagggguucuacgccgagggcagccgcgggggcucccaggccagcucccggagcuccagccgcucccggaacagcucccgcaacagcacccccggcagcuccagcgggacgucccccgcccggauggccggcaacgggggcgacgcggcccucgcccugcugcuccuggaccgccugaaccagcucgagagcaagauguccgggaagggccagcagcagcagggccagaccgugaccaagaaguccgccgccgaggcguccaagaagccgcggcagaagcgcaccgccacgaaggccuacaacgucacccaggccuucgggcgccggggccccgagcagacccaggggaacuucggcgaccaggagcugauccgccaggggaccgacuacaagcacuggccccagaucgcccaguucgcgcccagcgccuccgccuucuucggcaugagccggaucggcauggaggugacgccguccgggaccuggcugaccuacaccggcgccaucaagcucgacgacaaggaccccaacuucaaggaccaggugauccugcugaacaagcacaucgacgccuacaagacguucccgcccaccgagcccaagaaggacaagaagaagaaggcggacgagacccaggcccucccccagcgccagaagaagcagcagaccgucacgcugcugcccgccgccgaccucgacgacuucagcaagcagcugcagcaguccaugagcuccgcggacagcacccaggccugaggacuaguuauaagacugacuagcccgaugggccucccaacgggcccuccuccccuccuugcaccgagauuaauaaaaaaaaaaaaaaaaaaaaaaaaaaaaaaaaaaaaaaaaaaaaaaaaaaaaaaaaaaaaaaaaugcaucccccccccccccccccccccccccccccccaaaggcucuuuucagagccaccagaauu

SEQ ID NO: 21016 - RNA, 1477 nt, Artificial Sequence
  SARS-CoV-2__MT846526.1__nucleocapsid protein (N) mRNA gc
aggagaaagcuuaccaugagcgacaacggcccccagaaccagcgcaacgccccgcggaucaccuucgggggccccuccgacagcaccggguccaaccagaacggcgagcgcagcggggcccgguccaagcagcgccggccccagggccugcccaacaacacggcgagcugguucaccgcccucacccagcacggcaaggaggaccugaaguucccgcgcgggcagggcgugcccaucaacaccaacuccagccccgacgaccagaucggguacuaccggcgcgccacgcggcgcauccggggcggggacggcaagaugaaggaccugagcccccgcugguacuucuacuaccucggcaccgggccggaggccggccugcccuacggggccaacaaggacggcaucaucugggucgcgaccgagggcgcccugaacacccccaaggaccacaucgggacgcggaaccccgccaacaacgccgcgaucgugcuccagcugccgcagggcaccacccugcccaagggguucuacgccgagggcucccgcgggggcucccaggccagcucccggagcuccagccgcucccggaacagcucccgcaacagcacccccggcagcucccgggggacgagccccgcccgcauggccggcaacgggggcgacgcggcccucgcccugcugcuccuggaccggcugaaccagcucgaguccaagaugagcgggaagggccagcagcagcagggccagaccgugaccaagaaguccgccgccgaggcgagcaagaagccgcgccagaagcgcaccgccacgaaggccuacaacgucacccaggccuucgggcggcgcggccccgagcagacccaggggaacuucggcgaccaggagcugauccggcaggggaccgacuacaagcacuggccccagaucgcccaguucgcgcccuccgccagcgccuucuucggcaugucccgcaucggcauggaggugacgccgagcgggaccuggcugaccuacaccggcgccaucaagcucgacgacaaggaccccaacuucaaggaccaggugauccugcugaacaagcacaucgacgccuacaagacguucccgcccaccgagcccaagaaggacaagaagaagaaggcggacgagauccaggcccucccccagcggcagaagaagcagcagaccgucacccugcugcccgccgccgaccucgacgacuucuccaagcagcugcagcagagcauguccagcgcggacuccacgcaggccugaggacuaguuauaagacugacuagcccgaugggccucccaacgggcccuccuccccuccuugcaccgagauuaauaaaaaaaaaaaaaaaaaaaaaaaaaaaaaaaaaaaaaaaaaaaaaaaaaaaaaaaaaaaaaaaaugcaucccccccccccccccccccccccccccccccaaaggcucuuuucagagccaccagaauu

SEQ ID NO: 21017 - RNA, 1477 nt, Artificial Sequence
  SARS-CoV-2__MT846598.1__nucleocapsid protein (N) mRNA gc
aggagaaagcuuaccaugagcgacaacggcccccagaaccagcgcaacgccccgcggaucaccuucgggggccccuccgacagcaccggguccaaccagaacggcgagcgcagcggggcccgguccaagcagcgccggccccagggccugcccaacaacacggcgagcugguucaccgcccucacccagcacggcaaggaggaccugaaguucccgcgcgggcagggcgugcccaucaacaccaacuccagccccgacgaccagaucggguacuaccggcgcgccacgcggcgcauccggggcggggacggcaagaugaaggaccugagcccccgcugguacuucuacuaccucggcaccgggccggaggccggccugcccuacggggccaacaaggacggcaucaucugggucgcgaccgagggcgcccugaacacccccaaggaccacaucgggacgcggaaccccgccaacaacgccgcgaucgugcuccagcugccgcagggcaccacccugcccaagggguucuacgccgagggcucccgcgggggcucccaggccagcucccggagcuccagccgcucccggaacagcucccgcaacagcacccccggcagcucccgggggacgagccccgcccgcauggccggcaacgggggcgacgcggcccucgcccugcugcuccuggaccggcugaaccagcucgaguccaagaugagcgggaagggccagcagcagcagggccagaccgugaccaagaaguccgccgccgaggcgagcaagaagccgcgccagaagcgcaccgccacgaaggccuacaacgucacccaggccuucgggcggcgcggccccgagcagacccaggggaacuucggcgaccaggagcugauccggcaggggaccgacuacaagcacuggccccagaucgcccaguucgcgcccuccgccagcgccuucuucggcaugucccgcaucggcauggaggugacgccgagcgggaccuggcugaccuacaccggcgccaucaagcucgacgacaaggaccccaacuucaaggaccaggugauccugcugaacaagcacaucgacgccuacaagacguucccgcccaccgagcccaagaaggacaagaagaagaaggcggacgccacccaggcccucccccagcggcagaagaagcagcagaccgucacgcugcugcccgccgcggaccucgacgacuucuccaagcagcugcagcagagcauguccagcgccgacuccacccaggccugaggacuaguuauaagacugacuagcccgaugggccucccaacgggcccuccuccccuccuugcaccgagauuaauaaaaaaaaaaaaaaaaaaaaaaaaaaaaaaaaaaaaaaaaaaaaaaaaaaaaaaaaaaaaaaaaugcaucccccccccccccccccccccccccccccccaaaggcucuuuucagagccaccagaauu

SEQ ID NO: 21018 - RNA, 1477 nt, Artificial Sequence
  SARS-CoV-2__MT846653.1__nucleocapsid protein (N) mRNA gc
aggagaaagcuuaccaugagcgacaacggcccccagaaccagcgcaacgccccgcggaucaccuucgggggccccuccgacagcaccggguccaaccagaacggcgagcgcagcggggcccgguccaagcagcgccggccccagggccugcccaacaacacggcgagcugguucaccgcccucacccagcacggcaaggaggaccugaaguucccgcgcgggcagggcgugcccaucaacaccaacuccagccccgacgaccagaucggguacuaccggcgcgccacgcggcgcauccggggcggggacggcaagaugaaggaccugagcccccgcugguacuucuacuaccucggcaccgggccggaggccggccugcccuacggggccaacaaggacggcaucaucugggucgcgaccgagggcgcccugaacacccccaaggaccacaucgggacgcggaaccccgccaacaacgccgcgaucgugcuccagcugccgcagggcaccacccugcccaagggguucuacgccgagggcucccgcgggggcucccaggccagcucccggagcuccagccgcucccggaacagcucccgcaacagcacccccggcagcucccgggggacgagccccgcccgcauggccggcaacgggggcgacgcggcccucgcccugcugcuccuggaccggcugaaccagcucgaguccaagaugagcgggaagggccagcagcagcagggccagaccgugaccaagaaguccgccgccgaggcgagcaagaagccgcgccagaagcgcaccgccacgaaggccuacaacgucacccaggccuucgggcggcgcggccccgagcagacccaggggaacuucggcgaccaggagcugauccggcaggggaccgacuacaagcacuggccccagaucgcccaguucgcgcccuccgccagcgccuucuucggcaugucccgcaucggcauggaggugacgccgagcgggaccuggcugaccuacaccggcgccaucaagcucgacgacaaggaccccaacuucaaggaccaggugauccugcugaacaagcacaucgacgccuacaagacguucccgcccaccgaguccaagaaggacaagaagaagaaggcggacgagacccaggcccucccccagcggcagaagaagcagcagaccgucacgcugcugcccgccgccgaccucgacgacuucagcaagcagcugcagcaguccaugagcuccgcggacagcacccaggccugaggacuaguuauaagacugacuagcccgaugggccucccaacgggcccuccuccccuccuugcaccgagauuaauaaaaaaaaaaaaaaaaaaaaaaaaaaaaaaaaaaaaaaaaaaaaaaaaaaaaaaaaaaaaaaaaugcaucccccccccccccccccccccccccccccccaaaggcucuuuucagagccaccagaauu

SEQ ID NO: 21019 - RNA, 1477 nt, Artificial Sequence
  SARS-CoV-2__MT846665.1__nucleocapsid protein (N) mRNA gc
aggagaaagcuuaccaugagcgacaacggcccccagaaccagcgcaacgccccgcggaucaccuucgggggccccuccgacagcaccggguccaaccagaacggcgagcgcagcggggcccgguccaagcagcgccggccccagggccugcccaacaacacggcgagcugguucaccgcccucacccagcacggcaaggaggaccugaaguucccgcgcgggcagggcgugcccaucaacaccaacuccagccccgacgaccagaucggguacuaccggcgcgccacgcggcgcauccggggcggggacggcaagaugaaggaccugagcccccgcugguacuucuacuaccucggcaccgggccggaggccggccugcacuacggggccaacaaggacggcaucaucugggucgcgaccgagggcgcccugaacacccccaaggaccacaucgggacgcggaaccccgccaacaacgccgcgaucgugcuccagcugccccagggcaccacccugccgaagggguucuacgccgagggcucccgcgggggcucccaggccagcucccggagcuccagccgcucccggaacagcucccgcaacagcacccccggcagcuccaagcggacgagccccgcccgcauggccgggaacggcggggacgcggcccucgcccugcugcuccuggaccggcugaaccagcucgaguccaagaugagcggcaaggggcagcagcagcagggccagaccgugaccaagaaguccgccgccgaggcgagcaagaagccccgccagaagcgcaccgccacgaaggccuacaacgucacccaggccuucggccggcgcgggccggagcagacccagggcaacuucggggaccaggagcugauccggcagggcaccgacuacaagcacuggccccagaucgcccaguucgcgcccuccgccagcgccuucuucgggaugucccgcaucggcauggaggugacgcccagcggcaccuggcugaccuacaccggggccaucaagcucgacgacaaggacccgaacuucaaggaccaggugauccugcugaacaagcacaucgacgccuacaagacguucccgcccaccgagcccaagaaggacaagaagaagaaggcggacgagacccaggcccucccccagcggcagaagaagcagcagaccgucacgcugcugcccgccgccgaccucgacgacuucuccaagcagcugcagcagagcauguccagcgcggacuccacccaggccugaggacuaguuauaagacugacuagcccgaugggccucccaacgggcccuccuccccuccuugcaccgagauuaauaaaaaaaaaaaaaaaaaaaaaaaaaaaaaaaaaaaaaaaaaaaaaaaaaaaaaaaaaaaaaaaaugcaucccccccccccccccccccccccccccccccaaaggcucuuuucagagccaccagaauu

SEQ ID NO: 21020 - RNA, 1477 nt, Artificial Sequence
  SARS-CoV-2__MT846681.1__nucleocapsid protein (N) mRNA gc
aggagaaagcuuaccaugagcgacaacggcccccagaaccagcgcaacgccccgcggaucaccuucgggggccccuccgacagcaccggguccaaccagaacggcgagcgcagcggggcccgguccaagcagcgccggccccagggccugcccaacaacacggcgagcugguucaccgcccucacccagcacggcaaggaggaccugaaguucccgcgcgggcagggcgugcccaucaacaccaacuccagccccgacgaccagaucggguacuaccggcgcgccacgcggcgcauccggggcggggacggcaagaugaaggaccugagcccccgcugguacuucuacuaccucggcaccgggccggaggccggccugcccuacggggccaacaaggacggcaucaucugggucgcgaccgagggcgcccugaacacccccaaggaccacaucgggacgcggaaccccgccaacaacgccgcgaucgugcuccagcugccgcagggcaccacccugcccaagggguucuacgccgagggcagccgcgggggcucccaggccagcucccggagcuccagccgcucccggaacagcucccgcaacagcacccccggcagcucccgggggacgagcuccgcccgcauggccggcaacgggggcgacgcggcccucgcccugcugcuccuggaccggcugaaccagcucgagagcaagauguccgggaagggccagcagcagcagggccagaccgugaccaagaaguccgccgccgaggcguccaagaagccccgccagaagcgcaccgccacgaaggccuacaacgucacccaggccuucgggcggcgcggcccggagcagacccaggggaacuucggcgaccaggagcugauccggcaggggaccgacuacaagcacuggccccagaucgcccaguucgcgcccagcgccuccgccuucuucggcaugagccgcaucggcauggaggugacgcccuccgggaccuggcugaccuacaccggcgccaucaagcucgacgacaaggacccgaacuucaaggaccaggugauccugcugaacaagcacaucgacgccuacaagacguucccgcccaccgagcccaagaaggacaagaagaagaaggcggacgagacccaggcccucccccagcggcagaagaagcagcagaccgucacgcugcugcccgccgccgaccucgacgacuucagcaagcagcugcagcaguccaugagcuccgcggacagcacccaggccugaggacuaguuauaagacugacuagcccgaugggccucccaacgggcccuccuccccuccuugcaccgagauuaauaaaaaaaaaaaaaaaaaaaaaaaaaaaaaaaaaaaaaaaaaaaaaaaaaaaaaaaaaaaaaaaaugcaucccccccccccccccccccccccccccccccaaaggcucuuuucagagccaccagaauu

SEQ ID NO: 21021 - RNA, 1477 nt, Artificial Sequence
  SARS-CoV-2__MT847216.1__nucleocapsid protein (N) mRNA gc
aggagaaagcuuaccaugagcgacaacggcccccagaaccagcgcaacgcccugcggaucaccuucgggggcccguccgacagcaccggguccaaccagaacggcgagcgcagcggggcccgguccaagcagcgccggccccagggccuccccaacaacacggcgagcugguucaccgcccugacccagcacggcaaggaggaccugaaguucccccgcgggcagggcgugccgaucaacaccaacuccagccccgacgaccagaucggguacuaccggcgcgccacgcggcgcauccggggcggggacggcaagaugaaggaccucagcccccgcugguacuucuacuaccugggcaccgggcccgaggccggccugccguacggggccaacaaggacggcaucaucugggucgcgaccgagggcgcccucaacacccccaaggaccacaucgggacgcggaaccccgccaacaacgccgcgaucgugcugcagcugccccagggcaccacccucccgaagggguucuacgccgagggcucccgcgggggcucccaggccagcucccggagcuccagccgcucccggaacagcucccgcaacagcacccccggcagcuccaagcggacgagccccgcccgcauggccgggaacggcggggacgcggcccuggcccugcuccugcuggaccggcucaaccagcuggaguccaagaugagcggcaaggggcagcagcagcagggccagaccgugaccaagaaguccgccgccgaggcgagcaagaagccccgccagaagcgcaccgccacgaaggccuacaacgucacccaggccuucggccggcgcgggccggagcagacccagggcaacuucggggaccaggagcugauccggcagggcaccgacuacaagcacuggccccagaucgcccaguucgcgcccuccgccagcgccuucuucgggaugucccgcaucggcauggaggugacgcccagcggcaccuggcucaccuacaccggggccaucaagcuggacgacaaggacccgaacuucaaggaccaggugauccugcucaacaagcacaucgacgccuacaagacguucccgcccaccgagcccaagaaggacaagaagaagaaggcggacgagacccaggcccugccccagcggcagaagaagcagcagaccgucacgcugcuccccgccgccgaccuggacgacuucuccaagcagcugcagcagagcauguccagcgcggacuccacccaggccugaggacuaguuauaagacugacuagcccgaugggccucccaacgggcccuccuccccuccuugcaccgagauuaauaaaaaaaaaaaaaaaaaaaaaaaaaaaaaaaaaaaaaaaaaaaaaaaaaaaaaaaaaaaaaaaaugcaucccccccccccccccccccccccccccccccaaaggcucuuuucagagccaccagaauu

SEQ ID NO: 21022 - RNA, 1477 nt, Artificial Sequence
  SARS-CoV-2__MT847220.1__nucleocapsid protein (N) mRNA gc
aggagaaagcuuaccaugagcgacaacggcccccagaaccagcgcaacgccccgcggaucaccuucgggggccccuccgacagcaccggguccaaccagaacggcgagcgcagcggggcccgguccaagcagcgccggccccagggccugcccaacaacacggcgagcugguucaccgcccucacccagcacggcaaggaggaccugaaguucccgcgcgggcagggcgugcccaucaacaccaacuccagccccgacgaccagaucggguacuaccggcgcgccacgcggcgcauccggggcggggacggcaagaugaaggaccugagcccccgcugguacuucuacuaccucggcaccgggccggaggccggccugcccuacggggccaacaaggacggcaucaucugggucgcgaccgagggcgcccugaacacccccaaggaccacaucgggacgcggaaccccgccaacaacgccgcgaucgugcuccagcugccgcagggcaccacccugcccaagggguucuacgccgagggcagccgcgggggcucccaggccagcucccggagcuccagccgcucccggaacagcucccgcaacagcacccccggcagcuccaagcggacgagccccgcccgcauguccgggaacggcggggacgccgcgcucgcccugcugcuccuggaccggcugaaccagcucgagagcaagauguccggcaaggggcagcagcagcagggccagaccgugaccaagaaguccgccgccgaggccuccaagaagccgcgccagaagcgcaccgcgacgaaggccuacaacgucacccaggccuucggccggcgcgggcccgagcagacccagggcaacuucggggaccaggagcugauccggcagggcaccgacuacaagcacuggccccagaucgcccaguucgcccccagcgcguccgccuucuucgggaugagccgcaucggcauggaggugacgccguccggcaccuggcugaccuacaccggggccaucaagcucgacgacaaggaccccaacuucaaggaccaggugauccugcugaacaagcacaucgacgccuacaagacguucccgcccaccgagcccaagaaggacaagaagaagaaggccgacgagacccaggcgcucccccagcggcagaagaagcagcagaccgucacgcugcugcccgccgccgaccucgacgacuucagcaagcagcugcagcaguccaugagcuccgccgacagcacccaggcgugaggacuaguuauaagacugacuagcccgaugggccucccaacgggcccuccuccccuccuugcaccgagauuaauaaaaaaaaaaaaaaaaaaaaaaaaaaaaaaaaaaaaaaaaaaaaaaaaaaaaaaaaaaaaaaaaugcaucccccccccccccccccccccccccccccccaaaggcucuuuucagagccaccagaauu

SEQ ID NO: 21023 - RNA, 1477 nt, Artificial Sequence
  SARS-CoV-2__MT847221.1__nucleocapsid protein (N) mRNA gc
aggagaaagcuuaccaugagcgacaacggcccccagaaccagcgcaacgccccgcggaucaccuucgggggccccuccgacagcaccggguccaaccagaacggcgagcgcagcggggcccgguccaagcagcgccggccccagggccugcccaacaacacggcgagcugguucaccgcccucacccagcacggcaaggaggaccugaaguucccgcgcgggcagggcgugcccaucaacaccaacuccagccccgacgaccagaucggguacuaccggcgcgccacgcggcgcauccggggcggggacggcaagaugaaggaccugagcccccgcugguacuucuacuaccucggcaccgggccggaggccggccugcccuacggggccaacaaggacggcaucaucugggucgcgaccgagggcgcccugaacacccccaaggaccacaucgggacgcggaaccccgccaacaacgccgcgaucgugcuccagcugccgcagggcaccacccugcccaagggguucuacgccgagggcucccgcgggggcucccaggccagcucccggagcuccagccgcucccggaacagcucccgcaacagcacccccggcagcuccaagcggacgagccccgcccgcauggccgggaacggcggggacgcggcccucgcccugcugcuccuggaccggcugaaccagcucgaguccaagaugagcggcaaggggcagcagcagcagggccagaccgugaccaagaaguccgccgccgaggcgagcaagaagccgcgccagaagcgcaccgccacgaaggccuacaacgucacccaggccuucggccggcgcgggcccgagcagacccagggcaacuucggggaccaggagcugauccggcagggcaccgacuacaagcacuggccccagaucgcccaguucgcgcccuccgccagcgccuucuucgggaugucccgcaucggcauggaggugacgccgagcggcaccuggcugaccuacaccggggccaucaagcucgacgacaaggaccccaacuucaaggaccaggugauccugcugaacaagcacaucgacgccuacaagacguucccgcccaccgagcccaagaaggacaagaagaagaaggcggacgccacccaggcccucccccagcggcagaagaagcagcagaccgucacgcugcugcccgccgcggaccucgacgacuucuccaagcagcugcagcagagcauguccagcgccgacuccacccaggccugaggacuaguuauaagacugacuagcccgaugggccucccaacgggcccuccuccccuccuugcaccgagauuaauaaaaaaaaaaaaaaaaaaaaaaaaaaaaaaaaaaaaaaaaaaaaaaaaaaaaaaaaaaaaaaaaugcaucccccccccccccccccccccccccccccccaaaggcucuuuucagagccaccagaauu

SEQ ID NO: 21024 - RNA, 1477 nt, Artificial Sequence
  SARS-CoV-2__MT847223.1__nucleocapsid protein (N) mRNA gc
aggagaaagcuuaccaugagcgacaacggcccccagaaccaccgcaacgccccgcggaucaccuucgggggccccuccgacagcaccggguccaaccagaacggcgagcgcagcggggcccgguccaagcagcgccggccccagggccugcccaacaacacggcgagcugguucaccgcccucacccagcacggcaaggaggaccugaaguucccgcgcgggcagggcgugcccaucaacaccaacuccagccccgacgaccagaucggguacuaccggcgcgccacgcggcgcauccggggcggggacggcaagaugaaggaccugagcccccgcugguacuucuacuaccucggcaccgggccggaggccggccugcccuacggggccaacaaggacggcaucaucugggucgcgaccgagggcgcccugaacacccccaaggaccacaucgggacgcggaaccccgccaacaacgccgcgaucgugcuccagcugccgcagggcaccacccugcccaagggguucuacgccgagggcucccgcgggggcucccaggccagcucccggagcuccagccgcucccggaacagcucccgcaacagcacccccggcagcuccaagcggacgagccccgcccgcauggccgggaacggcggggacgcggcccucgcccugcugcuccuggaccggcugaaccagcucgaguccaagaugagcggcaaggggcagcagcagcagggccagaccgugaccaagaaguccgccgccgaggcgagcaagaagccgcgccagaagcgcaccgccacgaaggccuacaacgucacccaggccuucggccggcgcgggcccgagcagacccagggcaacuucggggaccaggagcugauccggcagggcaccgacuacaagcacuggccccagaucgcccaguucgcgcccuccgccagcgccuucuucgggaugucccgcaucggcauggaggugacgccgagcggcaccuggcugaccuacaccggggccaucaagcucgacgacaaggaccccaacuucaaggaccaggugauccugcugaacaagcacaucgacgccuacaagacguucccgcccaccgagcccaagaaggacaagaagaagaaggcggacgagacccaggcccucccccagcggcagaagaagcagcagaccgucacgcugcugcccgccgccgaccucgacgacuucuccaagcagcugcagcagagcauguccagcgcggacuccacccaggccugaggacuaguuauaagacugacuagcccgaugggccucccaacgggcccuccuccccuccuugcaccgagauuaauaaaaaaaaaaaaaaaaaaaaaaaaaaaaaaaaaaaaaaaaaaaaaaaaaaaaaaaaaaaaaaaaugcaucccccccccccccccccccccccccccccccaaaggcucuuuucagagccaccagaauu

SEQ ID NO: 21025 - RNA, 1477 nt, Artificial Sequence
  SARS-CoV-2__MT847226.1__nucleocapsid protein (N) mRNA gc
aggagaaagcuuaccaugagcgacaacggcccccagaaccagcgcaacgccccgcggaucaccuucgggggccccuccgacagcaccggguccaaccagaacggcgagcgcagcggggcccgguccaagcagcgccggccccagggccugcccaacaacacggcgagcugguucaccgcccucacccagcacggcaaggaggaccugaaguucccgcgcgggcagggcgugcccaucaacaccaacuccagccccgacgaccagaucggguacuaccggcgcgccacgcggcgcauccggggcggggacggcaagaugaaggaccugagcccccgcugguacuucuacuaccucggcaccgggccggaggccggccugcccuacggggccaacaaggacggcaucaucugggucgcgaccgagggcgccuucaacacccccaaggaccacaucgggacgcggaaccccgccaacaacgccgcgaucgugcugcagcucccgcagggcaccacccugcccaagggguucuacgccgagggcucccgcgggggcucccaggccagcucccggagcuccagccgcucccggaacagcucccgcaacagcacccccggcagcuccaagcggacgagccccgcccgcauggccgggaacggcggggacgcggcccuggcccuccugcugcucgaccggcugaaccagcuggaguccaagaugagcggcaaggggcagcagcagcagggccagaccgugaccaagaaguccgccgccgaggcgagcaagaagccgcgccagaagcgcaccgccacgaaggccuacaacgucacccaggccuucggccggcgcgggcccgagcagacccagggcaacuucggggaccaggagcucauccggcagggcaccgacuacaagcacuggccccagaucgcccaguucgcgcccuccgccagcgccuucuucgggaugucccgcaucggcauggaggugacgccgagcggcaccuggcugaccuacaccggggccaucaagcuggacgacaaggaccccaacuucaaggaccaggugauccuccugaacaagcacaucgacgccuacaagacguucccgcccaccgagcccaagaaggacaagaagaagaaggcguacgagacccaggcccugccccagcggcagaagaagcagcagaccgucacgcuccugcccgccgccgaccuggacgacuucuccaagcagcuccagcagagcauguccagcgcggacuccacccaggccugaggacuaguuauaagacugacuagcccgaugggccucccaacgggcccuccuccccuccuugcaccgagauuaauaaaaaaaaaaaaaaaaaaaaaaaaaaaaaaaaaaaaaaaaaaaaaaaaaaaaaaaaaaaaaaaaugcaucccccccccccccccccccccccccccccccaaaggcucuuuucagagccaccagaauu

SEQ ID NO: 21026 - RNA, 1477 nt, Artificial Sequence
  SARS-CoV-2__MT843286.1__nucleocapsid protein (N) mRNA gc
aggagaaagcuuaccaugagcgacaacggcccccagaaccagcgcaacgccccgcggaucaccuucgggggccccuccgacagcaccggguccaaccagaacggcgagcgcagcggggcccgguccaagcagcgccggccccagggccugcccaacaacacggcgagcugguucaccgcccucacccagcacggcaaggaggaccugaaguucccgcgcgggcagggcgugcccaucaacaccaacuccagccccgacgaccagaucggguacuaccggcgcgccacgcggcgcauccggggcggggacggcaagaugaaggaccugagcccccgcugguacuucuacuaccucggcaccgggccggaggccggccugcccuacggggccaacaaggacggcaucaucugggucgcgaccgagggcgcccugaacacccccaaggaccacaucgggacgcggaaccccgccaacaacgccgcgaucgugcuccagcugccgcagggcaccacccugcccaagggguucuacgccgagggcucccgcgggggcucccaggccagcucccggagcuccagccgcucccggaacagcucccgcaacagcacccccggcagcucccgggggacgagccccgcccgcauggccggcaacgggggcgacgcggcccucgcccugcugcuccuggaccggcugaaccagcucgaguccaagaucagcgggaagggccagcagcagcagggccagaccgugaccaagaaguccgccgccgaggcgagcaagaagccgcgccagaagcgcaccgccacgaaggccuacaacgucacccaggccuucgggcggcgcggccccgagcagacccaggggaacuucggcgaccaggagcugauccggcaggggaccgacuacaagcacuggccccagaucgcccaguucgcgcccuccgccagcgccuucuucggcaugucccgcaucggcauggaggugacgccgagcgggaccuggcugaccuacaccggcgccaucaagcucgacgacaaggaccccaacuucaaggaccaggugauccugcugaacaagcacaucgacgccuacaagacguucccgcccaccgagcccaagaaggacaagaagaagaaggcggacgagacccaggcccucccccagcggcagaagaagcagcagaccgucacgcugcugcccgccgccgaccucgacgacuucuccaagcagcugcagcagagcauguccagcgcggacuccacccaggccugaggacuaguuauaagacugacuagcccgaugggccucccaacgggcccuccuccccuccuugcaccgagauuaauaaaaaaaaaaaaaaaaaaaaaaaaaaaaaaaaaaaaaaaaaaaaaaaaaaaaaaaaaaaaaaaaugcaucccccccccccccccccccccccccccccccaaaggcucuuuucagagccaccagaauu

SEQ ID NO: 21027 - RNA, 1477 nt, Artificial Sequence
  SARS-CoV-2__MT843316.1__nucleocapsid protein (N) mRNA gc
aggagaaagcuuaccaugagcgacaacggcccccagaaccagcgcaacgccccgcggaucaccuucgggggccccuccgacagcaccggguccaaccagaacggcgagcgcagcggggcccgguccaagcagcgccggccccagggccugcccaacaacacggcgagcugguucaccgcccucacccagcacggcaaggaggaccugaaguucccgcgcgggcagggcgugcccaucaacaccaacuccagccccgacgaccagaucggguacuaccggcgcgccacgcggcgcauccggggcggggacggcaagaugaaggaccugagcccccgcugguacuucuacuaccucggcaccgggccggaggccggccugcccuacggggccaacaaggacggcaucaucugggucgcgaccgagggcgcccugaacacccccaaggaccacaucgggacgcggaaccccgccaacaacgccgcgguggugcuccagcugccgcagggcaccacccugcccaagggguucuacgccgagggcagccgcgggggcucccaggccuacagccgguccagcucccgcagccggaacuccagccgcaacuccacccccggcagcagccgggggacgucccccgcccgcauggccggcaacgggggcgacgcggcccucgcccugcugcuccuggaccggcugaaccagcucgagagcaagauguccgggaagggccagcagcagcagggccagaccgucaccaagaaguccgccgccgaggcguccaagaagccgcgccagaagcgcaccgccacgaaggccuacaacgugacccaggccuucgggcggcgcggccccgagcagacccaggggaacuucggcgaccaggagcugauccggcaggggaccgacuacaagcacuggccccagaucgcccaguucgcgcccagcgccuccgccuucuucggcaugagccgcaucggcauggaggugacgccguccgggaccuggcugaccuacaccggcgccaucaagcucgacgacaaggaccccaacuucaaggaccaggucauccugcugaacaagcacaucgacgccuacaagacguucccgcccaccgagcccaagaaggacaagaagaagaaggcggacgagacccaggcccucccccagcggcagaagaagcagcagaccgugacgcugcugcccgccgccgaccucgacgacuucagcaagcagcugcagcaguccaugagcuccgcggacagcacccaggccugaggacuaguuauaagacugacuagcccgaugggccucccaacgggcccuccuccccuccuugcaccgagauuaauaaaaaaaaaaaaaaaaaaaaaaaaaaaaaaaaaaaaaaaaaaaaaaaaaaaaaaaaaaaaaaaaugcaucccccccccccccccccccccccccccccccaaaggcucuuuucagagccaccagaauu

SEQ ID NO: 21028 - RNA, 1477 nt, Artificial Sequence
  SARS-CoV-2__MT844022.1__nucleocapsid protein (N) mRNA gc
aggagaaagcuuaccaugagcgacaacggcccccagaaccagcgcaacgccccgcggaucaccuucgggggccccuccgacagcaccggguccaaccagaacggcgagcgcagcggggcccgguccaagcagcgccggccccagggccugcccaacaacacggcgagcugguucaccgcccucacccagcacggcaaggaggaccugaaguucccgcgcgggcagggcgugcccaucaacaccaacuccagccccgacgaccagaucggguacuaccggcgcgccacgcggcgcauccggggcggggacggcaagaugaaggaccugagcccccgcugguacuucuacuaccucggcaccgggccggaggccggccugcccuacggggccaacaaggacggcaucaucugggucgcgaccgagggcgcccugaacacccccaaggaccacaucgggacgcggaaccccgccaacaacgccgcgaucgugcuccagcugccgcagggcaccacccugcccaagggguucuacgccgagggcucccgcgggggcucccaggccagcucccggagcuccagccgcucccggaacagcucccgcaacagcacccccggcagcucccgggggacgagccccgcccgcauggccggcaacgggggcgacgcggcccucgcccugcugcuccuggaccggcugaaccagcucgaguccaagaugagcgggaagggccagcagcagcagggccagaccgugaccaagaaguccgccgccgaggcgagcaagaagccgcgccagaagcgcaccgccacgaaggccuacaacgucacccaggccuucgggcggcgcggccccgagcagacccaggggaacuucggcgaccaggagcugauccggcaggggaccgacuacaagcacuggccccagaucgcccaguucgcgcccuccgccagcgccuucuucggcaugucccgcgugggcauggaggugacgccgagcgggaccuggcugaccuacaccggcgccaucaagcucgacgacaaggaccccaacuucaaggaccaggucauccugcugaacaagcacaucgacgccuacaagacguucccgcccaccgagcccaagaaggacaagaagaagaaggcggacgagacccaggcccucccccagcggcagaagaagcagcagaccgugacgcugcugcccgccgccgaccucgacgacuucuccaagcagcugcagcagagcauguccagcgcggacuccacccaggccugaggacuaguuauaagacugacuagcccgaugggccucccaacgggcccuccuccccuccuugcaccgagauuaauaaaaaaaaaaaaaaaaaaaaaaaaaaaaaaaaaaaaaaaaaaaaaaaaaaaaaaaaaaaaaaaaugcaucccccccccccccccccccccccccccccccaaaggcucuuuucagagccaccagaauu

SEQ ID NO: 21029 - RNA, 1477 nt, Artificial Sequence
  SARS-CoV-2__MT844044.1__nucleocapsid protein (N) mRNA gc
aggagaaagcuuaccaugagcgacaacggcccccagaaccagcgcaacgccccgcggaucaccuucgggggccccuccgacagcaccggguccaaccagaacggcgagcgcagcggggcccgguccaagcagcgccggccccagggccugcccaacaacacggcgagcugguucaccgcccucacccagcacggcaaggaggaccugaaguucccgcgcgggcagggcgugcccaucaacaccaacuccagccccgacgaccagaucggguacuaccggcgcgccacgcggcgcauccggggcggggacggcaagaugaaggaccugagcccccgcugguacuucuacuaccucggcaccgggccggaggccggccugcccuacggggccaacaaggacggcaucaucugggucgcgaccgagggcgcccugaacacccccaaggaccacaucgggagccggaaccccgccaacaacgccgcgaucgugcuccagcugccgcagggcacgacccugcccaagggguucuacgccgagggcucccgcgggggcagccaggccuccagccgguccagcucccgcagccggaacuccagccgcaacagcacccccggcuccagccgggggaccucccccgcccgcauggccggcaacgggggcgacgcggcccucgcccugcugcuccuggaccggcugaaccagcucgagagcaagauguccgggaagggccagcagcagcagggccagacggugaccaagaaguccgccgccgaggcguccaagaagccgcgccagaagcgcaccgccaccaaggccuacaacgucacgcaggccuucgggcggcgcggccccgagcagacccaggggaacuucggcgaccaggagcugauccggcaggggaccgacuacaagcacuggccccagaucgcccaguucgcgcccagcgccuccgccuucuucggcaugagccgcaucggcauggaggugaccccguccgggacguggcugaccuacaccggcgccaucaagcucgacgacaaggaccccaacuucaaggaccaggugauccugcugaacaagcacaucgacgccuacaagaccuucccgcccacggagcccaagaaggacaagaagaagaaggcggacgagacccaggcccucccccagcggcagaagaagcagcagaccgucacccugcugcccgccgccgaccucgacgacuucagcaagcagcugcagcaguccaugagcuccgcggacagcacgcaggccugaggacuaguuauaagacugacuagcccgaugggccucccaacgggcccuccuccccuccuugcaccgagauuaauaaaaaaaaaaaaaaaaaaaaaaaaaaaaaaaaaaaaaaaaaaaaaaaaaaaaaaaaaaaaaaaaugcaucccccccccccccccccccccccccccccccaaaggcucuuuucagagccaccagaauu

SEQ ID NO: 21030 - RNA, 1477 nt, Artificial Sequence
  SARS-CoV-2__MT831123.1__nucleocapsid protein (N) mRNA gc
aggagaaagcuuaccaugagcgacaacggcccccagaaccagcgcaacgccccgcggaucaccuucggggagcccuccgacagcaccggcuccaaccagaacggggagcgcagcggcgcccgguccaagcagcgccggccccaggggcugcccaacaacacggcgagcugguucaccgcccucacccagcacggcaaggaggaccugaaguucccgcgcggccagggggugcccaucaacaccaacuccagccccgacgaccagaucggcuacuaccggcgcgccacgcggcgcauccgcgggggcgacgggaagaugaaggaccugagcccccggugguacuucuacuaccucggcaccggcccggaggccgggcugcccuacggcgccaacaaggacgggaucaucugggucgcgaccgagggcgcccugaacacccccaaggaccacaucggcacgcggaaccccgccaacaacgccgcgaucgugcuccagcugccgcaggggaccacccugcccaagggcuucuacgccgaggggucccgcggcgggucccaggccagcucccggagcuccagccgcucccggaacagcucccgcaacagcacccccggcagcuccaagcggacgagccccgcccgcauggccggcaacgggggcgacgcggcccucgcccugcugcuccuggaccggcugaaccagcucgaguccaagaugagcgggaagggccagcagcagcaggggcagaccgugaccaagaaguccgccgccgaggcgagcaagaagccgcgccagaagcgcaccgccacgaaggccuacaacgucacccaggccuucggccggcgcggccccgagcagacccaggggaacuucggcgaccaggagcugauccggcaggggaccgacuacaagcacuggccccagaucgcccaguucgcgcccuccgccagcgccuucuucggcaugucccgcaucgggauggaggugacgccgagcggcaccuggcugaccuacaccggcgccaucaagcucgacgacaaggaccccaacuucaaggaccaggugauccugcugaacaagcacaucgacgccuacaagacguucccgcccaccgagcccaagaaggacaagaagaagaaggcggacgagacccaggcccucccccagcggcagaagaagcagcagaccgucacgcugcugcccgccgccgaccucgacgacuucuccaagcagcugcagcagagcauguccagcgcggacuccacccaggccugaggacuaguuauaagacugacuagcccgaugggccucccaacgggcccuccuccccuccuugcaccgagauuaauaaaaaaaaaaaaaaaaaaaaaaaaaaaaaaaaaaaaaaaaaaaaaaaaaaaaaaaaaaaaaaaaugcaucccccccccccccccccccccccccccccccaaaggcucuuuucagagccaccagaauu

SEQ ID NO: 21031 - RNA, 1477 nt, Artificial Sequence
  SARS-CoV-2__MT831131.1__nucleocapsid protein (N) mRNA gc
aggagaaagcuuaccaugagcgacaacggcccccagaaccagcgcaacgccccgcggaucaccuucgggggccccuccgacagcaccggguccaaccagaacggcgagcgcagcggggcccgguccaagcagcgccggccccagggccugcccaacaacacggcgagcugguucaccgcccucacccagcacggcaaggaggaccugaaguucccgcgcgggcagggcgugcccaucaacaccaacuccagccccgacgaccagaucggguacuaccggcgcgccacgcggcgcauccggggcggggacggcaagaugaaggaccugagcccccgcugguacuucuacuaccucggcaccgggccggaggccggccugcccuacggggccaacaaggacggcaucaucugggucgcgaccgagggcgcccugaacacccccaaggaccacaucgggacgcggaaccccgccaacaacgccgcgaucgugcuccagcugccgcagggcaccacccugcccaagggguucuacgccgagggcucccgcgggggcucccaggccagcucccggagcuccagccgcucccggaacagcucccgcaacagcacccccggcagcuccaagcggacgagccccgcccgcauggccgggaacggcggggacgcggcccucgcccugcugcuccuggaccggcugaaccagcucgaguccaagaugagcggcaaggggcagcagcagcagggccagaccgugaccaagaaguccgccgccgaggcgagcaagaagccgcgccagaagcgcaccgccacgaaggccuacaacgucacccaggccuucggccggcgcgggcccgagcagacccagggcaacuucggggaccaggagcugauccggcagggcaccgacuacaagcacuggccccagaucgcccaguucgcgcccuccgccagcgccuucuucgggaugucccgcaucggcauggaggugacgcugagcggcaccuggcucaccuacaccggggccaucaagcuggacgacaaggacccgaacuucaaggaccaggugauccugcucaacaagcacaucgacgccuacaagacguucccgcccaccgagcccaagaaggacaagaagaagaaggcggacgagacccaggcccugccccagcggcagaagaagcagcagaccgucacgcugcuccccgccgccgaccuggacgacuucuccaagcagcugcagcagagcauguccagcgcggacuccacccaggccugaggacuaguuauaagacugacuagcccgaugggccucccaacgggcccuccuccccuccuugcaccgagauuaauaaaaaaaaaaaaaaaaaaaaaaaaaaaaaaaaaaaaaaaaaaaaaaaaaaaaaaaaaaaaaaaaugcaucccccccccccccccccccccccccccccccaaaggcucuuuucagagccaccagaauu

SEQ ID NO: 21032 - RNA, 1477 nt, Artificial Sequence
  SARS-CoV-2__MT831148.1__nucleocapsid protein (N) mRNA gc
aggagaaagcuuaccaugagcgacaacggcccccagaaccagcgcaacgccccgcggaucaccuucgggggccccuccgacagcaccggguccaaccagaacggcgagcgcagcggggcccgguccaagcagcgccggccccagggccugcccaacaacacggcgagcugguucaccgcccucacccagcacggcaaggaggaccugaaguucccgcgcgggcagggcgugcccaucaacaucaacuccagccccgacgaccagaucggguacuaccggcgcgccacccggcgcauccggggcggggacggcaagaugaaggaccugagcccccgcugguacuucuacuaccucggcacggggccggaggccggccugcccuacggggccaacaaggacggcaucaucugggucgcgaccgagggcgcccugaacacccccaaggaccacaucgggacccggaaccccgccaacaacgccgcgaucgugcuccagcugccgcagggcacgacccugcccaagggguucuacgccgagggcucccgcgggggcucccaggccagcucccggagcuccagccgcucccggaacagcucccgcaacagcacccccggcagcuccaagcggaccagccccgcccgcauggccgggaacggcggggacgcggcccucgcccugcugcuccuggaccggcugaaccagcucgaguccaagaugagcggcaaggggcagcagcagcagggccagacggugaccaagaaguccgccgccgaggcgagcaagaagccgcgccagaagcgcaccgccaccaaggccuacaacgucacgcaggccuucggccggcgcgggcccgagcagacccagggcaacuucggggaccaggagcugauccggcagggcaccgacuacaagcacuggccccagaucgcccaguucgcgcccuccgccagcgccuucuucgggaugucccgcaucggcauggaggugaccccgagcggcacguggcugaccuacaccggggccaucaagcucgacgacaaggaccccaacuucaaggaccaggugauccugcugaacaagcacaucgacgccuacaagaccuucccgcccacggagcccaagaaggacaagaagaagaaggcggacgagacccaggcccucccccagcggcagaagaagcagcagaccgucacccugcugcccgccgccgaccucgacgacuucuccaagcagcugcagcagagcauguccagcgcggacuccacgcaggccugaggacuaguuauaagacugacuagcccgaugggccucccaacgggcccuccuccccuccuugcaccgagauuaauaaaaaaaaaaaaaaaaaaaaaaaaaaaaaaaaaaaaaaaaaaaaaaaaaaaaaaaaaaaaaaaaugcaucccccccccccccccccccccccccccccccaaaggcucuuuucagagccaccagaauu

SEQ ID NO: 21033 - RNA, 1477 nt, Artificial Sequence
  SARS-CoV-2__MT831153.1__nucleocapsid protein (N) mRNA gc
aggagaaagcuuaccaugagcgacaacggcccccagaaccagcgcaacgccccgcggaucaccuucgggggccccuccgacagcaccggguccaaccagaacggcgagcgcagcggggcccgguccaagcagcgccggccccagggccugcccaacaacacggcgagcugguucaccgcccucacccagcacggcaaggaggaccugaaguucccgcgcgggcagggcgugcccaucaacaccaacuccagccccgacgaccagaucggguacuaccggcgcgccacgcggcgcauccggggcggggacggcaagaugaaggaccugagcccccgcugguacuucuacuaccucggcaccgggccggaggccggccugcccuacggggccaacaaggacggcaucaucugggucgcgaccgagggcgcccugaacacccccaaggaccacaucgggacgcggaaccucgccaacaacgccgcgaucgugcugcagcugccccagggcaccacccucccgaagggguucuacgccgagggcucccgcgggggcucccaggccagcucccggagcuccagccgcucccggaacagcucccgcaacagcacccccggcagcuccaagcggacgagccccgcccgcauggccgggaacggcggggacgcggcccuggcccugcuccugcuggaccggcucaaccagcuggaguccaagaugagcggcaaggggcagcagcagcagggccagaccgugaccaagaaguccgccgccgaggcgagcaagaagccccgccagaagcgcaccgccacgaaggccuacaacgucacccaggccuucggccggcgcgggccggagcagacccagggcaacuucggggaccaggagcugauccggcagggcaccgacuacaagcacuggccccagaucgcccaguucgcgcccuccgccagcgccuucuucgggaugucccgcaucggcauggaggugacgcccagcggcaccuggcucaccuacaccggggccaucaagcuggacgacaaggacccgaacuucaaggaccaggugauccugcucaacaagcacaucgacgccuacaagacguucccgcccaccgagcccaagaaggacaagaagaagaaggcggacgagacccaggcccugccccagcggcagaagaagcagcagaccgucacgcugcuccccgccgccgaccuggacgacuucuccaagcagcugcagcagagcauguccagcgcggacuccacccaggccugaggacuaguuauaagacugacuagcccgaugggccucccaacgggcccuccuccccuccuugcaccgagauuaauaaaaaaaaaaaaaaaaaaaaaaaaaaaaaaaaaaaaaaaaaaaaaaaaaaaaaaaaaaaaaaaaugcaucccccccccccccccccccccccccccccccaaaggcucuuuucagagccaccagaauu

SEQ ID NO: 21034 - RNA, 1477 nt, Artificial Sequence
  SARS-CoV-2__MT831158.1__nucleocapsid protein (N) mRNA gc
aggagaaagcuuaccaugagcgacaacggcccccagaaccagcgcaacgccccgcggaucaccuucgggggccccuccgacagcaccggguccaaccagaacggcgagcgcagcggggcccgguccaagcagcgccggccccagggccugcccaacaacacggcgagcugguucaccgcccucacccagcacggcaaggaggaccugaaguucccgcgcgggcagggcgugcccaucaacaccaacuccagccccgacgaccagaucggguacuaccggcgcgccacgcggcgcauccggggcggggacggcaagaugaaggaccugagcccccgcugguacuucuacuaccucggcaccgggccggaggccggccugcccuacggggccaacaaggacggcaucaucugggucgcgaccgagggcgcccugaacacccccaaggaccacaucgggacgcggaaccccgccaacaacgccgcgaucgugcuccagcugccgcagggcaccacccugcccaagggguucuacgccgagggcucccgcgggggcucccaggccagcucccggagcuccagccgcucccggaacagcucccgcaacagcacccccggcagcuccaagcggacgagccccgcccgcauggccgggaacggcggggacgcggcccucgcccugcugcuccuggaccggcugaaccagcucgaguccaagaugagcggcaaggggcagcagcagcagggccagaccgugaccaagaaguccgccgccgaggcgagcaagaagccgcgccagaagcgcaccgccacgaaggccuacaacgucacccaggccuucggccggcgcgggcccgagcagacccagggcaacuucggggaccaggagcugauccggcagggcaccgacuacaagcacuggccccagaucgcccaguucgcgcccuccgccagcgccuucuucgggaugucccgcaucggcauggaggugacgccgagcggcaccuggcugaccuacaccggggccaucaagcucgacgacaaggaccccaacuucaaggaccaggugauccugcugaacaagcacaucgacgccuacaagacguucccgcccaccgagcccaagaaggacaagaagaagaaggcggacgagacccaggcccucccccagcggcacaagaagcagcagaccgucacgcugcugcccgccgccgaccucgacgacuucuccaagcagcugcagcagagcauguccagcgcggacuccacccaggccugaggacuaguuauaagacugacuagcccgaugggccucccaacgggcccuccuccccuccuugcaccgagauuaauaaaaaaaaaaaaaaaaaaaaaaaaaaaaaaaaaaaaaaaaaaaaaaaaaaaaaaaaaaaaaaaaugcaucccccccccccccccccccccccccccccccaaaggcucuuuucagagccaccagaauu

SEQ ID NO: 21035 - RNA, 1477 nt, Artificial Sequence
  SARS-CoV-2__MT831179.1__nucleocapsid protein (N) mRNA gc
aggagaaagcuuaccaugagcgacaacggcccccagaaccagcgcaacgccccgcggaucaccuucgggggccccuccgacagcaccggguccaaccagaacggcgagcgcagcggggcccgguccaagcagcgccggccccagggccugcccaacaacacggcgagcugguucaccgcccucacccagcacggcaaggaggaccugaaguucccgcgcgggcagggcgugcccaucaacaccaacuccagccccgacgaccagaucggguacuaccggcgcgccacgcggcgcauccggggcggggacggcaagaugaaggaccugagcccccgcugguacuucuacuaccucggcaccgggccggaggccggccugcccuacggggccaacaaggacggcaucaucugggucgcgaccgagggcgcccugaacacccccaaggaccacaucgggacgcggaaccccgccaacaacgccgcgaucgugcuccagcugccgcagggcaccacccugcccaagggguucuacgccgagggcucccgcgggggcucccaggccagcucccggagcuccagccgcucccggaacagcucccgcaacagcacccccggcagcuccaagcggacgagccccgcccgcauggccgggaacggcggggacgcggcccucgcccugcugcuccuggaccggcugaaccagcucgaguccaagaugagcggcaaggggcagcagcagcagggccagaccgugaccaagaaguccgccgccgaggcgagcaagaagccgcgccagaagcgcaccgccacgaaggccuacaacgucacccaggccuucggccggcgcgggcccgagcagacccagggcaacuucggggaccaggagcugauccggcagggcaccgacuacaagcacuggccccagaucgcccaguucgcgcccuccgccagcgccuucuucgggaugucccgcaucggcauggaggugacgccgagcggcaccuggcugaccuacaccggggccaucaagcucgacgacaaggaccccaacuucaaggaccaggugauccugcugaacaagcacaucgacgccuacaagacguucccgcccaccgagcccaagaaggacaagaagaagaaggcggacgagacccaggccagcccccagcggcagaagaagcagcagaccgucacgcuccugcccgccgccgaccuggacgacuucuccaagcagcuccagcaguccaugagcuccgcggacagcacccaggccugaggacuaguuauaagacugacuagcccgaugggccucccaacgggcccuccuccccuccuugcaccgagauuaauaaaaaaaaaaaaaaaaaaaaaaaaaaaaaaaaaaaaaaaaaaaaaaaaaaaaaaaaaaaaaaaaugcaucccccccccccccccccccccccccccccccaaaggcucuuuucagagccaccagaauu

SEQ ID NO: 21036 - RNA, 1477 nt, Artificial Sequence
  SARS-CoV-2__MT831196.1__nucleocapsid protein (N) mRNA gc
aggagaaagcuuaccaugagcgacaacggcccccagaaccagcgcaacgccccgcggaucaccuucgggggccccuccgacagcaccggguccaaccagaacggcgagcgcagcggggcccgguccaagcagcgccggccccagggccugcccaacaacacggcgagcugguucaccgcccucacccagcacggcaaggaggaccugaaguucccgcgcgggcagggcgugcccaucaacaccaacuccagccccgacgaccagaucggguacuaccggcgcgccacgcggcgcauccggggcggggacggcaagaugaaggaccugagcccccgcugguacuucuacuaccucggcaccgggccggaggccggccugcccuacggggccaacaaggacggcaucaucugggucgcgaccgagggcgcccugaacacccccaaggaccacaucgggacgcggaaccccgccaacaacgccgcgaucgugcuccagcugccgcagggcaccacccugcccaagggguucuacgccgagggcucccgcgggggcucccaggccagcucccggagcuccagccgcucccggaacagcucccgcaacagcacccccggcagcuccaagcggacgagccccgcccgcauggccgggaacggcggggacgcggcccucgcccugcugcuccuggaccggcugaaccagcucgaguccaagaugagcggcaaggggcagcagcagcagggccagaccgugaccaagaaguccgccgccgaggcgagcaagaagccgcgccagaagcgcaccgccacgaaggccuacaacgucacccaggccuucggccggcgcgggcccgagcagacccagggcaacuucggggaccaggagcugauccggcagggcaccgacuacaagcacuggccccagaucgcccaguucgcgcccuccgccagcgccuucuucgggaugucccgcaucggcauggaggugacgccgagcggcaccuggcugaccuacaccggggccaucaagcucgacgacaaggaccccaacuucaaggaccaggugauccugcugaacaagcacaucgacgccuacaagacguucccgcccaccgagcccaagaaggacaagaacaagaaggcggacgagacccaggcccucccccagcggcagaagaagcagcagaccgucacgcugcugcccgccgccgaccucgacgacuucuccaagcagcugcagcagagcauguccagcgcggacuccacccaggccugaggacuaguuauaagacugacuagcccgaugggccucccaacgggcccuccuccccuccuugcaccgagauuaauaaaaaaaaaaaaaaaaaaaaaaaaaaaaaaaaaaaaaaaaaaaaaaaaaaaaaaaaaaaaaaaaugcaucccccccccccccccccccccccccccccccaaaggcucuuuucagagccaccagaauu

SEQ ID NO: 21037 - RNA, 1477 nt, Artificial Sequence
  SARS-CoV-2__MT831223.1__nucleocapsid protein (N) mRNA gc
aggagaaagcuuaccaugagcgacaacggcccccagaaccagcgcaacgccccgcggaucaccuucgggggccccuccgacagcaccggguccaaccagaacggcgagcgcagcggggcccgguccaagcagcgccggccccagggccugcccaacaacacggcgagcugguucaccgcccucacccagcacggcaaggaggaccugaaguucccgcgcgggcagggcgugcccaucaacaccaacuccagccccgacgaccagaucggguacuaccggcgcgccacgcggcgcauccggggcggguacggcaagaugaaggaccugagcccccgcugguacuucuacuaccucggcaccgggccggaggccggccugcccuacggggccaacaaggacggcaucaucugggucgcgaccgagggcgcccugaacacccccaaggaccacaucgggacgcggaaccccgccaacaacgccgcgaucgugcuccagcugccgcagggcaccacccugcccaagggguucuacgccgagggcucccgcgggggcucccaggccagcucccggagcuccagccgcucccggaacagcucccgcaacagcacccccggcagcuccaagcggacgagccccgcccgcauggccgggaacggcggggacgcggcccucgcccugcugcuccuggaccggcugaaccagcucgaguccaagaugagcggcaaggggcagcagcagcagggccagaccgugaccaagaaguccgccgccgaggcgagcaagaagccgcgccagaagcgcaccgccacgaaggccuacaacgucacccaggccuucggccggcgcgggcccgagcagacccagggcaacuucggggaccaggagcugauccggcagggcaccgacuacaagcacuggccccagaucgcccaguucgcgcccuccgccagcgccuucuucgggaugucccgcaucggcauggaggugacgccgagcggcaccuggcugaccuacaccggggccaucaagcucgacgacaaggaccccaacuucaaggaccaggugauccugcugaacaagcacaucgacgccuacaagacguucccgcccaccgagcccaagaaggacaagaagaagaaggcggacgagacccaggcccucccccagcggcagaagaagcagcagaccgucacgcugcugcccgccgccgaccucgacgacuucuccaagcagcugcagcagagcauguccagcgcggacuccacccaggccugaggacuaguuauaagacugacuagcccgaugggccucccaacgggcccuccuccccuccuugcaccgagauuaauaaaaaaaaaaaaaaaaaaaaaaaaaaaaaaaaaaaaaaaaaaaaaaaaaaaaaaaaaaaaaaaaugcaucccccccccccccccccccccccccccccccaaaggcucuuuucagagccaccagaauu

SEQ ID NO: 21038 - RNA, 1477 nt, Artificial Sequence
  SARS-CoV-2__MT831224.1__nucleocapsid protein (N) mRNA gc
aggagaaagcuuaccaugagcgacaacggcccccagaaccagcgcaacgccccgcggaucaccuucgggggccccuccgacagcaccggguccaaccagaacggcgagcgcagcggggcccgguccaagcagcgccggccccagggccugcccaacaacacggcgagcugguucaccgcccucacccagcacggcaaggaggaccugaaguucccgcgcgggcagggcgugcccaucaacaccaacuccagccccgacgaccagaucggguacuaccggcgcgccacgcggcgcauccggggcggggacggcaagaugaaggaccugagcccccgcugguacuucuacuaccucggcaccgggccggaggccggccugcccuacggggccaacaaggacggcaucaucugggucgcgaccgagggcgcccugaacacccccaaggaccacaucgggacgcggaaccucgccaacaacgccgcgaucgugcugcagcugccccagggcaccacccucccgaagggguucuacgccgagggcucccgcgggggcucccaggccagcucccggagcuccagccgcucccggaacagcucccgcaacagcacccccggcagcucccgggggacgagccccgcccgcauggccggcaacgggggcgacgcggcccuggcccugcuccugcuggaccggcucaaccagcuggaguccaagaugagcgggaagggccagcagcagcagggccagaccgugaccaagaaguccgccgccgaggcgagcaagaagccccgccagaagcgcaccgccacgaaggccuacaacgucacccaggccuucgggcggcgcggcccggagcagacccaggggaacuucggcgaccaggagcugauccggcaggggaccgacuacaagcacuggccccagaucgcccaguucgcgcccuccgccagcgccuucuucggcaugucccgcaucggcauggaggugacgcccagcgggaccuggcucaccuacaccggcgccaucaagcuggacgacaaggacccgaacuucaaggaccaggugauccugcucaacaagcacaucgacgccuacaagacguucccgcccaccgagcccaagaaggacaagaagaagaaggcggacgagacccaggcccugccccagcggcagaagaagcagcagaccgucacgcugcuccccgccgccgaccuggacgacuucuccaagcagcugcagcagagcauguccagcgcggacuccacccaggccugaggacuaguuauaagacugacuagcccgaugggccucccaacgggcccuccuccccuccuugcaccgagauuaauaaaaaaaaaaaaaaaaaaaaaaaaaaaaaaaaaaaaaaaaaaaaaaaaaaaaaaaaaaaaaaaaugcaucccccccccccccccccccccccccccccccaaaggcucuuuucagagccaccagaauu

SEQ ID NO: 21039 - RNA, 1477 nt, Artificial Sequence
  SARS-CoV-2__MT831284.1__nucleocapsid protein (N) mRNA gc
aggagaaagcuuaccaugagcgacaacggcccccagaaccagcgcaacgccccgcggaucaccuucgggggccccuccgacagcaccggguccaaccagaacggcgagcgcagcggggcccgguccaagcagcgccggccccagggccugcccaacaacacggcgagcugguucaccgcccucacccagcacggcaaggaggaccugaaguucccgcgcgggcagggcgugcccaucaacaccaacuccagccccgacgaccagaucggguacuaccggcgcgccacgcggcgcauccggggcggggacggcaagaugaaggaccugagcccccgcugguacuucuacuaccucggcaccgggccggaggccggccugcccuacggggccaacaaggacggcaucaucugggucgcgaccgagggcgcccugaacacccccaaggaccacaucgggacgcggaaccccgccaacaacgccgcgaucgugcuccagcugccgcagggcaccacccugcccaagggguucuacgccgagggcagccgcgggggcucccaggccagcucccggagcuccagccgcucccggaacagcucccgcaacagcacccccggcagcuccaagcggacgagccccgcccgcauggccgggaacggcggggacgcggcccucgcccugcugcuccuggaccggcugaaccagcucgaguccaagaugagcggcaagucccagcagcagcaggggcagaccgugaccaagaaguccgccgccgaggcguccaagaagccgcgccagaagcgcaccgccacgaaggccuacaacgucacccaggccuucggccggcgcggccccgagcagacccaggggaacuucggcgaccaggagcugauccggcaggggaccgacuacaagcacuggccccagaucgcccaguucgcgcccagcgccuccgccuucuucggcaugagccgcaucgggauggaggugacgccguccggcaccuggcugaccuacaccggcgccaucaagcucgacgacaaggaccccaacuucaaggaccaggugauccugcugaacaagcacaucgacgccuacaagacguucccgcccaccgagcccaagaaggacaagaagaagaaggcggacgagacccaggcccucccccagcggcagaagaagcagcagaccgucacgcugcugcccgccgccgaccucgacgacuucagcaagcagcugcagcaguccaugagcuccgcggacagcacccaggccugaggacuaguuauaagacugacuagcccgaugggccucccaacgggcccuccuccccuccuugcaccgagauuaauaaaaaaaaaaaaaaaaaaaaaaaaaaaaaaaaaaaaaaaaaaaaaaaaaaaaaaaaaaaaaaaaugcaucccccccccccccccccccccccccccccccaaaggcucuuuucagagccaccagaauu

SEQ ID NO: 21040 - RNA, 1477 nt, Artificial Sequence
  SARS-CoV-2__MT831285.1__nucleocapsid protein (N) mRNA gc
aggagaaagcuuaccaugagcgacaacggcccccagaaccagcgcaacgccccgcggaucaccuucgggggccccuccgacagcaccggguccaaccagaacggcgagcgcagcggggcccgguccaagcagcgccggccccagggccugcccaacaacacggcgagcugguucaccgcccucacccagcacggcaaggaggaccugaaguucccgcgcgggcagggcgugcccaucaacaccaacuccagccccgacgaccagaucggguacuaccggcgcgccacgcggcgcauccggggcggggacggcaagaugaaggaccugagcccccgcugguacuucuacuaccucggcaccgggccggaggccggccugcccuacggggccaacaaggacggcaucaucugggucgcgaccgagggcgcccugaacacccccaaggaccacaucgggacgcggaaccccgccaacaacgccgcgaucgugcuccagcugccgcagggcaccacccugcccaagggguucuacgccgagggcucccgcgggggcucccaggccagcucccggagcuccagccgcucccggaacagcucccgcaacagcacccccggcagcuccaagcggacgagccccgcccgcauggccgggaacggcggggacgcggcccucgcccugcugcuccuggaccggcugaaccaccucgaguccaagaugagcggcaaggggcagcagcagcagggccagaccgugaccaagaaguccgccgccgaggcgagcaagaagccgcgccagaagcgcaccgccacgaaggccuacaacgucacccaggccuucggccggcgcgggcccgagcagacccagggcaacuucggggaccaggagcugauccggcagggcaccgacuacaagcacuggccccagaucgcccaguucgcgcccuccgccagcgccuucuucgggaugucccgcaucggcauggaggugacgccgagcggcaccuggcugaccuacaccggggccaucaagcucgacgacaaggaccccaacuucaaggaccaggugauccugcugaacaagcacaucgacgccuacaagacguucccgcccaccgagcccaagaaggacaagaagaagaaggcggacgagacccaggcccucccccagcggcagaagaagcagcagaccgucacgcugcugcccgccgccgaccucgacgacuucuccaagcagcugcagcagagcauguccagcgcggacuccacccaggccugaggacuaguuauaagacugacuagcccgaugggccucccaacgggcccuccuccccuccuugcaccgagauuaauaaaaaaaaaaaaaaaaaaaaaaaaaaaaaaaaaaaaaaaaaaaaaaaaaaaaaaaaaaaaaaaaugcaucccccccccccccccccccccccccccccccaaaggcucuuuucagagccaccagaauu

SEQ ID NO: 21041 - RNA, 1477 nt, Artificial Sequence
  SARS-CoV-2__MT831300.1__nucleocapsid protein (N) mRNA gc
aggagaaagcuuaccaugagcgacaacggcccccagaaccagcgcaacgccccgcggaucaccuucgggggccccuccgacagcaccggguccaaccagaacggcgagcgcagcggggcccgguccaagcagcgccggccccagggccugcccaacaacacggcgagcugguucaccgcccucacccagcacggcaaggaggaccugaaguucccgcgcgggcagggcgugcccaucaacaccaacuccagccccgacgaccagaucggguacuaccggcgcgccacgcggcgcauccggggcggggacggcaagaugaaggaccugagcccccgcugguacuucuacuaccucggcaccgggccggaggccggccugcccuacggggccaacaaggacggcaucaucugggucgcgaccgagggcgcccugaacacccccaaguaccacaucgggacgcggaaccccgccaacaacgccgcgaucgugcuccagcugccgcagggcaccacccugcccaagggguucuacgccgagggcucccgcgggggcucccaggccagcucccggagcuccagccgcucccggaacagcucccgcaacagcacccccggcagcuccaagcggacgagccccgcccgcauggccgggaacggcggggacgcggcccucgcccugcugcuccuggaccggcugaaccagcucgaguccaagaugagcggcaaggggcagcagcagcagggccagaccgugaccaagaaguccgccgccgaggcgagcaagaagccgcgccagaagcgcaccgccacgaaggccuacaacgucacccaggccuucggccggcgcgggcccgagcagacccagggcaacuucggggaccaggagcugauccggcagggcaccgacuacaagcacuggccccagaucgcccaguucgcgcccuccgccagcgccuucuucgggaugucccgcaucggcauggaggugacgccgagcggcaccuggcugaccuacaccggggccaucaagcucgacgacaaggaccccaacuucaaggaccaggugauccugcugaacaagcacaucgacgccuacaagacguucccgcccaccgagcccaagaaggacaagaagaagaaggcggacgagacccaggcccucccccagcggcagaagaagcagcagaccgucacgcugcugcccgccgccgaccucgacgacuucuccaagcagcugcagcagagcauguccagcgcggacuccacccaggccugaggacuaguuauaagacugacuagcccgaugggccucccaacgggcccuccuccccuccuugcaccgagauuaauaaaaaaaaaaaaaaaaaaaaaaaaaaaaaaaaaaaaaaaaaaaaaaaaaaaaaaaaaaaaaaaaugcaucccccccccccccccccccccccccccccccaaaggcucuuuucagagccaccagaauu

SEQ ID NO: 21042 - RNA, 1477 nt, Artificial Sequence
  SARS-CoV-2__MT831333.1__nucleocapsid protein (N) mRNA gc
aggagaaagcuuaccaugagcgacaacggccccaagaaccagcgcaacgccccgcggaucaccuucgggggccccuccgacagcaccggguccaaccagaacggcgagcgcagcggggcccgguccaagcagcgccggccccagggccugcccaacaacacggcgagcugguucaccgcccucacccagcacggcaaggaggaccugaaguucccgcgcgggcagggcgugcccaucaacaccaacuccagccccgacgaccagaucggguacuaccggcgcgccacgcggcgcauccggggcggggacggcaagaugaaggaccugagcccccgcugguacuucuacuaccucggcaccgggccggaggccggccugcccuacggggccaacaaggacggcaucaucugggucgcgaccgagggcgcccugaacacccccaaggaccacaucgggacgcggaaccccgccaacaacgccgcgaucgugcuccagcugccgcagggcaccacccugcccaagggguucuacgccgagggcucccgcgggggcucccaggccagcucccggagcuccagccgcucccggaacagcucccgcaacagcacccccggcagcucccgggggacgagccccgcccgcauggccggcaacgggggcgacgcggcccucgcccugcugcuccuggaccggcugaaccagcucgaguccaagaugagcgggaagggccagcagcagcagggccagaccgugaccaagaaguccgccgccgaggcgagcaagaagccgcgccagaagcgcaccgccacgaaggccuacaacgucacccaggccuucgggcggcgcggccccgagcagacccaggggaacuucggcgaccaggagcugauccggcaggggaccgacuacaagcacuggccccagaucgcccaguucgcgcccuccgccagcgccuucuucggcaugucccgcaucggcauggaggugacgccgagcgggaccuggcugaccuacaccggcgccaucaagcucgacgacaaggaccccaacuucaaggaccaggugauccugcugaacaagcacaucgacgccuacaagacguucccgcccaccgagcccaagaaggacaagaagaagaaggcggacgagacccaggcccucccccagcggcagaagaagcagcagaccgucacgcugcugcccgccgccgaccucgacgacuucuccaagcagcugcagcagagcauguccagcgcggacuccacccaggccugaggacuaguuauaagacugacuagcccgaugggccucccaacgggcccuccuccccuccuugcaccgagauuaauaaaaaaaaaaaaaaaaaaaaaaaaaaaaaaaaaaaaaaaaaaaaaaaaaaaaaaaaaaaaaaaaugcaucccccccccccccccccccccccccccccccaaaggcucuuuucagagccaccagaauu

SEQ ID NO: 21043 - RNA, 1477 nt, Artificial Sequence
  SARS-CoV-2__MT831357.1__nucleocapsid protein (N) mRNA gc
aggagaaagcuuaccaugagcgacaacggcccccagaaccagcgcaacgccccgcggaucaccuucgggggccccuccgacagcaccggguccaaccagaacggcgagcgcagcggggcccgguccaagcagcgccggccccagggccugcccaacaacacggcgagcugguucaccgcccucacccagcacggcaaggaggaccugaaguucccgcgcgggcagggcgugcccaucaacaccaacuccagccccgacgaccagaucggguacuaccggcgcgccacgcggcgcauccggggcggggacggcaagaugaaggaccugagcccccgcugguacuucuacuaccucggcaccgggccggaggccggccugcccuacggggccaacaaggacggcaucaucugggucgcgaccgagggcgcccugaacacccccaaggaccacaucgggacgcggaaccccgccaacaacgccgcgaucgugcuccagcugccgcagggcaccacccugcccaagggguucuacgccgagggcucccgcgggggcucccaggccagcucccggagcuccagccgcucccggaacagcucccgcaacagcacccccggcagcuccaagcggacgagccccgcccgcauggccgggaacggcggggacgcggcccucgcccugcugcuccuggaccggcugaaccagcucgaguccaagaugagcggcaaggggcagcagcagcagggccagaccgugaccaagaaguccgccgccgaggcgagcaagaagccgcgccagaagcgcaccgccacgaaggccuacaacgucacccaggccuucggccggcgcgggcccgagcagacccagggcaacuucggggaccaggagcugauccggcgcggcaccgacuacaagcacuggccccagaucgcccaguucgcgcccuccgccagcgccuucuucgggaugucccggaucggcauggaggugacgccgagcggcaccuggcugaccuacaccggggccaucaagcucgacgacaaggaccccaacuucaaggaccaggugauccugcugaacaagcacaucgacgccuacaagacguucccgcccaccgagcccaagaaggacaagaagaagaaggcggacgagacccaggcccucccccagcgccagaagaagcagcagaccgucacgcugcugcccgccgccgaccucgacgacuucuccaagcagcugcagcagagcauguccagcgcggacuccacccaggccugaggacuaguuauaagacugacuagcccgaugggccucccaacgggcccuccuccccuccuugcaccgagauuaauaaaaaaaaaaaaaaaaaaaaaaaaaaaaaaaaaaaaaaaaaaaaaaaaaaaaaaaaaaaaaaaaugcaucccccccccccccccccccccccccccccccaaaggcucuuuucagagccaccagaauu

SEQ ID NO: 21044 - RNA, 1477 nt, Artificial Sequence
  SARS-CoV-2__MT831359.1__nucleocapsid protein (N) mRNA gc
aggagaaagcuuaccaugagcgacaacggcccccagaaccagcgcaacgccccgcggaucaccuucgggggccccuccgacagcaccggguccaaccagaacggcgagcgcagcggggcccgguccaagcagcgccggccccagggccugcccaacaacacggcgagcugguucaccgcccucacccagcacggcaaggaggaccugaaguucccgcgcgggcagggcgugcccaucaacaccaacuccagccccgacgaccagaucggguacuaccggcgcgccacgcggcgcauccggggcggggacggcaagaugaaggaccugagcccccgcugguacuucuacuaccucggcaccgggccggaggccggccugcccuacggggccaacaaggacggcaucaucugggucgcgaccgagggcgcccugaacacccccaaggaccacaucgggacgcggaaccccgccaacaacgccgcgaucgugcuccagcugccgcagggcaccacccugcccaagggguucuacgccgagggcucccgcgggggcucccaggccagcucccggagcuccagccgcucccggaacagcucccgcaacagcacccccggcagcuccaagcggacgagccccgcccgcauggccgggaacggcggggacgcggcccucgcccugcugcuccuggaccggcugaaccagcucgaguccaagaugagcggcaaggggcagcagcagcagggccagaccgugaccaagaaguccgccgccgaggcgagcaagaagccgcgccagaagcgcaccgccacgaaggccuacaacgucacccaggccuucggccggcgcgggcccgagcagacccagggcaacuucggggaccaggagcugauccggcagggcaccgacuacaagcacuggccccagaucgcccaguucgcgcccuccgccagcgccuucuucgggaugucccgcaucggcauggaggugaucccgagcggcacguggcugaccuacaccggggccaucaagcucgacgacaaggaccccaacuucaaggaccaggugauccugcugaacaagcacaucgacgccuacaagaccuucccgcccacggagcccaagaaggacaagaagaagaaggcggacgagacccaggcccucccccagcggcagaagaagcagcagaccgucacccugcugcccgccgccgaccucgacgacuucuccaagcagcugcagcagagcauguccagcgcggacuccacgcaggccugaggacuaguuauaagacugacuagcccgaugggccucccaacgggcccuccuccccuccuugcaccgagauuaauaaaaaaaaaaaaaaaaaaaaaaaaaaaaaaaaaaaaaaaaaaaaaaaaaaaaaaaaaaaaaaaaugcaucccccccccccccccccccccccccccccccaaaggcucuuuucagagccaccagaauu

SEQ ID NO: 21045 - RNA, 1477 nt, Artificial Sequence
  SARS-CoV-2__MT831366.1__nucleocapsid protein (N) mRNA gc
aggagaaagcuuaccaugagcgacaacggcccccagaaccagcgcaacgccccgcggaucaccuucgggggccccuccgacagcaccggguccaaccagaacggcgagcgcagcggggcccgguccaagcagcgccggccccagggccugcccaacaacacggcgagcugguucaccgcccucacccagcacggcaaggaggaccugaaguucccgcgcgggcagggcgugcccaucaacaccaacuccagccccgacgaccagaucggguacuaccggcgcgccacgcggcgcauccggggcggggacggcaagaugaaggaccugagcccccgcugguacuucuacuaccucggcaccgggccggaggccggccugcccuacggggccaacaaggacggcaucaucugggucgcgaccgagggcgcccugaacacccccaaggaccacaucgggacgcggaaccccgccaacaacgccgcgaucgugcuccagcugccgcagggcaccacccugcccaagggguucuacgccgagggcucccgcgggggcucccaggccagcucccggagcuccagccgcucccggaacagcucccgcaacagcacccccggcagcucccgggggacgagccccgcccgcauggccggcaacgggggcgacgcggcccucgcccugcugcuccuggaccggcugaaccagcucgaguccaagaugagcgggaagggccagcagcagcagggccagaccgugaccaagaaguccgccgccgaggcgagcaagaagccgcgccagaagcgcaccgccacgaaggccuacaacgucacccaggccuucgggcggcgcggccccgagcagacccaggggaacuucggcgaccaggagcugauccggcaggggaccgacuacaagcacuggccccagaucgcccaguucgcgcccuccgccagcgccuucuucggcaugucccgcaucggcauggaggugacgccgagcgggaccuggcugaccuacaccggcgccaucaagcucgacgacaaggaccccaacuucaaggaccaggugauccugcugaacaagcacaucgacgccuacaagacguucccgcccaccgagcccaagaaggacaagaagaagaaggcggacgagacccaggcccucccccagcggcagaagaagcagcagaccgucacgcugcugcccgccgccgaccucgacgacuucuccaagcagcugcagcagagcauguccagcgcggacuccauccaggccugaggacuaguuauaagacugacuagcccgaugggccucccaacgggcccuccuccccuccuugcaccgagauuaauaaaaaaaaaaaaaaaaaaaaaaaaaaaaaaaaaaaaaaaaaaaaaaaaaaaaaaaaaaaaaaaaugcaucccccccccccccccccccccccccccccccaaaggcucuuuucagagccaccagaauu

SEQ ID NO: 21046 - RNA, 1477 nt, Artificial Sequence
  SARS-CoV-2__MT831409.1__nucleocapsid protein (N) mRNA gc
aggagaaagcuuaccaugagcgacaacggcccccagaaccagcgcaacgccccgcggaucaccuucgggggccccuccgacagcaccggguccaaccagaacggcgagcgcagcggggcccgguccaagcagcgccggccccagggccugcccaacaacacggcgagcugguucaccgcccucacccagcacggcaaggaggaccugaaguucccgcgcgggcagggcgugcccaucaacaccaacuccagccccgacgaccagaucggguacuaccggcgcgccacgcggcgcauccggggcggggacggcaagaugaaggaccugagcccccgcugguacuucuacuaccucggcaccgggccggaggccggccugcccuacggggccaacaaggacggcaucaucugggucgcgaccgagggcgcccugaacacccccaaggaccacaucgggacgcggaaccccgccaacaacgccgcgaucgugcuccagcugccgcagggcaccacccugcccaagggguucuacgccgagggcucccgcgggggcucccaggccagcucccggagcuccagccgcucccggaacagcucccgcaacagcacccccggcagcuccaagcggacgagccccgcccgcauggccgggaacggcggggacgcggcccucgcccugcugcuccuggaccggcugaaccagcucgaguccaagaugagcggcaaggggcagcagcagcagggccagaccgugaccaagaaguccgccgccgaggcgagcaagaagccgcgccagaagcgcaccgccacgaaggccuacaacgucacccaggccuucggccggcgcgggcccgagcagacccagggcaacuucggggaccaggagcugauccggcagggcaccgacuacaagcacuggccccagaucgcccaguucgcgcccuccgccagcgccuucuucgggaugucccgcaucggcauggaggugacgccgagcggcaccuggcugaccuacaccggggccaucaagcucgacgacaaggaccccaacuucaaggaccaggugauccugcugaacaagcacaucgacgccuacaagacguucccgcccaccgagcccaagaaggacaagaagaagaaggcggacgagacccaggcccucccccagcggcagaagaagcagcagaccgucacgcugcugcccgccguggaccucgacgacuucuccaagcagcugcagcagagcauguccagcgccgacuccacccaggcgugaggacuaguuauaagacugacuagcccgaugggccucccaacgggcccuccuccccuccuugcaccgagauuaauaaaaaaaaaaaaaaaaaaaaaaaaaaaaaaaaaaaaaaaaaaaaaaaaaaaaaaaaaaaaaaaaugcaucccccccccccccccccccccccccccccccaaaggcucuuuucagagccaccagaauu

SEQ ID NO: 21047 - RNA, 1477 nt, Artificial Sequence
  SARS-CoV-2__MT831449.1__nucleocapsid protein (N) mRNA gc
aggagaaagcuuaccaugagcgacaacggcccccagaaccagcgcaacgccccgcggaucaccuucgggggccccuccgacagcaccggguccaaccagaacggcgagcgcagcggggcccgguccaagcagcgccggccccagggccugcccaacaacacggcgagcugguucaccgcccucacccagcacggcaaggaggaccugaaguucccgcgcgggcagggcgugcccaucaacaccaacuccagccccgacgaccagaucggguacuaccggcgcgccacgcggcgcauccggggcggggacggcaagaugaaggaccugagcccccgcugguacuucuacuaccucggcaccgggccggaggccggccugcccuacggggccaacaaggacggcaucaucugggucgcgaccgagggcgcccugaacacccccaaggaccacaucgggacgcggaaccccgccaacaacgccgcgaucgugcuccagcugccgcagggcaccacccugcccaagggguucuacgccgagggcucccgcgggggcucccaggccagcucccggagcuccagccgcucccggaacagcucccgcaacagcauccccggcagcucccgggggaccagccccgcccgcauggccggcaacgggggcgacgcggcccucgcccugcugcuccuggaccggcugaaccagcucgaguccaagaugagcgggaagggccagcagcagcagggccagacggugaccaagaaguccgccgccgaggcgagcaagaagccgcgccagaagcgcaccgccaccaaggccuacaacgucacgcaggccuucgggcggcgcggccccgagcagacccaggggaacuucggcgaccaggagcugauccggcaggggaccgacuacaagcacuggccccagaucgcccaguucgcgcccuccgccagcgccuucuucggcaugucccgcaucggcauggaggugaccccgagcgggacguggcugaccuacaccggcgccaucaagcucgacgacaaggaccccaacuucaaggaccaggugauccugcugaacaagcacaucgacgccuacaagaccuucccgcccacggagcccaagaaggacaagaagaagaaggcggacgagacccaggcccucccccagcggcagaagaagcagcagaccgucacccugcugcccgccgccgaccucgacgacuucuccaagcagcugcagcagagcauguccagcgcggacuccacgcaggccugaggacuaguuauaagacugacuagcccgaugggccucccaacgggcccuccuccccuccuugcaccgagauuaauaaaaaaaaaaaaaaaaaaaaaaaaaaaaaaaaaaaaaaaaaaaaaaaaaaaaaaaaaaaaaaaaugcaucccccccccccccccccccccccccccccccaaaggcucuuuucagagccaccagaauu

SEQ ID NO: 21048 - RNA, 1477 nt, Artificial Sequence
  SARS-CoV-2__MT831483.1__nucleocapsid protein (N) mRNA gc
aggagaaagcuuaccaugagcgacaacggcccccagaaccagcgcaacgccccgcggaucaccuucgggggccccuccgacagcaccggguccaaccagaacggcgagcgcagcggggcccgguccaagcagcgccggccccagggccugcccaacaacacggcgagcugguucaccgcccucacccagcacggcaaggaggaccugaaguucccgcgcgggcagggcgugcccaucaacaccaacuccagccccgacgaccagaucggguacuaccggcgcgccacgcggcgcauccggggcggggacggcaagaugaaggaccugagcccccgcugguacuucuacuaccucggcaccgggccggaggccggccugcccuacggggccaacaaggacggcaucaucugggucgcgaccgagggcgcccugaacacccccaaggaccacaucgggacgcggaaccccgccaacaacgccgcgaucgugcuccagcugccgcagggcaccauccugcccaagggguucuacgccgagggcucccgcgggggcucccaggccagcucccggagcuccagccgcucccggaacagcucccgcaacagcacccccggcagcucccgggggaccagccccgcccgcauggccggcaacgggggcgacgcggcccucgcccugcugcuccuggaccggcugaaccagcucgaguccaagaugagcgggaagggccagcagcagcagggccagacggugaccaagaaguccgccgccgaggcgagcaagaagccgcgccagaagcgcaccgccaccaaggccuacaacgucacgcaggccuucgggcggcgcggccccgagcagacccaggggaacuucggcgaccaggagcugauccggcaggggaccgacuacaagcacuggccccagaucgcccaguucgcgcccuccgccagcgccuucuucggcaugucccgcaucggcauggaggugaccccgagcgggacguggcugaccuacaccggcgccaucaagcucgacgacaaggaccccaacuucaaggaccaggugauccugcugaacaagcacaucgacgccuacaagaccuucccgcccacggagcccaagaaggacaagaagaagaaggcggacgagacccaggcccucccccagcggcagaagaagcagcagaccgucacccugcugcccgccgccgaccucgacgacuucuccaagcagcugcagcagagcauguccagcgcggacuccacgcaggccugaggacuaguuauaagacugacuagcccgaugggccucccaacgggcccuccuccccuccuugcaccgagauuaauaaaaaaaaaaaaaaaaaaaaaaaaaaaaaaaaaaaaaaaaaaaaaaaaaaaaaaaaaaaaaaaaugcaucccccccccccccccccccccccccccccccaaaggcucuuuucagagccaccagaauu

SEQ ID NO: 21049 - RNA, 1477 nt, Artificial Sequence
  SARS-CoV-2__MT831593.1__nucleocapsid protein (N) mRNA gc
aggagaaagcuuaccaugagcgacaacggcccccagaaccagcgcaacgccccgcggaucaccuucgggggccccuccgacagcaccggguccaaccagaacggcgagcgcagcggggcccgguccaagcagcgccggccccagggccugcccaacaacacggcgagcugguucaccgcccucacccagcacggcaaggaggaccugaaguucucccgcgggcagggcgugccgaucaacaccaacagcucccccgacgaccagaucggguacuaccggcgcgccacgcggcgcauccggggcggggacggcaagaugaaggaccugagcccccgcugguacuucuacuaccucggcaccgggcccgaggccggccugccguacggggccaacaaggacggcaucaucugggucgcgaccgagggcgcccugaacacccccaaggaccacaucgggacgcggaaccccgccaacaacgccgcgaucgugcuccagcugccccagggcaccacccugccgaagggguucuacgccgagggcucccgcgggggcagccaggccuccagccgguccagcucccgcagccggaacuccagccgcaacagcacccucggcuccagccgggggacgucccccgcccgcauggccggcaacgggggcgacgcggcccuggcccugcuccugcuggaccggcucaaccagcuggagagcaagauguccgggaagggccagcagcagcagggccagaccgugaccaagaaguccgccgccgaggcgagcaagaagccccgccagaagcgcaccgccacgaaggccuacaacgucacccaggccuucgggcggcgcggccccgagcagacccaggggaacuucggcgaccaggagcugauccggcaggggaccgacuacaagcacuggccgcagaucgcccaguucgcgcccagcgccuccgccuucuucggcaugagccgcaucggcauggaggugacgcccuccgggacccuccugaccuacaccggcgccaucaagcuggacgacaaggaccccaacuucaaggaccaggugauccuccugaacaagcacaucgacgccuacaagacguucccgcccaccgagcccaagaaggacaagaagaagaaggcggacgagacccaggcccugccccagcggcagaagaagcagcagaccgucacgcuccugccggccgccgaccuggacgacuucagcaagcagcuccagcaguccaugagcuccgcggacagcacccaggccugaggacuaguuauaagacugacuagcccgaugggccucccaacgggcccuccuccccuccuugcaccgagauuaauaaaaaaaaaaaaaaaaaaaaaaaaaaaaaaaaaaaaaaaaaaaaaaaaaaaaaaaaaaaaaaaaugcaucccccccccccccccccccccccccccccccaaaggcucuuuucagagccaccagaauu

SEQ ID NO: 21050 - RNA, 1477 nt, Artificial Sequence
  SARS-CoV-2__MT831658.1__nucleocapsid protein (N) mRNA gc
aggagaaagcuuaccaugagcgacaacggcccccagaaccagcgcaacgccccgcggaucaccuucgggggccccuccgacagcaccggguccaaccagaacggcgagcgcagcggggcccgguccaagcagcgccggccccagggccugcccaacaacacggcgagcugguucaccgcccucacccagcacggcaaggaggaccugaaguucccgcgcgggcagggcgugcccaucaacaccaacuccagccccgacgaccagaucggguacuaccggcgcgccacgcggcgcauccggggcggggacggcaagaugaaggaccugagcccccgcugguacuucuacuaccucggcaccgggccggaggccggccugcccuacggggccaacaaggacggcaucaucugggucgcgaccgagggcgcccugaacacccccaaggaccacaucgggacgcggaaccccgccaacaacgccgcgaucgugcuccagcugccgcagggcaccacccugcccaagggguucuacgccgagggcucccgcgggggcucccaggccagcucccggagcuccagccgcucccggaacagcucccgcaacagcacccccggcagcuccaagcggacgagccccgcccgcauggccgggaacggcggggacgcggcccucgcccugcugcuccuggaccggcugaaccagcucgaguccaagaugagcggcaaggggcagcagcagcagggccagaccgugaccaagaaguccgccgccgaggcgagcaagaagccgcgccagaagcgcaccgccacgaaggccuacaacgucacccaggccuucggccggcgcgggcccgagcagacccagggcaacuucggggaccaggagcugauccggcagggcaccgacuacaagcacuggccccagaucgcccaguucgcgcccuccgccagcgccuucuucgggaugucccgcaucggcauggaggugacgccgagcggcaccuggcugaccuacaccggggccaucaagcucgacgacaaggaccccaacuucaaggaccaggugauccugcugaacaagcacaucgacgccuacaagacguucccgcccaccgagcccaagaaggacaagaagaagaaggcggacgagacccaggcccucccccagcggcagaagaagcagcagaccgucacgcugcugcccgccgccgaccucgacgacuucuccaagcagcugcagcagagcaugggcuccgcggacagcacccaggccugaggacuaguuauaagacugacuagcccgaugggccucccaacgggcccuccuccccuccuugcaccgagauuaauaaaaaaaaaaaaaaaaaaaaaaaaaaaaaaaaaaaaaaaaaaaaaaaaaaaaaaaaaaaaaaaaugcaucccccccccccccccccccccccccccccccaaaggcucuuuucagagccaccagaauu

SEQ ID NO: 21051 - RNA, 1477 nt, Artificial Sequence
  SARS-CoV-2__MT831701.1__nucleocapsid protein (N) mRNA gc
aggagaaagcuuaccaugagcgacaacggcccccagaaccagcgcaacgccccgcggaucaccuucgggggccccuccgacagcaccggguccaaccagaacggcgagcgcagcggggcccgguccaagcagcgccggccccagggccugcccaacaacacggcgagcugguucaccgcccucacccagcacggcaaggaggaccugaaguucccgcgcgggcagggcgugcccaucaacaccaacuccagccccgacgaccagaucggguacuaccggcgcgccacgcggcgcauccggggcggggacggcaagaugaaggaccugagcccccgcugguacuucuacuaccucggcaccgggccggaggccggccugcccuacggggccaacaaggacggcaucaucugggucgcgaccgagggcgcccugaacacccccaaggaccacaucgggacgcggaaccccgccaacaacgccgcgaucgugcuccagcugccgcagggcaccacccugcccaagggguucuacgccgagggcucccgcgggggcucccaggccagcucccggagcuccagccgcucccggaacagcucccgcaacagcacccccggcagcuccaagcggacgagccccgcccgcauggccgggaacggcggggacgcggcccucgcccugcugcuccuggaccggcugaaccagcucgaguccaagaugagcggcaaggggcagcagcagcagggccagaccgugaccaagaaguccagcgccgaggccuccaagaagccgcgccagaagcgcaccgcgacgaaggccuacaacgucacccaggccuucggccggcgcgggcccgagcagacccagggcaacuucggggaccaggagcugauccggcagggcaccgacuacaagcacuggccccagaucgcccaguucgcccccagcgcguccgccuucuucgggaugagccgcaucggcauggaggugacgccguccggcaccuggcugaccuacaccggggccaucaagcucgacgacaaggaccccaacuucaaggaccaggugauccugcugaacaagcacaucgacgccuacaagacguucccgcccaccgagcccaagaaggacaagaagaagaaggccgacgagacccaggcgcucccccagcggcagaagaagcagcagaccgucacgcugcugcccgccgccgaccucgacgacuucagcaagcagcugcagcaguccaugagcuccgccgacagcacccaggcgugaggacuaguuauaagacugacuagcccgaugggccucccaacgggcccuccuccccuccuugcaccgagauuaauaaaaaaaaaaaaaaaaaaaaaaaaaaaaaaaaaaaaaaaaaaaaaaaaaaaaaaaaaaaaaaaaugcaucccccccccccccccccccccccccccccccaaaggcucuuuucagagccaccagaauu

SEQ ID NO: 21052 - RNA, 1477 nt, Artificial Sequence
  SARS-CoV-2__MT831717.1__nucleocapsid protein (N) mRNA gc
aggagaaagcuuaccaugagcgacaacggcccccagaaccagcgcaacgccccgcggaucaccuucgggggccccuccgacagcaccggguccaaccagaacggcgagcgcagcggggcccgguccaagcagcgccggccccagggccugcccaacaacacggcgagcugguucaccgcccucacccagcacggcaaggaggaccugaaguucccgcgcgggcagggcgugcccaucaacaccaacuccagccccgacgaccagaucggguacuaccggcgcgccacgcggcgcauccggggcggggacggcaagaugaaggaccugagcccccgcugguacuucuacuaccucggcaccgggccggaggccggccugcccuacggggccaacaaggacggcaucaucugggucgcgaccgagggcgcccugaacacccccaaggaccacaucgggacgcggaaccccgccaacaacgccgcgaucgugcuccagcugccgcagggcaccacccugcccaagggguucuacgccgagggcagccgcgggggcucccaggccagcucccggagcuccagccgcucccggaacagcgcccgcaacuccacccccggcagcagccgggggacgucccccgcccgcauggcgggcaacgggggcgacgccgcccucgcccugcugcuccuggaccggcugaaccagcucgagagcaagauguccgggaagggccagcagcagcagggccagaccgugaccaagaaguccgccgcggaggccuccaagaagccgcgccagaagcgcaccgccacgaaggccuacaacgucacccaggccuucgggcggcgcggccccgagcagacccaggggaacuucggcgaccaggagcugauccggcaggggaccgacuacaagcacuggccccagaucgcgcaguucgcccccagcgccuccgccuucuucggcaugagccgcaucggcauggaggugacgccguccgggaccuggcugaccuacaccggcgccaucaagcucgacgacaaggaccccaacuucaaggaccaggugauccugcugaacaagcacaucgacgcguacaagacguucccgcccaccgagcccaagaaggacaagaagaagaaggccgacgagacccaggcccucccccagcggcagaagaagcagcagaccgucacgcugcugcccgccgcggaccucgacgacuucagcaagcagcugcagcaguccaugagcuccgccgacagcacccaggccugaggacuaguuauaagacugacuagcccgaugggccucccaacgggcccuccuccccuccuugcaccgagauuaauaaaaaaaaaaaaaaaaaaaaaaaaaaaaaaaaaaaaaaaaaaaaaaaaaaaaaaaaaaaaaaaaugcaucccccccccccccccccccccccccccccccaaaggcucuuuucagagccaccagaauu

SEQ ID NO: 21053 - RNA, 1477 nt, Artificial Sequence
  SARS-CoV-2__MT831745.1__nucleocapsid protein (N) mRNA gc
aggagaaagcuuaccaugagcgacaacggcccccagaaccagcgcaacgccccgcggaucaccuucgggggccccuccgacagcaccggguccaaccagaacggcgagcgcagcggggcccgguccaagcagcgccggccccagggccugcccaacaacacggcgagcugguucaccgcccucacccagcacggcaaggaggaccugaaguucccgcgcgggcagggcgugcccaucaacaccaacuccagccccgacgaccagaucggguacuaccggcgcgccacgcggcgcauccggggcggggacggcaagaugaaggaccugagcccccgcugguacuucuacuaccucggcaccgggccggaggccggccugcccuacggggccaacaaggacggcaucaucugggucgcgaccgagggcgcccugaacacccccaaggaccacaucgggacgcggaaccccgccaacaacgccgcgaucgugcuccagcugccgcagggcaccacccugcccaagggguucuacgccgagggcucccgcgggggcucccaggccagcucccggagcuccagccgcucccggaacagcucccgcaacagcacccccggcagcucccgggggacgagccccgcccgcauggccggcaacgggggcgacgcggcccucgcccugcugcuccuggaccggcugaaccagcucgaguccaagaugagcgggaagggccagcagcagcagggccagaccgugaccaagaaguccgccgccgaggcgagcaagaagccgcgccagaagcgcaccgccacgaaggccuacaacgucacccaggccuucgggcggcgcggccccgagcagacccaggggaacuucggcgaccaggagcugauccggcaggggaccgacuacaagcacuggccccagaucgcccaguucgcgcccuccgccagcgccuucuucggcaugucccgcaucggcauggaggugacgccgagcgggaccuggcugaccuacaccggcgccaucaagcucgacgacaaggaccccacguucaaggaccaggugauccugcugaacaagcacaucgacgccuacaagaccuucccgcccaccgagcccaagaaggacaagaagaagaaggcggacgagacccaggcccucccccagcggcagaagaagcagcagacggucacccugcugcccgccgccgaccucgacgacuucuccaagcagcugcagcagagcauguccagcgcggacuccacccaggccugaggacuaguuauaagacugacuagcccgaugggccucccaacgggcccuccuccccuccuugcaccgagauuaauaaaaaaaaaaaaaaaaaaaaaaaaaaaaaaaaaaaaaaaaaaaaaaaaaaaaaaaaaaaaaaaaugcaucccccccccccccccccccccccccccccccaaaggcucuuuucagagccaccagaauu

SEQ ID NO: 21054 - RNA, 1477 nt, Artificial Sequence
  SARS-CoV-2__MT831837.1__nucleocapsid protein (N) mRNA gc
aggagaaagcuuaccaugagcgacaacggcccccagaaccagcgcaacgccccgcggaucaccuucgggggccccuccgacagcaccggguccaaccagaacggcgagcgcagcggggcccgguccaagcagcgccggccccagggccugcccaacaacacggcgagcugguucaccgcccucacccagcacggcaaggaggaccugaaguucccgcgcgggcagggcgugcccaucaacaccaacuccagccccgacgaccagaucggguacuaccggcgcgccacgcggcgcauccggggcggggacggcaagaugaaggaccugagcccccgcugguacuucuacuaccucggcaccgggccggaggccggccugcccuacggggccaacaaggacggcaucaucugggucgcgaccgagggcgcccugaacacccccaaggaccacaucgggacgcggaaccccgccaacaacgccgcgaucgugcuccagcugccgcagggcaccacccugcccaagggguucuacgccgagggcucccgcgggggcucccaggccagcucccggagcuccagccgcucccggaacagcucccgcaacagcacccccggcagcucccgggggacgagccccgcccgcguggccggcaacgggggcgacgcggcccucgcccugcugcuccuggaccggcugaaccagcucgaguccaagaugagcgggaagggccagcagcagcagggccagaccgucaccaagaaguccgccgccgaggcgagcaagaagccgcgccagaagcgcaccgccacgaaggccuacaacgugacccaggccuucgggcggcgcggccccgagcagacccaggggaacuucggcgaccaggagcugauccggcaggggaccgacuacaagcacuggccccagaucgcccaguucgcgcccuccgccagcgccuucuucggcaugucccgcaucggcauggaggugacgccgagcgggaccuggcugaccuacaccggcgccaucaagcucgacgacaaggaccccaacuucaaggaccaggucauccugcugaacaagcacaucgacgccuacaagacguucccgcccaccgagcccaagaaggacaagaagaagaaggcggacgagacccaggcccucccccagcggcagaagaagcagcagaccgugacgcugcugcccgccgccgaccucgacgacuucuccaagcagcugcagcagagcauguccagcgcggacuccacccaggccugaggacuaguuauaagacugacuagcccgaugggccucccaacgggcccuccuccccuccuugcaccgagauuaauaaaaaaaaaaaaaaaaaaaaaaaaaaaaaaaaaaaaaaaaaaaaaaaaaaaaaaaaaaaaaaaaugcaucccccccccccccccccccccccccccccccaaaggcucuuuucagagccaccagaauu

SEQ ID NO: 21055 - RNA, 1477 nt, Artificial Sequence
  SARS-CoV-2__MT833958.1__nucleocapsid protein (N) mRNA gc
aggagaaagcuuaccaugagcgacaacggcccccagaaccagcgcaacgccccgcggaucaccuucgggggccccuccgacagcaccggguccaaccagaacggcaagcgcagcggggcccgguccaagcagcgccggccccagggccugcccaacaacacggcgagcugguucaccgcccucacccagcacggcaaggaggaccugaaguucccgcgcgggcagggcgugcccaucaacaccaacuccagccccgacgaccagaucggguacuaccggcgcgccacgcggcgcauccggggcggggacggcaagaugaaggaccugagcccccgcugguacuucuacuaccucggcaccgggccggaggccggccugcccuacggggccaacaaggacggcaucaucugggucgcgaccgagggcgcccugaacacccccaaggaccacaucgggacgcggaaccccgccaacaacgccgcgaucgugcuccagcugccgcagggcaccacccugcccaagggguucuacgccgagggcucccgcgggggcucccaggccagcucccggagcuccagccgcucccggaacagcucccgcaacagcacccccggcagcuccaagcggacgagccccgcccgcauggccgggaacggcggggacgcggcccucgcccugcugcuccuggaccggcugaaccagcucgaguccaagaugagcggcaaggggcagcagcagcagggccagaccgugaccaagaaguccgccgccgaggcgagcaagaagccgcgccagaagcgcaccgccacgaaggccuacaacgucacccaggccuucggccggcgcgggcccgagcagacccagggcaacuucggggaccaggagcugauccggcagggcaccgacuacaagcacuggccccagaucgcccaguucgcgcccuccgccagcgccuucuucgggaugucccgcaucggcauggaggugacgccgagcggcaccuggcugaccuacaccggggccaucaagcucgacgacaaggaccccaacuucaaggaccaggugauccugcugaacaagcacaucgacgccuacaagacguucccgcccaccgagcccaagaaggacaagaagaagaaggcggacgagacccaggcccucccccagcggcagaagaagcagcagaccgucacgcugcugcccgccgccgaccucgacgacuucuccaagcagcugcagcagagcauguccagcgcggacuccacccaggccugaggacuaguuauaagacugacuagcccgaugggccucccaacgggcccuccuccccuccuugcaccgagauuaauaaaaaaaaaaaaaaaaaaaaaaaaaaaaaaaaaaaaaaaaaaaaaaaaaaaaaaaaaaaaaaaaugcaucccccccccccccccccccccccccccccccaaaggcucuuuucagagccaccagaauu

SEQ ID NO: 21056 - RNA, 1477 nt, Artificial Sequence
  SARS-CoV-2__MT833965.1__nucleocapsid protein (N) mRNA gc
aggagaaagcuuaccaugagcgacaacggcccccagaaccagcgcaacgccccgcggaucaccuucgggggccccuccgacagcaccggguccaaccagaacggcgagcgcagcggggcccgguccaagcagcgccggccccagggccugcccaacaacacggcgagcugguucaccgcccucacccagcacggcaaggaggaccugaaguucccgcgcgggcagggcgugcccaucaacaccaacuccagccccgacgaccagaucggguacuaccggcgcgccacgcggcgcauccggggcggggacggcaagaugaaggaccugagcccccgcugguacuucuacuaccucggcaccgggccggaggccggccugcccuacggggccaacaaggacggcaucaucugggucgcgaccgagggcgcccugaacacccccaaggaccacaucgggacgcggaaccccgccaacaacgccgcgaucgugcuccagcugccgcagggcaccacccugcccaagggguucuacguggagggcucccgcgggggcucccaggccagcucccggagcuccagccgcucccggaacagcucccgcaacagcacccccggcagcucccgggggacgagccccgcccgcauggccggcaacgggggcgacgccgcgcucgcccugcugcuccuggaccggcugaaccagcucgaguccaagaugagcgggaagggccagcagcagcagggccagaccgucaccaagaaguccgccgccgaggccagcaagaagccgcgccagaagcgcaccgcgacgaaggccuacaacgugacccaggccuucgggcggcgcggccccgagcagacccaggggaacuucggcgaccaggagcugauccggcaggggaccgacuacaagcacuggccccagaucgcccaguucgcccccuccgcgagcgccuucuucggcaugucccgcaucggcauggaggugacgccgagcgggaccuggcugaccuacaccggcgccaucaagcucgacgacaaggaccccaacuucaaggaccaggucauccugcugaacaagcacaucgacgccuacaagacguucccgcccaccgagcccaagaaggacaagaagaagaaggccgacgagacccaggcgcucccccagcggcagaagaagcagcagaccgugacgcugcugcccgccgccgaccucgacgacuucuccaagcagcugcagcagagcauguccagcgccgacuccacccaggcgugaggacuaguuauaagacugacuagcccgaugggccucccaacgggcccuccuccccuccuugcaccgagauuaauaaaaaaaaaaaaaaaaaaaaaaaaaaaaaaaaaaaaaaaaaaaaaaaaaaaaaaaaaaaaaaaaugcaucccccccccccccccccccccccccccccccaaaggcucuuuucagagccaccagaauu

SEQ ID NO: 21057 - RNA, 1477 nt, Artificial Sequence
  SARS-CoV-2__MT833974.1__nucleocapsid protein (N) mRNA gc
aggagaaagcuuaccaugagcgacaacggcccccagaaccagcgcaacgccccgcggaucaccuucgggggccccuccgacagcaccggguccaaccagaacggcgagcgcagcggggcccgguccaagcagcgccggccccagggccugcccaacaacacggcgagcugguucaccgcccucacccagcacggcaaggaggaccugaaguucccgcgcgggcagggcgugcccaucaacaccaacuccagccccgacgaccagaucggguacuaccggcgcgccacgcggcgcauccggggcggggacggcaagaugaaggaccugagcccccgcugguacuucuacuaccucggcaccgggccggaggccggccugcccuacggggccaacaaggacggcaucaucugggucgcgaccgagggcgcccugaacacccccaaggaccacaucgggacgcggaaccccgccaacaacgccgcgaucgugcuccagcugccgcagggcaccacccugcccaagggguucuacgccgagggcagccgcgggggcucccaggccagcucccggagcuccagccgcucccggaacagcucccgcaacagcaccagcggcuccagcaagcggacgucccccgcccgcauggccgggaacggcggggacgcggcccucgcccugcugcuccuggaccggcugaaccagcucgagagcaagauguccggcaaggggcagcagcagcagggccagaccgugaccaagaaguccgccgccgaggcguccaagaagccccgccagaagcgcaccgccacgaaggccuacaacgucacccaggccuucggccggcgcgggccggagcagacccagggcaacuucggggaccaggagcugauccggcagggcaccgacuacaagcacuggccccagaucgcccaguucgcgcccagcgccuccgccuucuucgggaugagccgcaucggcauggaggugacgcccuccggcaccuggcugaccuacaccggggccaucaagcucgacgacaaggacccgaacuucaaggaccaggugauccugcugaacaagcacaucgacgccuacaagacguucccgcccaccgagcccaagaaggacaagaagaagaaggcggacgagacccaggcccucccccagcggcagaagaagcagcagaccgucacgcugcugcccgccgccgaccucgacgacuucagcaagcagcugcagcaguccaugagcuccgcggacagcacccaggccugaggacuaguuauaagacugacuagcccgaugggccucccaacgggcccuccuccccuccuugcaccgagauuaauaaaaaaaaaaaaaaaaaaaaaaaaaaaaaaaaaaaaaaaaaaaaaaaaaaaaaaaaaaaaaaaaugcaucccccccccccccccccccccccccccccccaaaggcucuuuucagagccaccagaauu

SEQ ID NO: 21058 - RNA, 1477 nt, Artificial Sequence
  SARS-CoV-2__MT834002.1__nucleocapsid protein (N) mRNA gc
aggagaaagcuuaccaugagcgacaacggcccccagaaccagcgcaacgccccgcggaucaccuucgggggccccuccgacagcaccggguccaaccagaacggcgagcgcagcggggcccgguccaagcagcgccggccccagggccugcccaacaacacggcgagcugguucaccgcccucacccagcacggcaaggaggaccugaaguucccgcgcgggcagggcgugcccaucaacaccaacuccagccccgacgaccagaucggguacuaccggcgcgccacgcggcgcauccggggcggggacggcaagaugaaggaccugagcccccgcugguacuucuacuaccucggcaccgggccggaggccggccugcccuacggggccaacaaggacggcaucaucugggucgcgaccgagggcgcccugaacacccccaaggaccacaucgggacgcggaaccccgccaacaacguggccaucgugcuccagcugccgcagggcaccacccugcccaagggguucuacgcggagggcucccgcgggggcucccaggccagcucccggagcuccagccgcucccggaacagcucccgcaacagcacccccggcagcuccaagcggacgagccccgcccgcauggccgggaacggcggggacgccgcgcucgcccugcugcuccuggaccggcugaaccagcucgaguccaagaugagcggcaaggggcagcagcagcagggccagaccgucaccaagaaguccgccgccgaggccagcaagaagccgcgccagaagcgcaccgcgacgaaggccuacaacgugacccaggccuucggccggcgcgggcccgagcagacccagggcaacuucggggaccaggagcugauccggcagggcaccgacuacaagcacuggccccagaucgcccaguucgcccccuccgcgagcgccuucuucgggaugucccgcaucggcauggaggugacgccgagcggcaccuggcugaccuacaccggggccaucaagcucgacgacaaggaccccaacuucaaggaccaggucauccugcugaacaagcacaucgacgccuacaagacguucccgcccaccgagcccaagaaggacaagaagaagaaggccgacgagacccaggcgcucccccagcggcagaagaagcagcagaccgugacgcugcugcccgccgccgaccucgacgacuucuccaagcagcugcagcagagcauguccagcgccgacuccacccaggcgugaggacuaguuauaagacugacuagcccgaugggccucccaacgggcccuccuccccuccuugcaccgagauuaauaaaaaaaaaaaaaaaaaaaaaaaaaaaaaaaaaaaaaaaaaaaaaaaaaaaaaaaaaaaaaaaaugcaucccccccccccccccccccccccccccccccaaaggcucuuuucagagccaccagaauu

SEQ ID NO: 21059 - RNA, 1477 nt, Artificial Sequence
  SARS-CoV-2__MT834031.1__nucleocapsid protein (N) mRNA gc
aggagaaagcuuaccaugagcgacaacggcccccagaaccagcgcaacgccccgcggaucaccuucgggggccccuccgacagcaccggguccaaccagaacggcgagcgcagcggggcccgguccaagcagcgccggccccagggccugcccaacaacacggcgagcugguucaccgcccucacccagcacggcaaggaggaccugaaguucccgcgcgggcagggcgugcccaucaacaccaacuccagccccgacgaccagaucggguacuaccggcgcgccacgcggcgcauccggggcggggacggcaagaugaaggaccugagcccccgcugguacuucuacuaccucggcaccgggccggaggccggccugcccuacggggccaacaaggacggcaucaucugggucgcgaccgagggcgcccugaacacccccaaggaccacaucgggacgcggaaccccgccaacaacgccgcgaucgugcuccagcugccgcagggcaccacccugcccaagggguucuacgccgagggcucccgcgggggcucccaggccagcucccggagcuccagccgcucccggaacagcucccgcaacagcacccccggcagcuccaagcggacgagccccgcccgcauggccgggaacggcggggacgcggcccucgcccugcugcuccuggaccggcugaaccagcucgaguccaagaugagcggcaaggggcagcagcagcagggccagaccgugaccaagaaguccgccgccgaggcgagcaagaagccgcgccagaagcgcaccgccacgaaggccuacaacgucacccaggccuucggccggcgcgggcccgagcagacccagggcaacuucggggaccaggagcugauccggcagggcaccgacuacaagcacuggccccagaucgcccaguucgcgcccuccgccagcgccuucuucgggaugucccgcaucggcauggaggugacgccgagcggcaccuggcugaccuacaucggggccaucaagcucgacgacaaggaccccaacuucaaggaccaggugauccugcugaacaagcacaucgacgccuacaagaccuucccgcccacggagcccaagaaggacaagaagaagaaggcggacgagacccaggcccucccccagcggcagaagaagcagcagaccgucacccugcugcccgccgccgaccucgacgacuucuccaagcagcugcagcagagcauguccagcgcggacuccacgcaggccugaggacuaguuauaagacugacuagcccgaugggccucccaacgggcccuccuccccuccuugcaccgagauuaauaaaaaaaaaaaaaaaaaaaaaaaaaaaaaaaaaaaaaaaaaaaaaaaaaaaaaaaaaaaaaaaaugcaucccccccccccccccccccccccccccccccaaaggcucuuuucagagccaccagaauu

SEQ ID NO: 21060 - RNA, 1477 nt, Artificial Sequence
  SARS-CoV-2__MT834038.1__nucleocapsid protein (N) mRNA gc
aggagaaagcuuaccaugagcgacaacggcccccagaaccagcgcaacgccccgcggaucaccuucgggggccccuccgacagcaccggguccaaccagaacggcgagcgcagcggggcccgguccaagcagcgccggccccagggccugcccaacaacacggcgagcugguucaccgcccucacccagcacggcaaggaggaccugaaguucccgcgcgggcagggcgugcccaucaacaccaacuccagccccgacgaccagaucggguacuaccggcgcgccacgcggcgcauccggggcggggacggcaagaugaaggaccugagcccccgcugguacuucuacuaccucggcaccgggccggaggccggccugcccuacggggccaacaaggacggcaucaucugggucgcgaccgagggcgcccugaacacccccaaggaccacaucgggacgcggaaccccgccaacaacgccgcgaucgugcuccagcugccgcagggcaccacccugcccaagggguucuacgccgagggcucccgcgggggcucccaggccagcucccggagcuccagccgcucccggaacagcucccgcaacagcacccccggcagcucccgggggacgagccccgcccgcauggccggcaacgggggcgacgcggcccucgcccugcugcuccuggaccggcugaaccagcucgaguccaagaugagcgggaagggccagcagcagcagggccagaccgugaccaagaaguccgccgccgaggcgagcaagaagccgcgccagaagcgcaccgccacgaaggccuacaacgucacccaggccuucgggcggcgcggccccgagcagacccaggggaacuucggcgaccaggagcugauccggcaggggaccgacuacaagcacuggccccagaucgcccaguucgcgcccuccgccagcgccuucuucggcaugucccgcaucggcauggaggugacgccgagcgggaccuggcugaccuacaccggcgccaucaagcucgacgacaaggaccccaacuucaaggaccaggugauccugcugaacaagcacaucgacgccuacaagacguucccgcccaccgagcccaagaaggacaagaagaagaaggcgggggagacccaggcccucccccagcggcagaagaagcagcagaccgucacgcugcugcccgccgccgaccucgacgacuucuccaagcagcugcagcagagcauguccagcgcggacuccacccaggccugaggacuaguuauaagacugacuagcccgaugggccucccaacgggcccuccuccccuccuugcaccgagauuaauaaaaaaaaaaaaaaaaaaaaaaaaaaaaaaaaaaaaaaaaaaaaaaaaaaaaaaaaaaaaaaaaugcaucccccccccccccccccccccccccccccccaaaggcucuuuucagagccaccagaauu

SEQ ID NO: 21061 - RNA, 1477 nt, Artificial Sequence
  SARS-CoV-2__MT834043.1__nucleocapsid protein (N) mRNA gc
aggagaaagcuuaccaugagcgacaacggcccccagaaccagcgcaacgccccgcggaucaccuucgggggccccuccgacagcaccggguccaaccagaacggcgagcgcagcggggcccgguccaagcagcgccggccccagggccugcccaacaacacggcgagcugguucaccgcccucacccagcacggcaagguggaccugaaguucccgcgcgggcagggcguccccaucaacaccaacuccagccccgacgaccagaucggguacuaccggcgcgccacgcggcgcauccggggcggggacggcaagaugaaggaccugagcccccgcugguacuucuacuaccucggcaccgggccggaggccggccugcccuacggggccaacaaggacggcaucaucuggguggcgaccgagggcgcccugaacacccccaaggaccacaucgggacgcggaaccccgccaacaacgccgcgaucgugcuccagcugccgcagggcaccacccugcccaagggguucuacgccgagggcagccgcgggggcucccaggccagcucccggagcuccagccgcucccggaacagccuccgcaacuccacccccggcagcagccgggggacgucccccgcccgcauggccggcaacgggggcgacgcggcccuggcccugcuccugcuggaccggcucaaccagcuggagagcaagauguccgggaagggccagcagcagcagggccagaccgucaccaagaaguccgccgccgaggcguccaagaagccgcgccagaagcgcaccgccacgaaggccuacaacgugacccaggccuucgggcggcgcggccccgagcagacccaggggaacuucggcgaccaggagcugauccggcaggggaccgacuacaagcacuggccccagaucgcccaguucgcgcccagcgccuccgccuucuucggcaugagccgcaucggcauggaggugacgccguccgggaccuggcucaccuacaccggcgccaucaagcuggacgacaaggaccccaacuucaaggaccaggucauccugcucaacaagcacaucgacgccuacaagacguucccgcccaccgagcccaagaaggacaagaagaagaaggcggacgagacccaggcccugccccagcggcagaagaagcagcagaccgugauccugcuccccgccgccgaccuggacgacuucagcaagcagcugcagcaguccaugagcuccgcggacagcacgcaggccugaggacuaguuauaagacugacuagcccgaugggccucccaacgggcccuccuccccuccuugcaccgagauuaauaaaaaaaaaaaaaaaaaaaaaaaaaaaaaaaaaaaaaaaaaaaaaaaaaaaaaaaaaaaaaaaaugcaucccccccccccccccccccccccccccccccaaaggcucuuuucagagccaccagaauu

SEQ ID NO: 21062 - RNA, 1477 nt, Artificial Sequence
  SARS-CoV-2__MT834069.1__nucleocapsid protein (N) mRNA gc
aggagaaagcuuaccaugagcgacaacggcccccagaaccagcgcaacgccccgcacaucaccuucgggggccccuccgacagcaccggguccaaccagaacggcgagcggagcggggcccgcuccaagcagcggcgcccccagggccugcccaacaacacggcgagcugguucaccgcccucacccagcacggcaaggaggaccugaaguucccgcgggggcagggcgugcccaucaacaccaacuccagccccgacgaccagaucggguacuaccgccgggccacgcgccggauccgcggcggggacggcaagaugaaggaccugagcccccggugguacuucuacuaccucggcaccgggccggaggccggccugcccuacggggccaacaaggacggcaucaucugggucgcgaccgagggcgcccugaacacccccaaggaccacaucgggacgcgcaaccccgccaacaacgccgcgaucgugcuccagcugccgcagggcaccacccugcccaagggguucuacgccgagggcucccgcgggggcucccaggccagcucccggagcuccagccggucccgcaacagcucccggaacagcacccccggcagcuccaagcgcacgagccccgcccggauggccgggaacggcggggacgcggcccucgcccugcugcuccuggaccgccugaaccagcucgaguccaagaugagcggcaaggggcagcagcagcagggccagaccgugaccaagaaguccgccgccgaggcgagcaagaagccgcggcagaagcgcaccgccacgaaggccuacaacgucacccaggccuucggccgccgggggcccgagcagacccagggcaacuucggggaccaggagcugauccgccagggcaccgacuacaagcacuggccccagaucgcccaguucgcgcccuccgccagcgccuucuucgggaugucccggaucggcauggaggugacgccgagcggcaccuggcugaccuacaccggggccaucaagcucgacgacaaggaccccaacuucaaggaccaggugauccugcugaacaagcacaucgacgccuacaagacguucccgcccaccgagcccaagaaggacaagaagaagaaggcggacgagacccaggcccucccccagcgccagaagaagcagcagaccgucacgcugcugcccgccgccgaccucgacgacuucuccaagcagcugcagcagagcauguccagcgcggacuccacccaggccugaggacuaguuauaagacugacuagcccgaugggccucccaacgggcccuccuccccuccuugcaccgagauuaauaaaaaaaaaaaaaaaaaaaaaaaaaaaaaaaaaaaaaaaaaaaaaaaaaaaaaaaaaaaaaaaaugcaucccccccccccccccccccccccccccccccaaaggcucuuuucagagccaccagaauu

SEQ ID NO: 21063 - RNA, 1477 nt, Artificial Sequence
  SARS-CoV-2__MT834123.1__nucleocapsid protein (N) mRNA gc
aggagaaagcuuaccaugagcgacaacggcccccagaaccagcgcaacgccccgcggaucaccuucgggggccccuccgacagcaccggguccaaccagaacggcgagcgcagcggggcccgguccaagcagcgccggccccagggccugagcaacaacacggcguccugguucaccgcccucacccagcacggcaaggaggaccugaaguucccccgcgggcagggcgugccgaucaacaccaacagcucccccgacgaccagaucggguacuaccggcgcgccacgcggcgcauccggggcggggacggcaagaugaaggaccugagcccccgcugguacuucuacuaccucggcaccgggcccgaggccggccugccguacggggccaacaaggacggcaucaucugggucgcgaccgagggcgcccugaacacccccaaggaccacaucgggacgcggaaccccgccaacaacgccgcgaucgugcuccagcugccccagggcaccacccugccgaagggguucuacgccgagggcucccgcgggggcagccaggccuccagccgguccagcucccgcagccggaacuccagccgcaacagcacccccggcuccagcaagcggacgucccccgcccgcauggccgggaacggcggggacgcggcccucgcccugcugcuccuggaccggcugaaccagcucgagagcaagauguccggcaaggggcagcagcagcagggccagaccgugaccaagaaguccgccgccgaggcgagcaagaagccccgccagaagcgcaccgccacgaaggccuacaacgucacccaggccuucggccggcgcgggccggagcagacccagggcaacuucggggaccaggagcugauccggcagggcaccgacuacaagcacuggccccagaucgcccaguucgcgcccagcgccuccgccuucuucgggaugagccgcaucggcauggaggugacgcccuccggcaccuggcugaccuacaccggggccaucaagcucgacgacaaggacccgaacuucaaggaccaggugauccugcugaacaagcacaucgacgccuacaagacguucccgcccaccgagcccaagaaggacaagaagaagaaggcggacgagacccaggcccucccccagcggcagaagaagcagcagaccgucacgcugcugcccgccgccgaccucgacgacuucagcaagcagcugcagcaguccaugagcuccgcggacagcacccaggccugaggacuaguuauaagacugacuagcccgaugggccucccaacgggcccuccuccccuccuugcaccgagauuaauaaaaaaaaaaaaaaaaaaaaaaaaaaaaaaaaaaaaaaaaaaaaaaaaaaaaaaaaaaaaaaaaugcaucccccccccccccccccccccccccccccccaaaggcucuuuucagagccaccagaauu

SEQ ID NO: 21064 - RNA, 1477 nt, Artificial Sequence
  SARS-CoV-2__MT834129.1__nucleocapsid protein (N) mRNA gc
aggagaaagcuuaccaugagcgacaacggcccccagaaccagcgcaacgccccgcggaucaccuucgggggccccuccgacagcaccggguccaaccagaacggcgagcgcagcggggcccgguccaagcagcgccggccccagggccugcccaacaacacggcgagcugguucaccgcccucacccagcacggcaaggaggaccugaaguucccgcgcgggcagggcgugcccaucaacaccaacuccagccccgacgaccagaucggguacuaccggcgcgccacgcggcgcauccggggcggggacggcaagaugaaggaccugagcccccgcugguacuucuacuaccucggcaccgggccggaggccggccugcccuacggggccaacaaggacggcaucaucugggucgcgaccgagggcgcccugaacacccccaaggaccacaucgggacgcggaaccccgccaacaacgccgcgaucgugcuccagcugccgcagggcaccacccugcccaagggguucuacgccgagggcucccgcgggggcucccaggccagcucccggagcuccagccgcucccggaacagcucccgcaacagcacccccggcagcuccaagcggacgagccccgcccgcauggccgggaacggcggggacgcggcccucgcccugcugcuccuggaccggcugaaccagcucgaguccaagaugagcggcaaggggcagcagcagcagggccagaccgugaccaagaaguccgccgccgaggcgagcaagaagccgcgccagaagcgcaccgccacgaaggccuacaacgucacccaggccuucggccggcgcgggcccgagcagacccagggcaacuucggggaccaggagcugauccggcagggcaccgacuacaagcacuggccccagaucgcccaguucgcgcccuccgccagcgccuucuucgggaugucccgcaucggcauggaggugacgccgagcggcauguggcugaccuacaccggggccaucaagcucgacgacaaggaccccaacuucaaggaccaggugauccugcugaacaagcacaucgacgccuacaagaccuucccgcccacggagcccaagaaggacaagaagaagaaggcggacgagacccaggcccucccccagcggcagaagaagcagcagaccgucacccugcugcccgccgccgaccucgacgacuucuccaagcagcugcagcagagcauguccagcgcggacuccacgcaggccugaggacuaguuauaagacugacuagcccgaugggccucccaacgggcccuccuccccuccuugcaccgagauuaauaaaaaaaaaaaaaaaaaaaaaaaaaaaaaaaaaaaaaaaaaaaaaaaaaaaaaaaaaaaaaaaaugcaucccccccccccccccccccccccccccccccaaaggcucuuuucagagccaccagaauu

SEQ ID NO: 21065 - RNA, 1477 nt, Artificial Sequence
  SARS-CoV-2__MT834213.1__nucleocapsid protein (N) mRNA gc
aggagaaagcuuaccaugagcgacaacggcccccagaaccagcgcaacgccccgcggaucaccuucgggggccccuccgacagcaccggguccaaccagaacggcgagcgcagcggggcccgguccaagcagcgccggccccagggccugcccaacaacacggcgagcugguucaccgcccucacccagcacggcaaggaggaccugaaguucccgcgcgggcagggcgugcccaucaacaccaacuccagccccgacgaccagaucggguacuaccggcgcgccacgcggcgcauccggggcggggacggcaagaugaaggaccugagcccccgcugguacuucuacuaccucggcaccgggccggaggccggccugcccuacggggccaacaaggacggcaucaucugggucgcgaccgagggcgcccugaacacccccaaggaccacaucgggacgcggaaccccgccaacaacgccgcgaucgugcuccagcugccgcagggcaccacccugcccaagggguucuacgccgagggcucccgcgggggcucccaggccagcucccggagcuccagccgcucccggaacagcucccgcaacagcacccccggcagcucccgggggacgagccccgcccgcauggccggcaacgggggcgacgcggcccucgcccugcugcuccuggaccggcugaaccagcucgaguccaagaugagcgggaagggccagcagcagcagggccagaccgugaccaagaaguccgccgccgaggcgagcaagaagccgcgccagaagcgcaccgccacgaaggccuacaacgucacccaggccuucgggcggcgcggccccgagcagacccaggggaacuucggcgaccaggagcugauccggcaggggaccgacuacaagcacuggccccagaucgcccaguucgcgcccuccgccagcgccuucuucggcaugucccgcaucggcauggaggugacgccgagcgggauguggcugaccuacaccggcgccaucaagcucgacgacaaggaccccaacuucaaggaccaggugauccugcugaacaagcacaucgacgccuacaagaccuucccgcccacggagcccaagaaggacaagaagaagaaggcggacgagacccaggcccucccccagcggcagaagaagcagcagaccgucacccugcugcccgccgccgaccucgacgacuucuccaagcagcugcagcagagcauguccagcgcggacuccacgcaggccugaggacuaguuauaagacugacuagcccgaugggccucccaacgggcccuccuccccuccuugcaccgagauuaauaaaaaaaaaaaaaaaaaaaaaaaaaaaaaaaaaaaaaaaaaaaaaaaaaaaaaaaaaaaaaaaaugcaucccccccccccccccccccccccccccccccaaaggcucuuuucagagccaccagaauu

SEQ ID NO: 21066 - RNA, 1477 nt, Artificial Sequence
  SARS-CoV-2__MT834233.1__nucleocapsid protein (N) mRNA gc
aggagaaagcuuaccaugagcgacaacggcccccagaaccagcgcaacgccccgcggaucaccuucgggggccccuccgacagcaccggguccaaccagaacggcgagcgcagcggggcccgguccaagcagcgccggccccagggccugcccaacaacacggcgagcugguucaccgcccucacccagcacggcaaggaggaccugaaguucccgcgcgggcagggcgugcccaucaacaccaacuccagccccgacgaccagaucggguacuaccggcgcgccacgcggcgcauccggggcggggacggcaagaugaaggaccugagcccccgcugguacuucuacuaccucggcaccgggccggaggccggccugcccuacggggccaacaaggacggcaucaucugggucgcgaccgagggcgcccugaacacccccaaggaccacaucgggacgcggaaccccgccaacaacgccgcgaucgugcuccagcugccgcagggcaccacccugcccaagggguucuacgccgagggcucccgcgggggcucccaggccagcucccggagcuccagccgcucccggaacagcucccgcaacagcacccccggcagcucccgggggacgagccccgcccgcauggccggcaacgggggcgacgcggcccucgcccugcugcuccuggaccggcugaaccagcucgaguccaagaugagcgggaagggccagcagcagcagggccagaccgugaccaagaaguccgccgccgaggcgagcaagaagccgcgccagaagcgcaccgccacgaaggccuacaacgucacccaggccuucgggcggcgcggccccgagcagacccaggggaacuucggcgaccaggagcugauccggcaggggaccgacuacaagcacuggccccagaucgcccaguucgcgcccuccgccagcgccuucuucggcaugucccgcaucggcauggaggugacgccgagcgggaccuggcugaccuacaccggcgccaucaagcucgacgacaaggaccccaacuucaaggaccaggugauccugcugaacaagcacaucgacgccuacaagacguucccccucaccgagcccaagaaggacaagaagaagaaggcggacgagacccaggcccugccgcagcggcagaagaagcagcagaccgucacgcugcuccccgccgccgaccuggacgacuucuccaagcagcugcagcagagcauguccagcgcggacuccacccaggccugaggacuaguuauaagacugacuagcccgaugggccucccaacgggcccuccuccccuccuugcaccgagauuaauaaaaaaaaaaaaaaaaaaaaaaaaaaaaaaaaaaaaaaaaaaaaaaaaaaaaaaaaaaaaaaaaugcaucccccccccccccccccccccccccccccccaaaggcucuuuucagagccaccagaauu

SEQ ID NO: 21067 - RNA, 1477 nt, Artificial Sequence
  SARS-CoV-2__MT834245.1__nucleocapsid protein (N) mRNA gc
aggagaaagcuuaccaugagcgacaacggcccccagaaccagcgcaacgccccgcggaucaccuucgggggccccuccgacagcaccggguccaaccagaacggcgagcgcagcggggcccgguccaagcagcgccggccccagggccugcccaacaacacggcgagcugguucaccgcccucacccagcacggcaaggaggaccugaaguucccgcgcgggcagggcgugcccaucaacaccaacuccagccccgacgaccagaucggguacuaccggcgcgccacgcggcgcauccggggcggggacggcaagaugaaggaccugagcccccgcugguacuucuacuaccucggcaccgggccggaggccggccugcccuacggggccaacaaggacggcaucaucugggucgcgaccgagggcgcccugaacacccccaaggaccacaucgggacgcggaaccccgccaacaacgccgcgaucgugcuccagcugccgcagggcaccacccugcccaagggguucuacgccgagggcucccgcgggggcucccaggccagcucccggagcuccagccgcucccggaacagcucccgcaacagcacccccggcagcuccaagcggacgagccccgcccgcauggccgggaacggcggggacgcggcccucgcccugcugcuccuggaccggcugaaccagcucgaguccaagaugagcggcaaggggcagcagcagcagugccagaccgugaccaagaaguccgccgccgaggcgagcaagaagccgcgccagaagcgcaccgccacgaaggccuacaacgucacccaggccuucggccggcgcggccccgagcagacccaggggaacuucggcgaccaggagcugauccggcaggggaccgacuacaagcacuggccccagaucgcccaguucgcgcccuccgccagcgccuucuucggcaugucccgcaucgggauggaggugacgccgagcggcaccuggcugaccuacaccggcgccaucaagcucgacgacaaggaccccaacuucaaggaccaggugauccugcugaacaagcacaucgacgccuacaagacguucccgcccaccgagcccaagaaggacaagaagaagaaggcggacgagacccaggcccucccccagcggcagaagaagcagcagaccgucacgcugcugcccgccgccgaccucgacgacuucuccaagcagcugcagcagagcauguccagcgcggacuccacccaggccugaggacuaguuauaagacugacuagcccgaugggccucccaacgggcccuccuccccuccuugcaccgagauuaauaaaaaaaaaaaaaaaaaaaaaaaaaaaaaaaaaaaaaaaaaaaaaaaaaaaaaaaaaaaaaaaaugcaucccccccccccccccccccccccccccccccaaaggcucuuuucagagccaccagaauu

SEQ ID NO: 21068 - RNA, 1477 nt, Artificial Sequence
  SARS-CoV-2__MT834281.1__nucleocapsid protein (N) mRNA gc
aggagaaagcuuaccaugagcgacaacggcccccagaaccagcgcaacgccccgcggaucaccuucgggggccccuccgacagcaccggguccaaccagaacggcgagcgcagcggggcccgguccaagcagcgccggccccagggccugcccaacaacacggcgagcugguucaccgcccucacccagcacggcaaggaggaccugaaguucccgcgcgggcagggcgugcccaucaacaccaacuccagccccgacgaccagaucggguacuaccggcgcgccacgcggcgcauccggggcggggacggcaagaugaaggaccugagcccccgcugguacuucuacuaccucggcaccgggccggaggccggccugcccuacggggccaacaaggacggcaucaucugggucgcgaccgagggcgcccugaacacccccaaggaccacaucgggacgcggaaccccgccaacaacgccgcgaucgugcuccagcugccgcagggcaccacccugcccaagggguucuacgccgagggcucccgcgggggcucccaggccagcucccggagcuccagccgcucccggaacagcucccgcaacagcacccccggcagcucccggcgcacgagccccgcccggauggccgggaacggcggggacgcggcccucgcccugcugcuccuggaccgccugaaccagcucgaguccaagaugagcggcaaggggcagcagcagcagggccagaccgugaccaagaaguccgccgccgaggcgagcaagaagccgcgccagaagcggaccgccacgaaggccuacaacgucacccaggccuucggccgccgggggcccgagcagacccagggcaacuucggggaccaggagcugauccgccagggcaccgacuacaagcacuggccccagaucgcccaguucgcgcccuccgccagcgccuucuucgggaugucccggaucggcauggaggugacgccgagcggcaccuggcugaccuacaccggggccaucaagcucgacgacaaggaccccaacuucaaggaccaggugauccugcugaacaagcacaucgacgccuacaagacguucccgcccaccgagcccaagaaggacaagaagaagaaggcggacgagacccaggcccucccccagcgccagaagaagcagcagaccgucacgcugcugcccgccgccgaccucgacgacuucuccaagcagcugcagcagagcauguccagcgcggacuccacccaggccugaggacuaguuauaagacugacuagcccgaugggccucccaacgggcccuccuccccuccuugcaccgagauuaauaaaaaaaaaaaaaaaaaaaaaaaaaaaaaaaaaaaaaaaaaaaaaaaaaaaaaaaaaaaaaaaaugcaucccccccccccccccccccccccccccccccaaaggcucuuuucagagccaccagaauu

SEQ ID NO: 21069 - RNA, 1477 nt, Artificial Sequence
  SARS-CoV-2__MT834348.1__nucleocapsid protein (N) mRNA gc
aggagaaagcuuaccaugagcgacaacggcccccagaaccagcgcaacgccccgcggaucaccuucgggggccccuccgacagcaccggguccaaccagaacggcgagcgcagcggggcccgguccaagcagcgccggccccagggccugcccaacaacacggcgagcugguucaccgcccucacccagcacggcaaggaggaccugaaguucccgcgcgggcagggcgugcccaucaacaccaacuccagccccgacgaccagaucggguacuaccggcgcgccacgcggcgcauccggggcggggacggcaagaugaaggaccugagcccccgcugguacuucuacuaccucggcaccgggccggaggucggccugcccuacggggccaacaaggacggcaucaucuggguggccaccgagggcgcgcugaacacccccaaggaccacaucgggacgcggaaccccgccaacaacgccgccaucgugcuccagcugccgcagggcaccacccugcccaagggguucuacgcggagggcucccgcgggggcucccaggccagcucccggagcuccagccgcucccggaacagcucccgcaacagcacccccggcagcuccaagcggacgagccccgcccgcauggccgggaacggcggggacgccgcgcucgcccugcugcuccuggaccggcugaaccagcucgaguccaagaugagcggcaaggggcagcagcagcagggccagaccgucaccaagaaguccgccgccgaggccagcaagaagccgcgccagaagcgcaccgcgacgaaggccuacaacgugacccaggccuucggccggcgcgggcccgagcagacccagggcaacuucggggaccaggagcugauccggcagggcaccgacuacaagcacuggccccagaucgcccaguucgcccccuccgcgagcgccuucuucgggaugucccgcaucggcauggaggugacgccgagcggcaccuggcugaccuacaccggggccaucaagcucgacgacaaggaccccaacuucaaggaccaggucauccugcugaacaagcacaucgacgccuacaagacguucccgcccaccgagcccaagaaggacaagaagaagaaggccgacgagacccaggcgcucccccagcggcagaagaagcagcagaccgugacgcugcugcccgccgccgaccucgacgacuucuccaagcagcugcagcagagcauguccagcgccgacuccacccaggcgugaggacuaguuauaagacugacuagcccgaugggccucccaacgggcccuccuccccuccuugcaccgagauuaauaaaaaaaaaaaaaaaaaaaaaaaaaaaaaaaaaaaaaaaaaaaaaaaaaaaaaaaaaaaaaaaaugcaucccccccccccccccccccccccccccccccaaaggcucuuuucagagccaccagaauu

SEQ ID NO: 21070 - RNA, 1477 nt, Artificial Sequence
  SARS-CoV-2__MT834661.1__nucleocapsid protein (N) mRNA gc
aggagaaagcuuaccaugagcgacaacggcccccagaaccagcgcaacgccccgcggaucaccuucgggggccccuccgacagcaccggguccaaccagaacggcgagcgcagcggggcccgguccaagcagcgccggccccagggccugcccaacaacacggcgagcugguucaccgcccucacccagcacggcaaggaggaccugaaguucccgcgcgggcagggcgugcccaucaacaccaacuccagccccgacgaccagaucggguacuaccggcgcgccacgcggcgcauccggggcggggacggcaagaugaaggaccugagcccccgcugguacuucuacuaccucggcaccgggccggaggccggccugcccuacggggccaacaaggacggcaucaucugggucgcgaccgagggcgcccugaacacccccaaggaccacaucgggacgcggaaccccgccaacaacgccgcgaucgugcuccagcugccgcagggcaccacccugcccaagggguucuacgccgagggcucccgcgggggcucccagaccagcucccggagcuccagccgcucccggaacagcucccgcaacagcacgcccggcagcucccgggggaccagccccgcccgcauggccggcaacgggggcgacgccgcgcucgcccugcugcuccuggaccggcugaaccagcucgaguccaagaugagcgggaagggccagcagcagcagggccagaccgugaccaagaaguccgccgccgaggccagcaagaagccgcgccagaagcgcacggcgaccaaggccuacaacgucacccaggccuucgggcggcgcggccccgagcagacccaggggaacuucggcgaccaggagcugauccggcaggggacggacuacaagcacuggccccagaucgcccaguucgcccccuccgcgagcgccuucuucggcaugucccgcaucggcauggaggugaccccgagcgggaccuggcugaccuacacgggcgccaucaagcucgacgacaaggaccccaacuucaaggaccaggugauccugcugaacaagcacaucgacgccuacaagaccuucccgcccaccgagcccaagaaggacaagaagaagaaggccgacgagacccaggcgcucccccagcggcagaagaagcagcagacggucacccugcugcccgccgccgaccucgacgacuucuccaagcagcugcagcagagcauguccagcgccgacuccacccaggcgugaggacuaguuauaagacugacuagcccgaugggccucccaacgggcccuccuccccuccuugcaccgagauuaauaaaaaaaaaaaaaaaaaaaaaaaaaaaaaaaaaaaaaaaaaaaaaaaaaaaaaaaaaaaaaaaaugcaucccccccccccccccccccccccccccccccaaaggcucuuuucagagccaccagaauu

SEQ ID NO: 21071 - RNA, 1477 nt, Artificial Sequence
  SARS-CoV-2__MT834687.1__nucleocapsid protein (N) mRNA gc
aggagaaagcuuaccaugagcgacaacggcccccagaaccagcgcaacgccccgcggaucaccuucgggggccccuccgacagcaccggguccaaccagaacggcgagcgcagcggggcccgguccaagcagcgccggccccagggccugcccaacaacacggcgagcugguucaccgcccucacccagcacggcaaggaggaccugaaguucccgcgcgggcagggcgugcccaucaacaccaacuccagccccgacgaccagaucggguacuaccggcgcgccacgcggcgcauccggggcggggacggcaagaugaaggaccugagcccccgcugguacuucuacuaccucggcaccgggccggaggccggccugcccuacggggccaacaaggacggcaucaucugggucgcgaccgagggcgcccugaacacccccaaggaccacaucgggacgcggaaccccgccaacaacgccgcgaucgugcuccagcugccgcagggcaccacccugcccaagggguucuacgccgagggcucccgcgggggcucccaggccagcucccggagcuccagccgcucccggaacagcucccgcaacagcacccccggcagcucccgggggacgagccucgccaagauggccggcaacgggggcgacgcggcccuggcccugcuccugcuggaccgccucaaccagcuggaguccaagaugagcgggaagggccagcagcagcagggccagaccgugaccaagaaguccgccgccgaggcgagcaagaagccccggcagaagcgcaccgccacgaaggccuacaacgucacccaggccuucgggcgccggggcccggagcagacccaggggaacuucggcgaccaggagcugauccgccaggggaccgacuacaagcacuggccccagaucgcccaguucgcgcccuccgccagcgccuucuucggcaugucccggaucggcauggaggugacgcccagcgggaccuggcucaccuacaccggcgccaucaagcuggacgacaaggacccgaacuucaaggaccaggugauccugcucaacaagcacaucgacgccuacaagacguucccgcccaccgagcccaagaaggacaagaagaagaaggcggacgagacccaggcccugucccagcgccagaagaagcagcagaccgucacgcugcuccccgccgccgaccuggacgacuucagcaagcagcugcagcaguccaugagcuccgcggacagcacccaggccugaggacuaguuauaagacugacuagcccgaugggccucccaacgggcccuccuccccuccuugcaccgagauuaauaaaaaaaaaaaaaaaaaaaaaaaaaaaaaaaaaaaaaaaaaaaaaaaaaaaaaaaaaaaaaaaaugcaucccccccccccccccccccccccccccccccaaaggcucuuuucagagccaccagaauu

SEQ ID NO: 21072 - RNA, 1477 nt, Artificial Sequence
  SARS-CoV-2__MT834689.1__nucleocapsid protein (N) mRNA gc
aggagaaagcuuaccaugagcgacaacggcccccagaaccagcgcaacgccccgcggaucaccuucgggggccccuccgacagcaccggguccaaccagaacggcgagcgcagcggggcccgguccaagcagcgccggccccagggccugcccaacaacacggcgagcugguucaccgcccucacccagcacggcaaggaggaccugaaguucccgcgcgggcagggcgugcccaucaacaccaacuccagccccgacgaccagaucggguacuaccggcgcgccacgcggcgcauccggggcggggacggcaagaugaaggaccugagcccccgcugguacuucuacuaccucggcaccgggccggaggccggccugcccuacggggccaacaaggacggcaucaucugggucgcgaccgagggcgcccugaacacccccaaggaccacaucgggacgcggaaccccgccaacaacgccgcgaucgugcuccagcugccgcagggcaccacccugcccaagggguucuacgccgagggcagccgcgggggcucccaggccagcucccggagcuccagccgcaaccggaacuccagccgcaacuccacccccggcagcagccgggggacgucccccgcccgcauggccggcaacgggggcgacgcggcccucgcccugcugcuccuggaccggcugaaccagcucgagagcaagauguccgggaagggccagcagcagcagggccagaccgugaccaagaaguccgccgccgaggcguccaagaagccgcgccagaagcgcaccgccacgaaggccuacaacgucacccaggccuucgggcggcgcggccccgagcagacccaggggaacuucggcgaccaggagcugauccggcaggggaccgacuacaagcacuggccccagaucgcccaguucgcgcccagcgccuccgccuucuucggcaugagccgcaucggcauggaggugacgccguccgggaccuggcugaccuacaccggcgccaucaagcucgacgacaaggaccccaacuucaaggaccaggugauccugcugaacaagcacaucgacgccuacaagacguucccgcccaccgagcccaagaaggacaagaagaagaaggcggacgagacccaggcccucccccagcggcagaagaagcagcagaccgucacgcugcugcccgccgccgaccucgacgacuucagcaagcagcugcagcaguccaugagcuccgcggacagcacccaggccugaggacuaguuauaagacugacuagcccgaugggccucccaacgggcccuccuccccuccuugcaccgagauuaauaaaaaaaaaaaaaaaaaaaaaaaaaaaaaaaaaaaaaaaaaaaaaaaaaaaaaaaaaaaaaaaaugcaucccccccccccccccccccccccccccccccaaaggcucuuuucagagccaccagaauu

SEQ ID NO: 21073 - RNA, 1477 nt, Artificial Sequence
  SARS-CoV-2__MT834715.1__nucleocapsid protein (N) mRNA gc
aggagaaagcuuaccaugagcgacaacggcccccagaaccagcgcaacgccccgcggaucaccuucgggggccccuccgacagcaccggguccaaccagaacggcgagcgcagcggggcccgguccaagcagcgccggccccagggccugcccaacaacacggcgagcugguucaccgcccucacccagcacggcaaggaggaccugaaguucccgcgcgggcagggcgugcccaucaacaccaacuccagccccgacgaccagaucggguacuaccggcgcgccacgcggcgcauccggggcggggacggcaagaugaaggaccugagcccccgcugguacuucuacuaccucggcaccgggccggaggccggccugcccuacggggccaacaaggacggcaucaucugggucgcgaccgagggcgcccugaacacccccaaggaccacaucgggacgcggaaccccgccaacaacgccgcgaucgugcuccagcugccgcagggcaccacccugcccaagggguucuacgccgagggcucccgcgggggcucccaggccagcucccggagcuccagccgcucccggaacagcucccgcaacagcacccccggcagcucccgggggacgagccccggccgcauggccgggaacggcggggacgccgcgcucgcccugcugcuccuggaccggcugaaccagcucgaguccaagaugagcggcaagggccagcagcagcaggggcagaccgugaccaagaaguccgccgccgaggccagcaagaagccgcgccagaagcgcaccgcgacgaaggccuacaacgucacccaggccuucggccggcgcgggcccgagcagacccagggcaacuucggggaccaggagcugauccggcagggcaccgacuacaagcacuggccccagaucgcccaguucgcccccuccgcgagcgccuucuucggcaugucccgcaucgggauggaggugacgccgagcggcaccuggcugaccuacaccggggccaucaagcucgacgacaaggaccccaacuucaaggaccaggugauccugcugaacaagcacaucgacgccuacaagacguucccgcccaccgagcccaagaaggacaagaagaagaaggccgacgagacccaggcgcucccccagcggcagaagaagcagcagaccgucauccugcugcccgccgccgaccucgacgacuucuccaagcagcugcagcagagcauguccagcgccgacuccacgcaggcgugaggacuaguuauaagacugacuagcccgaugggccucccaacgggcccuccuccccuccuugcaccgagauuaauaaaaaaaaaaaaaaaaaaaaaaaaaaaaaaaaaaaaaaaaaaaaaaaaaaaaaaaaaaaaaaaaugcaucccccccccccccccccccccccccccccccaaaggcucuuuucagagccaccagaauu

SEQ ID NO: 21074 - RNA, 1477 nt, Artificial Sequence
  SARS-CoV-2__MT827212.1__nucleocapsid protein (N) mRNA gc
aggagaaagcuuaccaugagcgacaacggcccccagaaccagcgcaacgccccgcggaucaccuucgggggccccuccgacagcaccggguccaaccagaacggcgagcgcagcggggcccgguccaagcagcgccggccccagggccugcccaacaacacggcgagcugguucaccgcccucacccagcacggcaaggaggaccugaaguucccgcgcgggcagggcgugcccaucaacaccaacuccagccccgacgaccagaucggguacuaccggcgcgccacgcggcgcauccggggcggggacggcaagaugaaggaccugagcccccgcugguacuucuacuaccucggcaccgggccggaggccggccugcccuacggggccaacaaggacggcaucaucugggucgcgaccgagggcgcccugaacacccccaaggaccacaucgggacgcggaaccccgccaacaacgccgcgaucgugcuccagcugccgcagggcaccacccugcccaagggguucuacgccgagggcucccgcgggggcucccaggccagcucccggagcuccagccgcucccggaacagcucccgcaacagcacccccggcagcucccgggggacgagccccgcccgcauggccggcaacgggggcgacgcggcccucgcccugcugcuccuggaccggcugaaccagcucgaguccaagaugagcgggaagggccagcagcagcagggccagaccgugaccaagaaguccgucgccgaggccagcaagaagccgcgccagaagcgcaccgcgacgaaggccuacaacgugacccaggccuucgggcggcgcggccccgagcagacccaggggaacuucggcgaccaggagcugauccggcaggggaccgacuacaagcacuggccccagaucgcccaguucgcccccuccgcgagcgccuucuucggcaugucccgcaucggcauggaggugacgccgagcgggaccuggcugaccuacaccggcgccaucaagcucgacgacaaggaccccaacuucaaggaccaggucauccugcugaacaagcacaucgacgccuacaagacguucccgcccaccgagcccaagaaggacaagaagaagaaggccgacgagacccaggcgcucccccagcggcagaagaagcagcagaccgugacgcugcugcccgccgccgaccucgacgacuucuccaagcagcugcagcagagcauguccagcgccgacuccacccaggcgugaggacuaguuauaagacugacuagcccgaugggccucccaacgggcccuccuccccuccuugcaccgagauuaauaaaaaaaaaaaaaaaaaaaaaaaaaaaaaaaaaaaaaaaaaaaaaaaaaaaaaaaaaaaaaaaaugcaucccccccccccccccccccccccccccccccaaaggcucuuuucagagccaccagaauu

SEQ ID NO: 21075 - RNA, 1477 nt, Artificial Sequence
  SARS-CoV-2__MT825091.1__nucleocapsid protein (N) mRNA gc
aggagaaagcuuaccaugagcgacaacggcccccagaaccagcagaacgccccgcgcaucaccuucgggggccacuccgacagcaccggguccaaccagaacggcgagcggagcggggcccgcuccaagcagcggcgcccccagggccugcccaacaacacggcgagcugguucaccgcccucacccagcacggcaaggaggaccugaaguucccccgggggcagggcgugccgaucaacaccaacuccagccccgacgaccagaucggguacuaccgccgggccacgcgccggauccgcggcggggacggcaagaugaaggaccugagcccccggugguacuucuacuaccucggcaccgggcccgaggccggccugccguacggggccaacaaggacggcaucaucugggucgcgaccgagggcgcccugaacacccccaaggaccacaucgggacgcucaaccccgccaacaacgccgcgaucgugcugcagcugccccagggcaccacccucccgaagggguucuacgccgagggcagccgcgggggcucccaggccagcucccggagcuccagccgcucccggaacagccugcgcaacuccacccccggcagcagccgggggacgucccccgcccgcauggccggcaacgggggcgacgcggcccuggcccuccugcugcucgaccggcugaaccagcuggagagcaagauguccgggaagggccagcagcagcagggccagaccgugaccaagaaguccgccgccgaggcguccaagaagccccgccagaagcggaccgccacgaaggccuacaacgucacccaggccuucgggcgccgcggcccggagcagacccaggggaacuucggcgaccaggagcucauccggcaggggaccgacuacaagcacuggccccagaucgcccaguucgcgcccagcgccuccgccuucuucggcaugagccgcaucggcauggaggugacgcccuccgggaccuggcugaccuacaccggcgccaucaagcuggacgacaaggacccgaacuucaaggaccaggugauccuccugaacaagcacaucgacgccuacaagacguucccgcccaccgagcccaagaaggacaagaagaagaaggcggacgagacccaggcccugccccagcggcagaagaagcagcucaccgucacgcugcugcccgccgccgaccucgacgacuucagcaagcagcugcagcaguccaugagcuccgcggacagcacccaggccugaggacuaguuauaagacugacuagcccgaugggccucccaacgggcccuccuccccuccuugcaccgagauuaauaaaaaaaaaaaaaaaaaaaaaaaaaaaaaaaaaaaaaaaaaaaaaaaaaaaaaaaaaaaaaaaaugcaucccccccccccccccccccccccccccccccaaaggcucuuuucagagccaccagaauu

SEQ ID NO: 21076 - RNA, 1477 nt, Artificial Sequence
  SARS-CoV-2__MT821594.1__nucleocapsid protein (N) mRNA gc
aggagaaagcuuaccaugagcgacaacggcccccagaaccagcgcaacgccccgcggaucaccuucgggggccccuccgacagcaccggguccaaccagaacggcgagcgcagcggggcccgguccaagcagcgccggccccagggccugcccaacaacacggcgagcugguucaccgcccucacccagcacggcaaggaggaccugaaguucccgcgcgggcagggcgugcccaucaacaccaacuccagccccgacgaccagaucggguacuaccggcgcgccacgcggcgcauccggggcggggacggcaagaugaaggaccugagcccccgcugguacuucuacuaccucggcaccgggccggaggccggccugcccuacggggccaacaaggacggcaucaucugggucgcgaccgagggcgcccugaacacccccaaggaccacaucgggacgcggaaccccgccaacaacgccgcgaucgugcuccagcugccgcagggcaccacccugcccaagggguucuacgccgagggcucccgcgggggcucccaggccagcucccggagcuccagccgcucccggaacagcucccgcaacagcacccccggcagcucccgggggacgagccccgcccgcauggccggcaacgggggcgacgcggcccucgcccugcugcuccuggaccggcugaaccagcucgaguccaagaugagcgggaagggccagcagcagcagggccagaccgugaccaagaaguccgccgccgaggcgagcaagaagccgcgccagaagcgcaccgccacgaaggccuacaacgucacccaggccuucgggcggcgcggccccgagcagacccaggggaacuucggcgaccaggagcugauccggcaggggaccgacuacaagcacuggccccagaucgcccaguucgcgcccuccgccagcgccuucuucggcaugucccgcaucggcauggaggugacgccgagcgggaccuggcugaccuacaccggcgccaucaagcucgacgacaaggaccccaacuucaaggaccaggugauccugcugaacaagcacaucgacgccuacaagacguuccccuccaccgagcccaagaaggacaagaagaagaaggcggacgagacccaggcccucccgcagcggcagaagaagcagcagaccgucacgcugcugcccgccgccgaccucgacgacuucagcaagcagcugcagcaguccaugagcuccgcggacagcacccaggccugaggacuaguuauaagacugacuagcccgaugggccucccaacgggcccuccuccccuccuugcaccgagauuaauaaaaaaaaaaaaaaaaaaaaaaaaaaaaaaaaaaaaaaaaaaaaaaaaaaaaaaaaaaaaaaaaugcaucccccccccccccccccccccccccccccccaaaggcucuuuucagagccaccagaauu

SEQ ID NO: 21077 - RNA, 1477 nt, Artificial Sequence
  SARS-CoV-2__MT821646.1__nucleocapsid protein (N) mRNA gc
aggagaaagcuuaccaugagcgacaacggcccccagaaccagcgcaacgccccgcggaucaccuucgggggccccuccgacagcaccggguccaaccagaacggcgagcgcagcggggcccgguccaagcagcgccggccccagggccugcccaacaacacggcgagcugguucaccgcccucacccagcacggcaaggaggaccugaaguucccgcgcgggcagggcgugcccaucaacaccaacuccagccccgacgaccagaucggguacuaccggcgcgccacgcggcgcauccggggcggggacggcaagaugaaggaccugagcccccgcugguacuucuacuaccucggcaccgggccggaggccggccugcccuacggggccaacaaggacggcaucaucugggucgcgaccgagggcgcccugaacacccccaaggaccacaucgggacgcggaaccccgccaacaacgccgcgaucgugcuccagcugccgcagggcaccacccugcccaagggguucuacgccgagggcucccgcgggggcucccaggccagcucccggagcuccagccgcucccggaacagcucccgcaacagcacccccggcagcuccaaggggacgagccccgcccggauggccggcaacgggggcgacgcggcccucgcccugcugcuccuggaccgccugaaccagcucgaguccaagaugagcgggaagggccagcagcagcagggccagaccgugaccaagaaguccgccgccgaggcgagcaagaagccgcggcagaagcgcaccgccacgaaggccuacaacgucacccaggccuucgggcgccggggccccgagcagacccaggggaacuucggcgaccaggagcugauccgccaggggaccgacuacaagcacuggccccagaucgcccaguucgcgcccuccgccagcgccuucuucggcaugucccggaucggcauggaggugacgccgagcgggaccuggcugaccuacaccggcgccaucaagcucgacgacaaggaccccaacuucaaggaccaggugauccugcugaacaagcacaucgacgccuacaagacguucccgcccaccgagcccaagaaggacaagaagaagaaggcggacgagacccaggcccucccccagcgccagaagaagcagcagaccgucacgcugcugcccgccgccgaccucgacgacuucuccaagcagcugcagcagagcauguccagcgcggacuccacccaggccugaggacuaguuauaagacugacuagcccgaugggccucccaacgggcccuccuccccuccuugcaccgagauuaauaaaaaaaaaaaaaaaaaaaaaaaaaaaaaaaaaaaaaaaaaaaaaaaaaaaaaaaaaaaaaaaaugcaucccccccccccccccccccccccccccccccaaaggcucuuuucagagccaccagaauu

SEQ ID NO: 21078 - RNA, 1477 nt, Artificial Sequence
  SARS-CoV-2__MT821766.1__nucleocapsid protein (N) mRNA gc
aggagaaagcuuaccaugagcgacaacggcccccagaaccagcgcaacgccccgcggaucaccuucgggggccccuccgacagcaccggguccaaccagaacggcgagcgcagcggggcccgguccaagcagcgccggccccagggccugcccaacaacacggcgagcugguucaccgcccucacccagcacggcaaggaggaccugaaguucccgcgcgggcagggcgugcccaucaacaccaacuccagccccgacgaccagaucggguacuaccggcgcgccacgcggcgcauccggggcggggacggcaagaugaaggaccugagcccccgcugguacuucuacuaccucggcaccgggccggaggccggccugcccuacggggccaacaaggacggcaucaucugggucgcgaucgagggcgcccugaacacccccaaggaccacaucgggacccggaaccccgccaacaacgccgcgaucgugcuccagcugccgcagggcacgacccugcccaagggguucuacgccgagggcucccgcgggggcucccaggccagcucccggagcuccagccgcucccggaacagcucccgcaacagcacccccggcagcucccgggggaccagccccgcccgcauggccggcaacgggggcgacgcggcccucgcccugcugcuccuggaccggcugaaccagcucgaguccaagaugagcgggaagggccagcagcagcagggccagacggugaccaagaaguccgccgccgaggcgagcaagaagccgcgccagaagcgcaccgccaccaaggccuacaacgucacgcaggccuucgggcggcgcggccccgagcagacccaggggaacuucggcgaccaggagcugauccggcaggggaccgacuacaagcacuggccccagaucgcccaguucgcgcccuccgccagcgccuucuucggcaugucccgcaucggcauggaggugaccccgagcgggacguggcugaccuacaccggcgccaucaagcucgacgacaaggaccccaacuucaaggaccaggugauccugcugaacaagcacaucgacgccuacaagaccuucccgcccacggagcccaagaaggacaagaagaagaaggcggacgagacccaggcccucccccagcggcagaagaagcagcagaccgucacccugcugcccgccgccgaccucgacgacuucuccaagcagcugcagcagagcauguccagcgcggacuccacgcaggccugaggacuaguuauaagacugacuagcccgaugggccucccaacgggcccuccuccccuccuugcaccgagauuaauaaaaaaaaaaaaaaaaaaaaaaaaaaaaaaaaaaaaaaaaaaaaaaaaaaaaaaaaaaaaaaaaugcaucccccccccccccccccccccccccccccccaaaggcucuuuucagagccaccagaauu

SEQ ID NO: 21079 - RNA, 1477 nt, Artificial Sequence
  SARS-CoV-2__MT821773.1__nucleocapsid protein (N) mRNA gc
aggagaaagcuuaccaugagcgacaacggcccccagaaccagcgcaacgccccgcggaucaccuucgggggccccuccgacagcaucggguccaaccagaacggcgagcgcagcggggcccgguccaagcagcgccggccccagggccugcccaacaacaccgcgagcugguucacggcccucacccagcacggcaaggaggaccugaaguucccgcgcgggcagggcgugcccaucaacaccaacuccagccccgacgaccagaucggguacuaccggcgcgccacccggcgcauccggggcggggacggcaagaugaaggaccugagcccccgcugguacuucuacuaccucggcacggggccggaggccggccugcccuacggggccaacaaggacggcaucaucugggucgcgaccgagggcgcccugaacacccccaaggaccacaucgggacccggaaccccgccaacaacgccgcgaucgugcuccagcugccgcagggcacgacccugcccaagggguucuacgccgagggcucccgcgggggcucccaggccagcucccggagcuccagccgcucccggaacagcucccgcaacagcacccccggcagcucccgggggaccagccccgcccgcauggccggcaacgggggcgacgcggcccucgcccugcugcuccuggaccggcugaaccagcucgaguccaagaugagcgggaagggccagcagcagcagggccagacggugaccaagaaguccgccgccgaggcgagcaagaagccgcgccagaagcgcaccgccaccaaggccuacaacgucacgcaggccuucgggcggcgcggccccgagcagacccaggggaacuucggcgaccaggagcugauccggcaggggaccgacuacaagcacuggccccagaucgcccaguucgcgcccuccgccagcgccuucuucggcaugucccgcaucggcauggaggugaccccgagcgggacguggcugaccuacaccggcgccaucaagcucgacgacaaggaccccaacuucaaggaccaggugauccugcugaacaagcacaucgacgccuacaagaccuucccgcccacggagcccaagaaggacaagaagaagaaggcggacgagacccaggcccucccccagcggcagaagaagcagcagaccgucacccugcugcccgccgccgaccucgacgacuucuccaagcagcugcagcagagcauguccagcgcggacuccacgcaggccugaggacuaguuauaagacugacuagcccgaugggccucccaacgggcccuccuccccuccuugcaccgagauuaauaaaaaaaaaaaaaaaaaaaaaaaaaaaaaaaaaaaaaaaaaaaaaaaaaaaaaaaaaaaaaaaaugcaucccccccccccccccccccccccccccccccaaaggcucuuuucagagccaccagaauu

SEQ ID NO: 21080 - RNA, 1477 nt, Artificial Sequence
  SARS-CoV-2__MT821776.1__nucleocapsid protein (N) mRNA gc
aggagaaagcuuaccaugagcgacaacggcccccagaaccagcgcaacgccccgcggaucaccuucgggggccccuccgacagcaccggguccaaccagaacggcgagcgcagcggggcccgguccaagcagcgccggccccagggccugcccaacaacacggcgagcugguucaccgcccucacccagcacggcaaggaggaccugaaguucccgcgcgggcagggcgugcccaucaacaccaacuccagccccgacgaccagaucggguacuaccggcgcgccacgcggcgcauccggggcggggacggcaagaugaaggaccugagcccccgcugguacuucuacuaccucggcaccgggccggaggccggccugcccuacggggccaacaaggacggcaucaucugggucgcgaccgagggcgccuucaacacccccaaggaccacaucgggacgcggaaccccgccaacaacgccgcgaucgugcugcagcucccgcagggcaccacccugcccaagggguucuacgccgagggcucccgcgggggcucccaggccagcucccggagcuccagccgcucccggaacagcucccgcaacagcacccccggcagcucccgggggacgagccccgcccgcauggccggcaacgggggcgacgcggcccuggcccuccugcugcucgaccggcugaaccagcuggaguccaagaugagcgggaagggccagcagcagcagggccagaccgugaccaagaaguccgccgccgaggcgagcaagaagccgcgccagaagcgcaccgccacgaaggccuacaacgucacccaggccuucgggcggcgcggccccgagcagacccaggggaacuucggcgaccaggagcucauccggcaggggaccgacuacaagcacuggccccagaucgcccaguucgcgcccuccgccagcgccuucuucggcaugucccgcaucggcauggaggugacgccgagcgggaccuggcugaccuacaccggcgccaucaagcuggacgacaaggaccccaacuucaaggaccaggugauccuccugaacaagcacaucgacgccuacaagacguucccgcccaccgagcccaagaaggacaagaagaagaaggcggacgagacccaggcccugccccagcggcagaagaagcagcagaccgucacgcuccugcccgccgccgaccuggacgacuucuccaagcagcuccagcagagcauguccagcgcggacuccacccaggccugaggacuaguuauaagacugacuagcccgaugggccucccaacgggcccuccuccccuccuugcaccgagauuaauaaaaaaaaaaaaaaaaaaaaaaaaaaaaaaaaaaaaaaaaaaaaaaaaaaaaaaaaaaaaaaaaugcaucccccccccccccccccccccccccccccccaaaggcucuuuucagagccaccagaauu

SEQ ID NO: 21081 - RNA, 1477 nt, Artificial Sequence
  SARS-CoV-2__MT821778.1__nucleocapsid protein (N) mRNA gc
aggagaaagcuuaccaugagcgacaacggcccccagaaccagcgcaacgccccgcggaucaccuucgggggccccuccgacagcaccggguccaaccagaacggcgagcgcagcggggcccgguccaagcagcgccggccccagggccugcccaacaacacggcgagcugguucaccgcccucacccagcacggcaaggaggaccugaaguucccgcgcgggcagggcgugcccaucaacaccaacuccagccccgacgaccagaucggguacuaccggcgcgccacgcggcgcauccggggcggggacggcaagaugaaggaccugagcccccgcugguacuucuacuaccucggcaccgggccggaggccggccugcccuacggggccaacaaggacggcaucaucugggucgcgaccgagggcgcccugaacacccccaaggaccacaucgggacgcggaaccccgccaacaacgccgcgaucgugcuccagcugccgcagggcaccacccugcccaagggguucuacgccgagggcucccgcgggggcucccaggccagcuccugcagcuccagccggucccgcaacagcucccggaacagcacccccggcagcucccgcgggacgagccccgcccggauggccggcaacgggggcgacgcggcccucgcccugcugcuccuggaccgccugaaccagcucgaguccaagaugagcgggaagggccagcagcagcagggccagaccgugaccaagaaguccgccgccgaggcgagcaagaagccgcggcagaagcgcaccgccacgaaggccuacaacgucacccaggccuucgggcgccggggccccgagcagacccaggggaacuucggcgaccaggagcugauccgccaggggaccgacuacaagcacuggccccagaucgcccaguucgcgcccuccgccagcgccuucuucggcaugucccggaucggcauggaggugacgccgagcgggaccuggcugaccuacaccggcgccaucaagcucgacgacaaggaccccaacuucaaggaccaggugauccugcugaacaagcacaucgacgccuacaagacguucccgcccaccgagcccaagaaggacaagaagaagaaggcggacgagacccaggcccucccccagcgccagaagaagcagcagaccgucacgcugcugcccgccgccgaccucgacgacuucuccaagcagcugcagcagagcauguccagcgcggacuccacccaggccugaggacuaguuauaagacugacuagcccgaugggccucccaacgggcccuccuccccuccuugcaccgagauuaauaaaaaaaaaaaaaaaaaaaaaaaaaaaaaaaaaaaaaaaaaaaaaaaaaaaaaaaaaaaaaaaaugcaucccccccccccccccccccccccccccccccaaaggcucuuuucagagccaccagaauu

SEQ ID NO: 21082 - RNA, 1477 nt, Artificial Sequence
  SARS-CoV-2__MT820465.1__nucleocapsid protein (N) mRNA gc
aggagaaagcuuaccaugagcgacaacggcccccagaaccagcgcaacgccccgcggaucaccuucgggggccccuccgacagcaccggguccaaccagaacggcgagcgcagcggggcccgguccaagcagcgccggccccagggccugcccaacaacacggcgagcugguucaccgcccucacccagcacggcaaggaggaccugaaguucccgcgcgggcagggcgugcccaucaacaccaacuccagccccgacgaccagaucggguacuaccggcgcgccacgcggcgcauccggggcggggacggcaagaugaaggaccugagcccccgcugguacuucuacuaccucggcaccgggccggaggccggccugcccuacggggccaacaaggacggcaucaucugggucgcgaccgagggcgcccugaacacccccaaggaccacaucgggacgcggaaccccgccaacaacgccgcgaucgugcuccagcugccgcagggcaccacccugcccaagggguucuacgccgagggcucccgcgggggcucccaggccagcucccggagcuccagccgcucccggaacagcucccgcaacagcacccccggcagcuccaagcggacgagccccgcccgcauggccgggaacggcggggacgcggcccucgcccugcugcuccuggaccggcugaaccagcucgaguccaagaugagcggcaaggggcagcagcagcagggccagaccgugaccaagaaguccgccgccgaggcgagcaagaagccgcgccagaagcgcaccgccacgaaggccuacaacgucacccaggccuucggccggcgcgggcccgagcagacccagggcaacuucggggaccaggagcugauccggcagggcaccgacuacaagcacuggccccagaucgcccaguucgcgcccuccgccagcgccuucuucgggaugucccgcaucggcauggaggugacgccgagcggcaccuggcugaccuacaccggggccaucaagcucgacgacaaggaccccaacuucaaggaccaggugauccugcugaacaagcacaucgacgccuacaagacguucccgcccaccgagcccaagauggacaagaagaagaaggcggacgagacccaggcccucccccagcggcagaagaagcagcagaccgucacgcugcugcccgccgccgaccucgacgacuucuccaagcagcugcagcagagcauguccagcgcggacuccacccaggccugaggacuaguuauaagacugacuagcccgaugggccucccaacgggcccuccuccccuccuugcaccgagauuaauaaaaaaaaaaaaaaaaaaaaaaaaaaaaaaaaaaaaaaaaaaaaaaaaaaaaaaaaaaaaaaaaugcaucccccccccccccccccccccccccccccccaaaggcucuuuucagagccaccagaauu

SEQ ID NO: 21083 - RNA, 1477 nt, Artificial Sequence
  SARS-CoV-2__MT810677.1__nucleocapsid protein (N) mRNA gc
aggagaaagcuuaccaugagcgacaacggccccaagaaccagcgcaacgccccgcggaucaccuucgggggccccuccgacagcaccggguccaaccagaacggcgagcgcagcggggcccgguccaagcagcgccggccccagggccugcccaacaacacggcgagcugguucaccgcccucacccagcacggcaaggaggaccugaaguucccgcgcgggcagggcgugcccaucaacaccaacuccagccccgacgaccagaucggguacuaccggcgcgccacgcggcgcauccggggcggggacggcaagaugaaggaccugagcccccgcugguacuucuacuaccucggcaccgggccggaggccggccugcccuacggggccaacaaggacggcaucaucugggucgcgaccgagggcgcccugaacacccccaaggaccacaucgggacgcggaaccccgccaacaacgccgcgaucgugcuccagcugccgcagggcaccacccugcccaagggguucuacgccgagggcagccgcgggggcucccaggccagcucccggagcuccagccgcucccggaacagccuccgcaacuccacccccggcagcagccgggggacgucccccgcccgcauggccggcaacgggggcgacgcggcccuggcccugcuccugcuggaccggcucaaccagcuggagagcaagauguccgggaagggccagcagcagcagggccagaccgugaccaagaaguccgccgccgaggcguccaagaagccgcgccagaagcgcaccgccacgaaggccuacaacgucacccaggccuucgggcggcgcggccccgagcagacccaggggaacuucggcgaccaggagcugauccggcaggggaccgacuacaagcacuggccccagaucgcccaguucgcgcccagcgccuccgccuucuucggcaugagccgcaucggcauggaggugacgccguccgggaccuggcucaccuacaccggcgccaucaagcuggacgacaaggaccccaacuucaaggaccaggugauccugcucaacaagcacaucgacgccuacaagacguucccgcccaccgagcccaagaaggacaagaagaagaaggcggacgagacccaggcccugccccagcggcagaagaagcagcagaccgucacgcugcuccccgccgccgaccuggacgacuucagcaagcagcugcagcaguccaugagcuccgcggacagcacccaggccugaggacuaguuauaagacugacuagcccgaugggccucccaacgggcccuccuccccuccuugcaccgagauuaauaaaaaaaaaaaaaaaaaaaaaaaaaaaaaaaaaaaaaaaaaaaaaaaaaaaaaaaaaaaaaaaaugcaucccccccccccccccccccccccccccccccaaaggcucuuuucagagccaccagaauu

SEQ ID NO: 21084 - RNA, 1477 nt, Artificial Sequence
  SARS-CoV-2__MT810703.1__nucleocapsid protein (N) mRNA gc
aggagaaagcuuaccaugagcgacaacggcccccagaaccagcgcaacgccccgcggaucaccuucgggggccccuccgacagcaccggguccaaccagaacggcgagcgcagcggggcccgguccaagcagcgccggccccagggccugcccaacaacacggcgagcugguucaccgcccucacccagcacggcaaggaggaccugaaguucccgcgcgggcagggcgugcccaucaacaccaacuccagccccgacgaccagaucggguacuaccggcgcgccacgcggcgcauccggggcggggacggcaagaugaaggaccugagcccccgcugguacuucuacuaccucggcaccgggccggaggccggccugcccuacggggccaacaaggacggcaucaucugggucgcgaccgagggcgcccugaacacccccaaggaccacaucgggacgcggaaccccgccaacaacgccgcgaucgugcuccagcugccgcagggcaccacccugcccaagggguucuacgccgagggcagccgcgggggcucccaggccagcucccggagcuccagccgcucccggaacagccuccgcaacuccacccccggcagcagccgggggacgucccccgcccgcauggccggcaacgggggcgacgcggcccuggcccugcuccugcuggaccggcucaaccagcuggagagcaagauguccgggaagggccagcagcagcagggccagaccgugaccaagaaguccgccgccgaggcguccaagaagccgcgccagaagcgcaccgccacgaaggccuacaacgucacccaggccuucgggcggcgcggccccgagcagacccaggggaacuucggcgaccaggagcugauccggaaggggaccgacuacaagcacuggccccagaucgcccaguucgcgcccagcgccuccgccuucuucggcaugagccgcaucggcauggaggugacgccguccgggaccuggcucaccuacaccggcgccaucaagcuggacgacaaggaccccaacuucaaggaccaggugauccugcucaacaagcacaucgacgccuacaagacguucccgcccaccgagcccaagaaggacaagaagaagaaggcggacgagacccaggcccugccccagcggcagaagaagcagcagaccgucacgcugcuccccgccgccgaccuggacgacuucagcaagcagcugcagcaguccaugagcuccgcggacagcacccaggccugaggacuaguuauaagacugacuagcccgaugggccucccaacgggcccuccuccccuccuugcaccgagauuaauaaaaaaaaaaaaaaaaaaaaaaaaaaaaaaaaaaaaaaaaaaaaaaaaaaaaaaaaaaaaaaaaugcaucccccccccccccccccccccccccccccccaaaggcucuuuucagagccaccagaauu

SEQ ID NO: 21085 - RNA, 1477 nt, Artificial Sequence
  SARS-CoV-2__MT810718.1__nucleocapsid protein (N) mRNA gc
aggagaaagcuuaccaugagcgacaacggcccccagaaccagcgcaacgccccgcggaucaccuucgggggccccuccgacagcaccggguccaaccagaacggcgagcgcagcggggcccgguccaagcagcgccggccccagggccugcccaacaacacggcgagcugguucaccgcccucacccagcacggcaaggaggaccugaaguucccgcgcgggcagggcgugcccaucaacaccaacuccagccccgacgaccagaucggguacuaccggcgcgccacgcggcgcauccggggcggggacggcaagaugaaggaccugagcccccgcugguacuucuacuaccucggcaccgggccggaggccggccugcccuacggggccaacaaggacggcaucaucugggucgcgaccgagggcgcccugaacacccccaaggaccacaucgggacgcggaaccccgccaacaacgccgcgaucgugcuccagcugccgcagggcaccacccugcccaagggguucuacgccgagggcagccgcgggggcucccaggccagcucccggagcuccagccgcucccggaacagccuccgcaacuccacccccggcagcagccgggggacgucccccgcccgcauggccggcaacgggggcgacgcggcccuggcccugcuccugcuggaccggcucaaccagcuggagagcaagauguccgggaagggccagcagcagcagggccagaccgugaccaagaaguccgccgccgaggcguccaagaagccgcgccagaagcgcaccgccacgaaggccuacaacgucacccaggccuucgggcggcgcggccccgagcagacccaggggaacuucggcgaccacgagcugauccggcaggggaccgacuacaagcacuggccccagaucgcccaguucgcgcccagcgccuccgccuucuucggcaugagccgcaucggcauggaggugacgccguccgggaccuggcucaccuacaccggcgccaucaagcuggacgacaaggaccccaacuucaaggaccaggugauccugcucaacaagcacaucgacgccuacaagacguucccgcccaccgagcccaagaaggacaagaagaagaaggcggacgagacccaggcccugccccagcggcagaagaagcagcagaccgucacgcugcuccccgccgccgaccuggacgacuucagcaagcagcugcagcaguccaugagcuccgcggacagcacccaggccugaggacuaguuauaagacugacuagcccgaugggccucccaacgggcccuccuccccuccuugcaccgagauuaauaaaaaaaaaaaaaaaaaaaaaaaaaaaaaaaaaaaaaaaaaaaaaaaaaaaaaaaaaaaaaaaaugcaucccccccccccccccccccccccccccccccaaaggcucuuuucagagccaccagaauu

SEQ ID NO: 21086 - RNA, 1477 nt, Artificial Sequence
  SARS-CoV-2__MT810839.1__nucleocapsid protein (N) mRNA gc
aggagaaagcuuaccaugagcgacaacggcccccagaaccagcgcaacgccccgcggaucaccuucgggggccccuccgacagcaccggguccaaccagaacggcgagcgcagcggggcccgguccaagcagcgccggccccagggccugcccaacaacacggcgagcugguucaccgcccucacccagcacggcaaggaggaccugaaguucccgcgcgggcagggcgugcccaucaacaccaacuccagccccgacgaccagaucggguacuaccggcgcgccacgcggcgcauccggggcggggacggcaagaugaaggaccugagcccccgcugguacuucuacuaccucggcaccgggccggaggccggccugcccuacggggccaacaaggacggcaucaucugggucgcgaccgagggcgcccugaacacccccaaggaccacaucgggacgcggaaccccgccaacaacgccgcgaucgugcuccagcugccgcagggcaccacccugcccaagggguucuacgccgagggcagccgcgggggcucccaggccagcucccggagcuccagccgcucccggaacagccuccgcaacuccacccccggcagcagccgggggacgucccccgcccgcauggccggcaacgggggcgacgcggcccuggcccugcuccugcuggaccggcucaaccagcuggagagcaagauguccgggaagggccagcagcagcagggccagaccgugaccaagaaguccgccgccgaggcguccaagaagccgcgccagaagcgcaccgccacgaaggccuacaacgucacccaggccuucgggcggcgcggccccgagcagauccaggggaacuucggcgaccaggagcugauccggcaggggaccgacuacaagcacuggccccagaucgcccaguucgcgcccagcgccuccgccuucuucggcaugagccgcaucggcauggaggugaccccguccgggacguggcucaccuacaccggcgccaucaagcuggacgacaaggaccccaacuucaaggaccaggugauccugcucaacaagcacaucgacgccuacaagaccuucccgcccacggagcccaagaaggacaagaagaagaaggcggacgagacccaggcccugccccagcggcagaagaagcagcagaccgucacccugcuccccgccgccgaccuggacgacuucagcaagcagcugcagcaguccaugagcuccgcggacagcacgcaggccugaggacuaguuauaagacugacuagcccgaugggccucccaacgggcccuccuccccuccuugcaccgagauuaauaaaaaaaaaaaaaaaaaaaaaaaaaaaaaaaaaaaaaaaaaaaaaaaaaaaaaaaaaaaaaaaaugcaucccccccccccccccccccccccccccccccaaaggcucuuuucagagccaccagaauu

SEQ ID NO: 21087 - RNA, 1477 nt, Artificial Sequence
  SARS-CoV-2__MT810848.1__nucleocapsid protein (N) mRNA gc
aggagaaagcuuaccaugagcgacaacggcccccagaaccaccgcaacgccccgcggaucaccuucgggggccccuccgacagcaccggguccaaccagaacggcgagcgcagcggggcccgguccaagcagcgccggccccagggccugcccaacaacacggcgagcugguucaccgcccucacccagcacggcaaggaggaccugaaguucccgcgcgggcagggcgugcccaucaacaccaacuccagccccgacgaccagaucggguacuaccggcgcgccacgcggcgcauccggggcggggacggcaagaugaaggaccugagcccccgcugguacuucuacuaccucggcaccgggccggaggccggccugcccuacggggccaacaaggacggcaucaucugggucgcgaccgagggcgcccugaacacccccaaggaccacaucgggacgcggaaccccgccaacaacgccgcgaucgugcuccagcugccgcagggcaccacccugcccaagggguucuacgccgagggcagccgcgggggcucccaggccagcucccggagcuccagccgcucccggaacagccuccgcaacuccacccccggcagcagccgggggacgucccccgcccgcauggccggcaacgggggcgacgcggcccuggcccugcuccugcuggaccggcucaaccagcuggagagcaagauguccgggaagggccagcagcagcagggccagaccgugaccaagaaguccgccgccgaggcguccaagaagccgcgccagaagcgcaccgccacgaaggccuacaacgucacccaggccuucgggcggcgcggccccgagcagacccaggggaacuucggcgaccaggagcugauccggcaggggaccgacuacaagcacuggccccagaucgcccaguucgcgcccagcgccuccgccuucuucggcaugagccgcaucggcauggaggugacgccguccgggaccuggcucaccuacaccggcgccaucaagcuggacgacaaggaccccaacuucaaggaccaggugauccugcucaacaagcacaucgacgccuacaagacguucccgcccaccgagcccaagaaggacaagaagaagaaggcggacgagacccaggcccugccccagcggcagaagaagcagcagaccgucacgcugcuccccgccgccgaccuggacgacuucagcaagcagcugcagcaguccaugagcuccgcggacagcacccaggccugaggacuaguuauaagacugacuagcccgaugggccucccaacgggcccuccuccccuccuugcaccgagauuaauaaaaaaaaaaaaaaaaaaaaaaaaaaaaaaaaaaaaaaaaaaaaaaaaaaaaaaaaaaaaaaaaugcaucccccccccccccccccccccccccccccccaaaggcucuuuucagagccaccagaauu

SEQ ID NO: 21088 - RNA, 1477 nt, Artificial Sequence
  SARS-CoV-2__MT810855.1__nucleocapsid protein (N) mRNA gc
aggagaaagcuuaccaugagcgacaacggcccccagaaccagcgcaacgccccgcggaucaccuucgggggccccuccgacagcaccggguccaaccagaacggcgagcgcagcggggcccgguccaagcagcgccggccccagggccugcccaacaacacggcgagcugguucaccgcccucacccagcacggcaaggaggaccugaaguucccgcgcgggcagggcgugcccaucaacaccaacuccagccccgacgaccagaucggguacuaccggcgcgccacgcggcgcauccggggcggggacggcaagaugaaggaccugagcccccgcugguacuucuacuaccucggcaccgggccggaggccggccugcccuacggggccaacaaggacggcaucaucugggucgcgaccgagggcgcccugaacacccccaaggaccacaucgggacgcggaaccccgccaacaacgccgcgaucgugcuccagcugccgcagggcaccacccugcccaagggguucuacgccgagggcucccgcgggggcucccaggccagcucccggagcuccagccgcucccggaacagcucccgcaacagcacccccggcagcuccauggggacgagccccgcccggauggccggcaacgggggcgacgcggcccucgcccugcugcuccuggaccgccugaaccagcucgaguccaagaugagcgggaagggccagcagcagcagggccagaccgugaccaagaaguccgccgccgaggcgagcaagaagccgcggcagaagcgcaccgccacgaaggccuacaacgucacccaggccuucgggcgccggggccccgagcagacccaggggaacuucggcgaccaggagcugauccgccaggggaccgacuacaagcacuggccccagaucgcccaguucgcgcccuccgccagcgccuucuucggcaugucccggaucggcauggaggugacgccgagcgggaccuggcugaccuacaccggcgccaucaagcucgacgacaaggaccccaacuucaaggaccaggugauccugcugaacaagcacaucgacgccuacaagacguucccgcccaccgagcccaagaaggacaagaagaagaaggcggacgagacccaggcccucccccagcgccagaagaagcagcagaccgucacgcugcugcccgccgccgaccucgacgacuucuccaagcagcugcagcagagcauguccagcgcggacuccacccaggccugaggacuaguuauaagacugacuagcccgaugggccucccaacgggcccuccuccccuccuugcaccgagauuaauaaaaaaaaaaaaaaaaaaaaaaaaaaaaaaaaaaaaaaaaaaaaaaaaaaaaaaaaaaaaaaaaugcaucccccccccccccccccccccccccccccccaaaggcucuuuucagagccaccagaauu

SEQ ID NO: 21089 - RNA, 1477 nt, Artificial Sequence
  SARS-CoV-2__MT810952.1__nucleocapsid protein (N) mRNA gc
aggagaaagcuuaccaugagcgacaacggcccccagaaccagcgcaacgccccgcggaucaccuucgggggccccuccgacagcaccggguccaaccagaacggcgagcgcagcggggcccgguccaagcagcgccggccccagggccugcccaacaacacggcgagcugguucaccgcccucacccagcacggcaaggaggaccugaaguucccgcgcgggcagggcgugcccaucaacaccaacuccagccccgacgaccagaucggguacuaccggcgcgccacgcggcgcauccggggcggggacggcaagaugaaggaccugagcccccgcugguacuucuacuaccucggcaccgggccggaggccggccugcccuacggggccaacaaggacggcaucaucugggucgcgaccgagggcgcccugaacacccccaaggaccacaucgggacgcggaaccccgccaacaacgccgcgaucgugcuccagcugccgcagggcaccacccugcccaagggguucuacgccgagggcucccgcgggggcucccaggccagcucccggagcuccagccgcucccggaacagcucccgcaacagcacccccggcagcucccgggggacgagccccgcccgcauggccggcaacgggggcgacgcggcccucgcccugcugcuccuggaccggcugaaccagcucgaguccaagaugagcgggaagggccagcagcagcagggccagaccgugaccaagaaguccgccgccgaggcgagcaagaagccgcgccagaagcgcaccgccacgaaggccuacaacgucacccaggccuucgggcggcgcggccccgagcagacccaggggaacuucggcgaccaggagcugauccggcaggggaccgacuacaagcacuggccccagaucgcccaguucgcgcccuccgccagcgccuucuucggcaugucccgcaucggcauggaggugacgccgagcgggaccuggcugaccuacaccggcgccaucaagcucgacgacaaggaccccaacuucaaggaccaggugauccugcugaacaagcacaucgacgccuacaagacguucccgcccaccgagcccaagaaggacaagaagaagaaggcggacgagacccaggcccucccccagcggcagaagaagcagcagaccgucacgcugcugcacgccgccgaccucgacgacuucuccaagcagcugcagcagagcauguccagcgcggacuccacccaggccugaggacuaguuauaagacugacuagcccgaugggccucccaacgggcccuccuccccuccuugcaccgagauuaauaaaaaaaaaaaaaaaaaaaaaaaaaaaaaaaaaaaaaaaaaaaaaaaaaaaaaaaaaaaaaaaaugcaucccccccccccccccccccccccccccccccaaaggcucuuuucagagccaccagaauu

SEQ ID NO: 21090 - RNA, 1477 nt, Artificial Sequence
  SARS-CoV-2__MT811022.1__nucleocapsid protein (N) mRNA gc
aggagaaagcuuaccaugagcgacaacggcccccagaaccagcgcaacgccccgcggaucaccuucgggggccccuccgacagcaccggguccaaccagaacggcgagcgcagcggggcccgguccaagcagcgccggccccagggccugcccaacaacacggcgagcugguucaccgcccucacccagcacggcaaggaggaccugaaguucccgcgcgggcagggcgugcccaucaacaccaacuccagccccgacgaccagaucggguacuaccggcgcgccacgcggcgcauccggggcggggacggcaagaugaaggaccugagcccccgcugguacuucuacuaccucggcaccgggccggaggccggccugcccuacggggccaacaaggacggcaucaucugggucgcgaccgagggcgcccugaacacccccaaggaccacaucgggacgcggaaccccgccaacaacgccgcgaucgugcuccagcugccgcagggcaccacccugcccaagggguucuacgccgagggcucccgcgggggcucccaggccagcucccggagcuccagccgcucccggaacagcucccgcaacagcacccccggcagcucccgggggacgagccccgcccgcauggccggcaacgggggcgacgcggcccucgcccugcugcuccuggaccggcugaaccagcucgaguccaagaugagcgggaagggccagcagcagcagggccagaccgugaccaagaaguccgccgccgaggcgagcaagaagccgcgccagaagcgcaccgccacgaaggccuacaacgucacccaggccuucgggcggcgcggccccgagcagacccaggggaacuucggcgaccaggagcugauccggcaggggaccgacuacaagcacuggccccagaucgcccaguucgcgcccuccgccagcgccuucuucggcaugucccgcaucggcauggaggugacgccgagcgggaccuggcugaccuacaccggcgccaucaagcucgacgacaaggaccccaacuucaagcaccaggugauccugcugaacaagcacaucgacgccuacaagacguucccgcccaccgagcccaagaaggacaagaagaagaaggcggacgagacccaggcccucccccagcggcagaagaagcagcagaccgucacgcugcugcccgccgccgaccucgacgacuucuccaagcagcugcagcagagcauguccagcgcggacuccacccaggccugaggacuaguuauaagacugacuagcccgaugggccucccaacgggcccuccuccccuccuugcaccgagauuaauaaaaaaaaaaaaaaaaaaaaaaaaaaaaaaaaaaaaaaaaaaaaaaaaaaaaaaaaaaaaaaaaugcaucccccccccccccccccccccccccccccccaaaggcucuuuucagagccaccagaauu

SEQ ID NO: 21091 - RNA, 1477 nt, Artificial Sequence
  SARS-CoV-2__MT811201.1__nucleocapsid protein (N) mRNA gc
aggagaaagcuuaccaugagcgacaacggcccccagaaccagcgcaacgccccgcggaucaccuucgggggccccuccgacagcaccggguccaaccagaacggcgagcgcagcggggcccgguccaagcagcgccggccccagggccugcccaacaacacggcgagcugguucaccgcccucacccagcacggcaaggaggaccugaaguucccgcgcgggcagggcgugcccaucaacaccaacuccagccccgacgaccagaucggguacuaccggcgcgccacgcggcgcauccggggcggggacggcaagaugaaggaccugagcccccgcugguacuucuacuaccucggcaccgggccggaggccggccugcccuacggggccaacaaggacggcaucaucugggucgcgaccgagggcgcccugaacacccccaaggaccacaucgggacgcggaaccccgccaacaacgccgcgaucgugcuccagcugccgcagggcaccacccugcccaagggguucuacgccgagggcucccgcgggggcucccaggccagcucccggagcuccagccgcucccggaacagcucccgcaacagcacccccggcagcucccgggggacgagccccgcccgcauggccggcaacgggggcgacgcggcccucgcccugcugcuccuggaccggcugaaccagcucgaguccaagaugagcgggaagggccagcagcagcagggccagaccgugaccaagaaguccgccgccgaggcgagcaagaagccgcgccagaagcgcaccgccacgaaggccuacaacgucacccaggccuucgggcggcgcggccccgagcagacccaggggaacuucggcgaccaggagcugauccggcaggggaccgacuacaagcacuggccccagaucgcccaguucgcgcccuccgccagcgccuucuucggcaugucccgcaucggcauggaggugacgccgagcgggaccuggcugaccuacaccggcgccaucaagcucgacgacaaggaccccaacuucaaggaccaggugauccugcugaacaagcacaucgacgccuacaagacguucccgcccaccgagcccaagaaggacaagaagaagaaggcggacgagacccaggcccucccccagcggcagaagaagcagcagaccgucacgcugcugcccgccgccgaccucgacgacuucuccaagcagcugcagcagagcauguccagcgcggacuccacccacgccugaggacuaguuauaagacugacuagcccgaugggccucccaacgggcccuccuccccuccuugcaccgagauuaauaaaaaaaaaaaaaaaaaaaaaaaaaaaaaaaaaaaaaaaaaaaaaaaaaaaaaaaaaaaaaaaaugcaucccccccccccccccccccccccccccccccaaaggcucuuuucagagccaccagaauu

SEQ ID NO: 21092 - RNA, 1477 nt, Artificial Sequence
  SARS-CoV-2__MT811202.1__nucleocapsid protein (N) mRNA gc
aggagaaagcuuaccaugagcgacaacggcccccagaaccagcgcaacgccccgcggaucaccuucgggggccccuccgacagcaccggguccaaccagaacggcgagcgcagcggggcccgguccaagcagcgccggccccagggccugcccaacaacacggcgagcugguucaccgcccucacccagcacggcaaggaggaccugaaguucccgcgcgggcagggcgugcccaucaacaccaacuccagccccgacgaccagaucggguacuaccggcgcgccacgcggcgcauccggggcggggacggcaagaugaaggaccugagcccccgcugguacuucuacuaccucggcaccgggccggaggccggccugcccuacggggccaacaaggacggcaucaucugggucgcgaccgagggcgcccugaacacccccaaggaccacaucgggacgcggaaccccgccaacaacgccgcgaucgugcuccagcugccgcagggcaccacccugcccaagggguucuacgccgagggcucccgcgggggcucccaggccagcucccggagcuccagccgcucccggaacagcucccgcaacagcacccccggcagcucccgggggacgagccccgcccgcauggccggcaacgggggcgacgcggcccucgcccugcugcuccuggaccggcugaaccagcucgaguccaagaugagcgggaagggccagcagcagcagggccagaccgugaccaagaaguccgccgccgaggcgagcaagaagccgcgccagaagcgcaccgccacgaaggccuacaacgucacccaggccuucgggcggcgcggccccgagcagacccaggggaacuucggcgaccaggagcugauccggcaggggaccgacuacaagcacuggccccagaucgcccaguucgcgcccuccgccagcgccuucuucggcaugucccgcaucggcauggaggugacgccgagcgggaccuggcugaccuacaccggcgccaucaagcucgacgacaaguaccccaacuucaaggaccaggugauccugcugaacaagcacaucgacgccuacaagacguucccgcccaccgagcccaagaaggacaagaagaagaaggcggacgagacccaggcccucccccagcggcagaagaagcagcagaccgucacgcugcugcccgccgccgaccucgacgacuucuccaagcagcugcagcagagcauguccagcgcggacuccacccaggccugaggacuaguuauaagacugacuagcccgaugggccucccaacgggcccuccuccccuccuugcaccgagauuaauaaaaaaaaaaaaaaaaaaaaaaaaaaaaaaaaaaaaaaaaaaaaaaaaaaaaaaaaaaaaaaaaugcaucccccccccccccccccccccccccccccccaaaggcucuuuucagagccaccagaauu

SEQ ID NO: 21093 - RNA, 1477 nt, Artificial Sequence
  SARS-CoV-2__MT811229.1__nucleocapsid protein (N) mRNA gc
aggagaaagcuuaccaugagcgacaacggcccccagaaccagcgcaacgccccgcggaucaccuucgggggccccuccgacagcaccggguccaaccagaacggcgagcgcagcggggcccgguccaagcagcgccggccccagggccugcccaacaacacggcgagcugguucaccgcccucacccagcacggcaaggaggaccugaaguucccgcgcgggcagggcgugcccaucaacaccaacuccagccccgacgaccagaucggguacuaccggcgcgccacgcggcgcauccggggcggggacggcaagaugaaggaccugagcccccgcugguacuucuacuaccucggcaccgggccggaggccggccugcccuacggggccaacaaggacggcaucaucugggucgcgaccgagggcgcccugaacacccccaaggaccacaucgggacgcggaaccccgccaacaacgccgcgaucgugcuccagcugccgcagggcaccacccugcccaagggguucuacgccgagggcagccgcgggggcucccaggccagcucccggagcuccagccgcucccggaacagccuccgcaacuccacccccggcagcagccgggggacgucccccgcccgcauggccggcaacgggggcgacgcggcccuggcccugcuccugcuggaccggcucaaccagcuggagagcaagauguccgggaagggccagcagcagcagggccagaccgugaccaagaaguccuccgccgaggccagcaagaagccgcgccagaagcgcaccgcgacgaaggccuacaacgucacccaggccuucgggcggcgcggccccgagcagacccaggggaacuucggcgaccaggagcugauccggcaggggaccgacuacaagcacuggccccagaucgcccaguucgcccccuccgcgagcgccuucuucggcaugucccgcaucggcauggaggugacgccgagcgggaccuggcucaccuacaccggcgccaucaagcuggacgacaaggaccccaacuucaaggaccaggugauccugcucaacaagcacaucgacgccuacaagacguucccgcccaccgagcccaagaaggacaagaagaagaaggccgacgagacccaggcgcugccccagcggcagaagaagcagcagaccgucacgcugcuccccgccgccgaccuggacgacuucuccaagcagcugcagcagagcauguccagcgccgacuccacccaggcgugaggacuaguuauaagacugacuagcccgaugggccucccaacgggcccuccuccccuccuugcaccgagauuaauaaaaaaaaaaaaaaaaaaaaaaaaaaaaaaaaaaaaaaaaaaaaaaaaaaaaaaaaaaaaaaaaugcaucccccccccccccccccccccccccccccccaaaggcucuuuucagagccaccagaauu

SEQ ID NO: 21094 - RNA, 1477 nt, Artificial Sequence
  SARS-CoV-2__MT811240.1__nucleocapsid protein (N) mRNA gc
aggagaaagcuuaccaugagcgacaacggcccccagaaccagcgcaacgccccgcggaucaccuucgggggccccuccgacagcaccggguccaaccagaacggcgagcgcagcggggcccgguccaagcagcgccggccccagggccugcccaacaacacggcgagcugguucaccgcccucacccagcacggcaaggaggaccugaaguucccgcgcgggcagggcgugcccaucaacaccaacuccagccccgacgaccagaucggguacuaccggcgcgccacgcggcgcauccggggcggggacggcaagaugaaggaccugagcccccgcugguacuucuacuaccucggcaccgggccggaggccggccugcccuacggggccaacaaggacggcaucaucugggucgcgaccgagggcgcccugaacacccccaaggaccacaucgggacgcggaaccccgccaacaacgccgcgaucgugcuccagcugccgcagggcaccacccugcccaagggguucuacgccgagggcagccgcgggggcucccaggccagcucccggagcuccagccgcucccggaacagccuccgcaacuccacccccggcagcagccgggggacgucccccgcccgcauggccggcaacgggggcgacgcggcccuggcccugcuccugcuggaccggcucaaccagcuggagagcaagauguccgggaaggugcagcagcagcagggccagaccgucaccaagaaguccgccgccgaggcguccaagaagccgcgccagaagcgcaccgccacgaaggccuacaacgugacccaggccuucggccggcgcgggcccgagcagacccagggcaacuucggggaccaggagcugauccggcagggcaccgacuacaagcacuggccccagaucgcccaguucgcgcccagcgccuccgccuucuucgggaugagccgcaucggcauggaggugacgccguccggcaccuggcucaccuacaccggggccaucaagcuggacgacaaggaccccaacuucaaggaccaggucauccugcucaacaagcacaucgacgccuacaagacguucccgcccaccgagcccaagaaggacaagaagaagaaggcggacgagacccaggcccugccccagcggcagaagaagcagcagaccgugacgcugcuccccgccgccgaccuggacgacuucagcaagcagcugcagcaguccaugagcuccgcggacagcacccaggccugaggacuaguuauaagacugacuagcccgaugggccucccaacgggcccuccuccccuccuugcaccgagauuaauaaaaaaaaaaaaaaaaaaaaaaaaaaaaaaaaaaaaaaaaaaaaaaaaaaaaaaaaaaaaaaaaugcaucccccccccccccccccccccccccccccccaaaggcucuuuucagagccaccagaauu

SEQ ID NO: 21095 - RNA, 1477 nt, Artificial Sequence
  SARS-CoV-2__MT811246.1__nucleocapsid protein (N) mRNA gc
aggagaaagcuuaccaugagcgacaacggcccccagaaccagcgcaacgccccgcggaucaccuucgggggccccuccgacagcaccggguccaaccagaacggcgagcgcagcggggcccgguccaagcagcgccggccccagggccugcccaacaacacggcgagcugguucaccgcccucacccagcacggcaaggaggaccugaaguucccgcgcgggcagggcgugcccaucaacaccaacuccagccccgacgaccagaucggguacuaccggcgcgccacgcggcgcauccggggcggggacggcaagaugaaggaccugagcccccgcugguacuucuacuaccucggcaccgggccggaggccggccugcccuacggggccaacaaggacggcaucaucugggucgcgaccgagggcgcccugaacacccccaaggaccacaucgggacgcggaaccccgccaacaacgccgcgaucgugcuccagcugccgcagggcaccacccugcccaagggguucuacgccgagggcagccgcgggggcucccaggccagcucccggagcuccagccgcucccggaacagccuccgcaacuccacccccggcagcagccgggggaucucccccgcccgcauggccggcaacgggggcgacgcggcccuggcccugcuccugcuggaccggcucaaccagcuggagagcaagauguccgggaagggccagcagcagcagggccagacggugaccaagaaguccgccgccgaggcguccaagaagccgcgccagaagcgcaccgccaccaaggccuacaacgucacgcaggccuucgggcggcgcggccccgagcagacccaggggaacuucggcgaccaggagcugauccggcaggggaccgacuacaagcacuggccccagaucgcccaguucgcgcccagcgccuccgccuucuucggcaugagccgcaucggcauggaggugaccccguccgggacguggcucaccuacaccggcgccaucaagcuggacgacaaggaccccaacuucaaggaccaggugauccugcucaacaagcacaucgacgccuacaagaccuucccgcccacggagcccaagaaggacaagaagaagaaggcggacgagacccaggcccugccccagcggcagaagaagcagcagaccgucacccugcuccccgccgccgaccuggacgacuucagcaagcagcugcagcaguccaugagcuccgcggacagcacgcaggccugaggacuaguuauaagacugacuagcccgaugggccucccaacgggcccuccuccccuccuugcaccgagauuaauaaaaaaaaaaaaaaaaaaaaaaaaaaaaaaaaaaaaaaaaaaaaaaaaaaaaaaaaaaaaaaaaugcaucccccccccccccccccccccccccccccccaaaggcucuuuucagagccaccagaauu

SEQ ID NO: 21096 - RNA, 1477 nt, Artificial Sequence
  SARS-CoV-2__MT811251.1__nucleocapsid protein (N) mRNA gc
aggagaaagcuuaccaugagcgacaacggcccccagaaccagcgcaacgccccggggaucaccuucggcgggcccuccgacagcaccggcuccaaccagaacggggagcggagcggcgcccgcuccaagcagcggcgcccccagggccugcccaacaacacggcgagcugguucaccgcccucacccagcacgggaaggaggaccugaaguucccgcggggccagggggugcccaucaacaccaacuccagccccgacgaccagaucggcuacuaccgccgggccacgcgccggauccgcgggggcgacggcaagaugaaggaccugagcccccggugguacuucuacuaccucgggaccggcccggaggccgggcugcccuacggcgccaacaaggacggcaucaucugggucgcgaccgagggggcccugaacacccccaaggaccacaucggcacgcgcaaccccgccaacaacgccgcgaucgugcuccagcugccgcaggggaccacccugcccaagggcuucuacgccgaggggagccggggcggcucccaggccagcucccgcagcuccagccggucccgcaacagccuccggaacuccacccccgggagcagccgcggcacgucccccgcccggauggccgggaacggcggggacgcggcccuggcccugcuccugcuggaccgccucaaccagcuggagagcaagauguccggcaagggccagcagcagcaggggcagaccgugaccaagaaguccgccgccgaggcguccaagaagccgcggcagaagcgcaccgccacgaaggccuacaacgucacccaggccuucggccgccgggggcccgagcagacccagggcaacuucggggaccaggagcugauccgccagggcaccgacuacaagcacuggccccagaucgcccaguucgcgcccagcgccuccgccuucuucggcaugagccggaucgggauggaggugacgccguccggcaccuggcucaccuacaccggggccaucaagcuggacgacaaggaccccaacuucaaggaccaggugauccugcucaacaagcacaucgacgccuacaagacguucccgcccaccgagcccaagaaggacaagaagaagaaggcggacgagacccaggcccugccccagcgccagaagaagcagcagaccgucacgcugcuccccgccgccgaccuggacgacuucagcaagcagcugcagcaguccaugagcuccgcggacagcacccaggccugaggacuaguuauaagacugacuagcccgaugggccucccaacgggcccuccuccccuccuugcaccgagauuaauaaaaaaaaaaaaaaaaaaaaaaaaaaaaaaaaaaaaaaaaaaaaaaaaaaaaaaaaaaaaaaaaugcaucccccccccccccccccccccccccccccccaaaggcucuuuucagagccaccagaauu

SEQ ID NO: 21097 - RNA, 1477 nt, Artificial Sequence
  SARS-CoV-2__MT811325.1__nucleocapsid protein (N) mRNA gc
aggagaaagcuuaccaugagcgacaacggcccccagaaccagcgcaacgccccgcggaucaccuucgggggccccuccgacagcaccggguccaaccagaacggcgagcgcagcggggcccgguccaagcagcgccggccccagggccugcccaacaacacggcgagcugguucaccgcccucacccagcacggcaaggaggaccugaaguucccgcgcgggcagggcgugcccaucaacaccaacuccagccccgacgaccagaucggguacuaccggcgcgccacgcggcgcauccggggcggggacggcaagaugaaggaccugagcccccgcugguacuucuacuaccucggcaccgggccggaggccggccugcccuacggggccaacaaggacggcaucaucugggucgcgaccgagggcgcccugaacacccccaaggaccacaucgggacgcggaaccccgccaacaacgccgcgaucgugcuccagcugccgcagggcaccacccugagcaagggguucuacgccgagggcucccgcgggggcagccaggccuccagccgguccagcucccgcagccggaacuccagccgcaacagcacccccggcuccagccgggggacgucccccgcccgcauggccggcaacgggggcgacgcggcccucgcccugcugcuccuggaccggcugaaccagcucgagagcaagauguccgggaagggccagcagcagcagggccagaccgugaccaagaaguccgccgccgaggcguccaagaagccccgccagaagcgcaccgccacgaaggccuacaacgucacccaggccuucgggcggcgcggcccggagcagacccaggggaacuucggcgaccaggagcugauccggcaggggaccgacuacaagcacuggccccagaucgcccaguucgcgcccagcgccuccgccuucuucggcaugagccgcaucggcauggaggugacgcccuccgggaccuggcugaccuacaccggcgccaucaagcucgacgacaaggacccgaacuucaaggaccaggugauccugcugaacaagcacaucgacgccuacaagacguucccgcccaccgagcccaagaaggacaagaagaagaaggcggacgagacccaggcccucccccagcggcagaagaagcagcagaccgucacgcugcugcccgccgccgaccucgacgacuucagcaagcagcugcagcaguccaugagcuccgcggacagcacccaggccugaggacuaguuauaagacugacuagcccgaugggccucccaacgggcccuccuccccuccuugcaccgagauuaauaaaaaaaaaaaaaaaaaaaaaaaaaaaaaaaaaaaaaaaaaaaaaaaaaaaaaaaaaaaaaaaaugcaucccccccccccccccccccccccccccccccaaaggcucuuuucagagccaccagaauu

SEQ ID NO: 21098 - RNA, 1477 nt, Artificial Sequence
  SARS-CoV-2__MT811330.1__nucleocapsid protein (N) mRNA gc
aggagaaagcuuaccaugagcgacaacggcccccagaaccagcgcaacgccccgcggaucaccuucgggggccccuccgacagcaccggguccaaccagaacggcgagcgcagcggggcccgguccaagcagcgccggccccagggccugcccaacaacacggcgagcugguucaccgcccucacccagcacggcaaggaggaccugaaguucccgcgcgggcagggcgugcccaucaacaccaacuccagccccgacgaccagaucggguacuaccggcgcgccacgcggcgcauccggggcggggacggcaagaugaaggaccugagcccccgcugguacuucuacuaccucggcaccgggccggaggccggccugcccuacggggccaacaaggacggcaucaucugggucgcgaccgagggcgcccugaacacccccaaggaccacaucgggacgcggaaccccgccaacaacgccgcgaucgugcuccagcugccgcagggcaccacccugcccaagggguucuacgccgagggcucccgcgggggcucccaggccagcucccggagcuccagccgcucccggaacagcucccgcaacagcacccccggcagcucccgggggacgagccccgcccgcauggccggcaacgggggcgacgcggcccucgcccugcugcuccuggaccggcugaaccagcucgaguccaagaugagcgggaagggccagcagcagcagggccagaccgugaccaagaaguccgccgccgaggcgagcaagaagccgcgccagaagcgcaccgccacgaaggccuacaacgucacccaggccuucgggcggcgcggccccgugcagacccaggggaacuucggcgaccaggagcugauccggcaggggaccgacuacaagcacuggccccagaucgcccaguucgcgcccuccgccagcgccuucuucggcaugucccgcaucggcauggaggugacgccgagcgggaccuggcugaccuacaccggcgccaucaagcucgacgacaaggaccccaacuucaaggaccaggucauccugcugaacaagcacaucgacgccuacaagacguucccgcccaccgagcccaagaaggacaagaagaagaaggcggacgagacccaggcccucccccagcggcagaagaagcagcagaccgugacgcugcugcccgccgccgaccucgacgacuucuccaagcagcugcagcagagcauguccagcgcggacuccacccaggccugaggacuaguuauaagacugacuagcccgaugggccucccaacgggcccuccuccccuccuugcaccgagauuaauaaaaaaaaaaaaaaaaaaaaaaaaaaaaaaaaaaaaaaaaaaaaaaaaaaaaaaaaaaaaaaaaugcaucccccccccccccccccccccccccccccccaaaggcucuuuucagagccaccagaauu

SEQ ID NO: 21099 - RNA, 1477 nt, Artificial Sequence
  SARS-CoV-2__MT811407.1__nucleocapsid protein (N) mRNA gc
aggagaaagcuuaccaugagcgacaacggcccccagaaccagcgcaacgccccgcggaucaccuucgggggccccuccgacagcaccggguccaaccagaacggcgagcgcagcggggcccgguccaagcagcgccggccccagggccugcccaacaacacggcgagcugguucaccgcccucacccagcacggcaaggaggaccugaaguucccgcgcgggcagggcgugcccaucaacaccaacuccagccccgacgaccagaucggguacuaccggcgcgccacgcggcgcauccggggcggggacggcaagaugaaggaccugagcccccgcugguacuucuacuaccucggcaccgggccggaggccggccugcccuacggggccaacaaggacggcaucaucugggucgcgaccgagggcgcccugaacacccccaaggaccacaucgggacgcggaaccccgccaacaacgccgcgaucgugcuccagcugccgcagggcaccacccugcccaagggguucuacaccgagggcagccgcgggggcucccaggccagcucccggagcuccagccgcucccggaacagccuccgcaacuccacgcccggcagcagccgggggaccucccccgcccgcauggccggcaacgggggcgacgccgcgcuggcccugcuccugcuggaccggcucaaccagcuggagagcaagauguccgggaagggccagcagcagcagggccagaccgugaccaagaaguccgccgccgaggccuccaagaagccgcgccagaagcgcacggcgaccaaggccuacaacgucacccaggccuucgggcggcgcggccccgagcagacccaggggaacuucggcgaccaggagcugauccggcaggggacggacuacaagcacuggccccagaucgcccaguucgcccccagcgcguccgccuucuucggcaugagccgcaucggcauggaggugaccccguccgggaccuggcucaccuacacgggcgccaucaagcuggacgacaaggaccccaacuucaaggaccaggugauccugcucaacaagcacaucgacgccuacaagaccuucccgcccaccgagcccaagaaggacaagaagaagaaggccgacgagacccaggcgcugccccagcggcagaagaagcagcagacggucacccugcuccccgccgccgaccuggacgacuucagcaagcagcugcagcaguccaugagcuccgccgacagcacccaggcgugaggacuaguuauaagacugacuagcccgaugggccucccaacgggcccuccuccccuccuugcaccgagauuaauaaaaaaaaaaaaaaaaaaaaaaaaaaaaaaaaaaaaaaaaaaaaaaaaaaaaaaaaaaaaaaaaugcaucccccccccccccccccccccccccccccccaaaggcucuuuucagagccaccagaauu

SEQ ID NO: 21100 - RNA, 1477 nt, Artificial Sequence
  SARS-CoV-2__MT811416.1__nucleocapsid protein (N) mRNA gc
aggagaaagcuuaccaugagcgacaacggcccccagaaccagcgcaacgccccgcggaucaccuucgggggccccuccgacagcaccggguccaaccagaacggcgagcgcagcggggcccgguccaagcagcgccggccccagggccugcccaacaacacggcgagcugguucaccgcccucacccagcacggcaaggaggaccugaaguucccgcgcgggcagggcgugcccaucaacaccaacuccagccccgacgaccagaucggguacuaccggcgcgccacgcggcgcauccggggcggggacggcaagaugaaggaccugagcccccgcugguacuucuacuaccucggcaccgggccggaggccggccugcccuacggggccaacaaggacggcaucaucugggucgcgaccgagggcgcccugaacacccccaaggaccacaucgggacgcggaaccccgccaacaacgccgcgaucgugcuccagcugccgcagggcaccacccugcccaagggguucuacgccgagggcagccgcgggggcucccaggccagcucccggagcuccagccgcucccggaacagccuccgcaacuccacccccggcagcagccgggggacgucccccgcccgcauggccggcaacgggggcgacgcggcccuggcccugcuccugcuggaccggcucaaccagcuggagagcaagauguccgggaagggccagcagcagcagggccagaccgugaccaagaaguccgccgccgaggcguccaagaagccgcgccagaagcgcaccgccacgaaggccuacaacgucacccaggccuucgggcggcgcggccccgagcagacccaggggaacuucggcgaccaggagcugauccggcaggggaccgacuacaagcacuggccccagaucgcccaguucgcgcccagcgccuccgccuucuucggcaugagccgcaucggcauggaggugacgccguccgggaccuggcucaccuacaccggcgccaucaagcuggacgacaaguaccccaacuucaaggaccaggugauccugcucaacaagcacaucgacgccuacaagacguucccgcccaccgagcccaagaaggacaagaagaagaaggcggacgagacccaggcccugccccagcggcagaagaagcagcagaccgucacgcugcuccccgccgccgaccuggacgacuucagcaagcagcugcagcaguccaugagcuccgcggacagcacccaggccugaggacuaguuauaagacugacuagcccgaugggccucccaacgggcccuccuccccuccuugcaccgagauuaauaaaaaaaaaaaaaaaaaaaaaaaaaaaaaaaaaaaaaaaaaaaaaaaaaaaaaaaaaaaaaaaaugcaucccccccccccccccccccccccccccccccaaaggcucuuuucagagccaccagaauu

SEQ ID NO: 21101 - RNA, 1477 nt, Artificial Sequence
  SARS-CoV-2__MT811458.1__nucleocapsid protein (N) mRNA gc
aggagaaagcuuaccaugagcgacaacggcccccagaaccagcgcaacgccccgcggaucaccuucgggggccccuccgacagcaccggguccaaccagaacggcgagcgcagcggggcccgguccaagcagcgccggccccagggccugcccaacaacacggcgagcugguucaccgcccucacccagcacggcaaggaggaccugaaguucccgcgcgggcagggcgugcccaucaacaccaacuccagccccgacgaccagaucggguacuaccggcgcgccacgcggcgcauccggggcggggacggcaagaugaaggaccugagcccccgcugguacuucuacuaccucggcaccgggccggaggccggccugcccuacggggccaacaaggacggcaucaucugggucgcgaccgagggcgcccugaacacccccaaggaccacaucgggacgcggaaccccgccaacaacgccgcgaucgugcuccagcugccgcagggcaccacccugcccaagggguucuacgccgagggcagccgcgggggcucccaggccagcucccggagcuccagccgcucccggaacagccuccgcaacuccacccccggcagcagccgggggacgucccccgcccgcauggccggcaacgggggcgacgcggcccuggcccugcuccugcuggaccggcucaaccagcuggagagcaagauguccgggaagggccagcagcagcagggccagaccgugaccaagaaguccgccgccgaggcguccaagaagccgcgccagaagcgcaccgccacgaaggccuacaacgucacccaggccuucgggcggcgcggccccgagcagacccaggggaacuucggcgaccaggagcugauccggcaggggaccgacuacaagcacuggccccagaucgcccaguucgcgcccagcgccuccgccuucuucggcaugagccgcaucggcauggaggugacgccguccgggaccuggcucaccuacaccggcgccaucaagcuggacgacaaggaccccaacuucaaggaccaggugauccugcucaacaagcacaucgacgccuacaagacguucccgcccaccgagcccaagaaggacaagaagaagaaggcggacgagacccaggcccugccccagcggcagaagcgccagcagaccgucacgcugcuccccgccgccgaccuggacgacuucagcaagcagcugcagcaguccaugagcuccgcggacagcacccaggccugaggacuaguuauaagacugacuagcccgaugggccucccaacgggcccuccuccccuccuugcaccgagauuaauaaaaaaaaaaaaaaaaaaaaaaaaaaaaaaaaaaaaaaaaaaaaaaaaaaaaaaaaaaaaaaaaugcaucccccccccccccccccccccccccccccccaaaggcucuuuucagagccaccagaauu

SEQ ID NO: 21102 - RNA, 1477 nt, Artificial Sequence
  SARS-CoV-2__MT811483.1__nucleocapsid protein (N) mRNA gc
aggagaaagcuuaccaugagcgacaacggcccccagaaccagcgcaacgccccgcggaucaccuucgggggccccuccgacagcaccggguccaaccagaacggcgagcgcagcggggcccgguccaagcagcgccggccccagggccugcccaacaacacggcgagcugguucaccgcccucacccagcacggcaaggaggaccugaaguucccgcgcgggcagggcgugcccaucaacaccaacuccagccccgacgaccagaucggguacuaccggcgcgccacgcggcgcauccggggcggggacggcaagaugaaggaccugagcccccgcugguacuucuacuaccucggcaccgggccggaggccggccugcccuacggggccaacaaggacggcaucaucugggucgcgaccgagggcgcccugaacacccccaaggaccacaucgggacgcggaaccccgccaacaacgccgcgaucgugcuccagcugccgcagggcaccacccugcccaagggguucuacgccgagggcagccgcgggggcucccaggccagcucccggagcuccagccgcucccggaacagccuccgcaacuccacccccggcagcagccgggggacgucccccgcccgcauggccggcaacgggggcgacgcggcccuggcccugcuccugcuggaccggcucaaccagcuggagagcaagauguccgggaagggccagcagcagcagggccagaccgugaccaagaaguccgccgccgaggcguccaagaagccgcgccagaagcgcaccgccacgaaggccuacaacgucacccaggccuucgggcggcgcggccccgagcagacccaggggaacuucggcgaccaggagcugauccggcaggggaccgacuacaagcacuggccccagaucgcccaguucgcgcccagcgccuccgccuucuucggcaugagccgcaucggcauggaggugacgccguccgggaccuggcucaccuacaccggcgccaucaagcuggacgacaaggaccccaacuucaaggaccaggugauccugcucaacaagcacaucgacgccuacaagacguucccgcccaccgagcccaagaaggacaagaagaagaaggcggacgagacccaggcccugccccagcggcagaagaagcagcagaccgucacgcugcuccccgccgccaaccuggacgacuucagcaagcagcugcagcaguccaugagcuccgcggacagcacccaggccugaggacuaguuauaagacugacuagcccgaugggccucccaacgggcccuccuccccuccuugcaccgagauuaauaaaaaaaaaaaaaaaaaaaaaaaaaaaaaaaaaaaaaaaaaaaaaaaaaaaaaaaaaaaaaaaaugcaucccccccccccccccccccccccccccccccaaaggcucuuuucagagccaccagaauu

SEQ ID NO: 21103 - RNA, 1477 nt, Artificial Sequence
  SARS-CoV-2__MT811485.1__nucleocapsid protein (N) mRNA gc
aggagaaagcuuaccaugagcgacaacggcccccagaaccagcgcaacgccccgcggaucaccuucgggggccccuccgacagcaccggguccaaccagaacggcgagcgcagcggggcccgguccaagcagcgccggccccagggccugcccaacaacacggcgagcugguucaccgcccucacccagcacggcaaggaggaccugaaguucucccgcgggcagggcgugccgaucaacaccaacagcucccccgacgaccagaucggguacuaccggcgcgccacgcggcgcauccggggcggggacggcaagaugaaggaccugagcccccgcugguacuucuacuaccucggcaccgggcccgaggccggccugccguacggggccaacaaggacggcaucaucugggucgcgaccgagggcgcccugaacacccccaaggaccacaucgggacgcggaaccccgccaacaacgccgcgaucgugcuccagcugccccagggcaccacccugccgaagggguucuacgccgagggcucccgcgggggcagccaggccuccagccgguccagcucccgcagccggaacuccagccgcaacagcacccucggcuccagccgggggacgucccccgcccgcauggccggcaacgggggcgacgcggcccuggcccugcuccugcuggaccggcucaaccagcuggagagcaagauguccgggaagggccagcagcagcagggccagaccgugaccaagaaguccgccgccgaggcgagcaagaagccccgccagaagcgcaccgccacgaaggccuacaacgucacccaggccuucgggcggcgcggccccgagcagacccaggggaacuucggcgaccaggagcugauccggcaggggaccgacuacaagcacuggccgcagaucgcccaguucgcgcccagcgccuccgccuucuucggcaugagccgcaucggcauggaggugacgcccuccgggaccuggcucaccuacaccggcgccaucaagcuggacgacaaggaccccaacuucaaggaccaggugauccugcucaacaagcacaucgacgccuacaagacguucccgcccaccgagcccaagaaggacaagaagaagaaggcggacgagacccaggcccugccccagcggcagaagaagcagcagaccgucacgcugcucccggccgccgaccuggacgacuucagcaagcagcugcagcaguccaugagcuccgcggacagcacccaggccugaggacuaguuauaagacugacuagcccgaugggccucccaacgggcccuccuccccuccuugcaccgagauuaauaaaaaaaaaaaaaaaaaaaaaaaaaaaaaaaaaaaaaaaaaaaaaaaaaaaaaaaaaaaaaaaaugcaucccccccccccccccccccccccccccccccaaaggcucuuuucagagccaccagaauu

SEQ ID NO: 21104 - RNA, 1477 nt, Artificial Sequence
  SARS-CoV-2__MT811488.1__nucleocapsid protein (N) mRNA gc
aggagaaagcuuaccaugagcgacaacggcccccagaaccagcgcaacgccccgcggaucaccuucgggggccccuccgacagcaccggguccaaccagaacggcgagcgcagcggggcccgguccaagcagcgccggccccagggccugcccaacaacacggcgagcugguucaccgcccucacccagcacggcaaggaggaccugaaguucccgcgcgggcagggcgugcccaucaacaccaacuccagccccgacgaccagaucggguacuaccggcgcgccacgcggcgcauccggggcggggacggcaagaugaaggaccugagcccccgcugguacuucuacuaccucggcaccgggccggaggccggccugcccuacggggccaacaaggacggcaucaucugggucgcgaccgagggcgcccugaacacccccaaggaccacaucgggacgcggaaccccgccaacaacgccgcgaucgugcuccagcugccgcagggcaccacccugcccaagggguucuacgccgagggcagccgcgggggcucccaggccagcucccggagcuccagccgcucccggaacagccuccgcaacuccacccccggcagcagccgggggacgucccccgcccgcauggccggcaacgggggcgacgcggcccuggcccugcuccugcuggaccggcucaaccagcuggagagcaagauguccgggaagggccagcagcagcagggccagaccgugaccaagaaguccgccgccgaggcguccaagaagccgcgccagaagcgcaccgccacgaaggccuacaacgucacccaggccuucgggcggcgcggccccgagcagacccaggggaacuucggcgaccaggagcugauccggcaggggaccgacuacaagcacuggccccagaucgcccaguucgcgcccagcgccuccgccuucuucggcaugagccgcaucggcauggaggugacgccguccgggaccuggcucaccuacaccggcgccaucaagcuggacgacaaggaccccaacuucaaggaccaggugauccugcucaacaagcacaucgacgccuacaagacguucccgcccaccgaccccaagaaggacaagaagaagaaggcggacgagacccaggcccugccccagcggcagaagaagcagcagaccgucacgcugcuccccgccgccgaccuggacgacuucagcaagcagcugcagcaguccaugagcuccgcggacagcacccaggccugaggacuaguuauaagacugacuagcccgaugggccucccaacgggcccuccuccccuccuugcaccgagauuaauaaaaaaaaaaaaaaaaaaaaaaaaaaaaaaaaaaaaaaaaaaaaaaaaaaaaaaaaaaaaaaaaugcaucccccccccccccccccccccccccccccccaaaggcucuuuucagagccaccagaauu

SEQ ID NO: 21105 - RNA, 1477 nt, Artificial Sequence
  SARS-CoV-2__MT811490.1__nucleocapsid protein (N) mRNA gc
aggagaaagcuuaccaugagcgacaacggcccccagaaccagcgcaacgccccgcggaucaccuucgggggccccuccgacagcaucggguccaaccagaacggcgagcgcagcggggcccgguccaagcagcgccggccccagggccugcccaacaacaccgcgagcugguucacggcccucacccagcacggcaaggaggaccugaaguucccgcgcgggcagggcgugcccaucaacaccaacuccagccccgacgaccagaucggguacuaccggcgcgccacccggcgcauccggggcggggacggcaagaugaaggaccugagcccccgcugguacuucuacuaccucggcacggggccggaggccggccugcccuacggggccaacaaggacggcaucaucugggucgcgaccgagggcgcccugaacacccccaaggaccacaucgggacccggaaccccgccaacaacgccgcgaucgugcuccagcugccgcagggcacgacccugcccaagggguucuacgccgagggcucccgcgggggcucccaggccagcucccggagcuccagccgcucccggaacagcucccgcaacagcacccccggcagcuccaagcggaccagccccgcccgcauggccgggaacggcggggacgcggcccucgcccugcugcuccuggaccggcugaaccagcucgaguccaagaugagcggcaaggggcagcagcagcagggccagacggugaccaagaaguccgccgccgaggcgagcaagaagccgcgccagaagcgcaccgccaccaaggccuacaacgucacgcaggccuucggccggcgcgggcccgagcagacccagggcaacuucggggaccaggagcugauccggcagggcaccgacuacaagcacuggccccagaucgcccaguucgcgcccuccgccagcgccuucuucgggaugucccgcaucggcauggaggugaccccgagcggcacguggcugaccuacaccggggccaucaagcucgacgacaaggaccccaacuucaaggaccaggugauccugcugaacaagcacaucgacgccuacaagaccuucccgcccacggagcccaagaaggacaagaagaagaaggcggacgagacccaggcccucccccagcggcagaagaagcagcagaccgucacccugcugcccgccgccgaccucgacgacuucuccaagcagcugcagcagagcauguccagcgcggacuccacgcaggccugaggacuaguuauaagacugacuagcccgaugggccucccaacgggcccuccuccccuccuugcaccgagauuaauaaaaaaaaaaaaaaaaaaaaaaaaaaaaaaaaaaaaaaaaaaaaaaaaaaaaaaaaaaaaaaaaugcaucccccccccccccccccccccccccccccccaaaggcucuuuucagagccaccagaauu

SEQ ID NO: 21106 - RNA, 1477 nt, Artificial Sequence
  SARS-CoV-2__MT811492.1__nucleocapsid protein (N) mRNA gc
aggagaaagcuuaccaugagcgacaacggcccccagaaccagcgcaacgccccgcggaucaccuucgggggccccuccgacagcaccggguccaaccagaacggcgagcgcagcggggcccgguccaagcagcgccggccccugggccuccccaacaacacggcgagcugguucaccgcccugacccagcacggcaaggaggaccugaaguucccgcgcgggcagggcgugcccaucaacaccaacuccagccccgacgaccagaucggguacuaccggcgcgccacgcggcgcauccggggcggggacggcaagaugaaggaccucagcccccgcugguacuucuacuaccugggcaccgggccggaggccggccugcccuacggggccaacaaggacggcaucaucugggucgcgaccgagggcgcccucaacacccccaaggaccacaucgggacgcggaaccccgccaacaacgccgcgaucgugcugcagcugccgcagggcaccacccuccccaagggguucuacgccgagggcagccgcgggggcucccaggccagcucccggagcuccagccgcucccggaacagccugcgcaacuccacccccggcagcagccgggggacgucccccgcccgcauggccggcaacgggggcgacgcggcccuggcccuccugcugcucgaccggcugaaccagcuggagagcaagauguccgggaagggccagcagcagcagggccagaccgugaccaagaaguccgccgccgaggcguccaagaagccgcgccagaagcgcaccgccacgaaggccuacaacgucacccaggccuucgggcggcgcggccccgagcagacccaggggaacuucggcgaccaggagcucauccggcaggggaccgacuacaagcacuggccccagaucgcccaguucgcgcccagcgccuccgccuucuucggcaugagccgcaucggcauggaggugacgccguccgggaccuggcugaccuacaccggcgccaucaagcuggacgacaaggaccccaacuucaaggaccaggugauccuccugaacaagcacaucgacgccuacaagacguucccgcccaccgagcccaagaaggacaagaagaagaaggcggacgagacccaggcccugccccagcggcagaagaagcagcagaccgucacgcuccugcccgccgccgaccuggacgacuucagcaagcagcuccagcaguccaugagcuccgcggacagcacccaggccugaggacuaguuauaagacugacuagcccgaugggccucccaacgggcccuccuccccuccuugcaccgagauuaauaaaaaaaaaaaaaaaaaaaaaaaaaaaaaaaaaaaaaaaaaaaaaaaaaaaaaaaaaaaaaaaaugcaucccccccccccccccccccccccccccccccaaaggcucuuuucagagccaccagaauu

SEQ ID NO: 21107 - RNA, 1477 nt, Artificial Sequence
  SARS-CoV-2__MT811500.1__nucleocapsid protein (N) mRNA gc
aggagaaagcuuaccaugagcgacaacggcccccagaaccagcgcaacgccccgcggaucaccuucgggggccccuccgacagcaccggguccaaccagaacggcgagcgcagcggggcccgguccaagcagcgccggccccagggccugcccaacaacacggcgagcugguucaccgcccucacccagcacggcaaggaggaccugaaguucccgcgcgggcagggcgugcccaucaacaccaacuccagccccgacgaccagaucggguacuaccggcgcgccacgcggcgcauccggggcggggacggcaagaugaaggaccugagcccccgcugguacuucuacuaccucggcaccgggccggaggccggccugcccuacggggccaacaaggacggcaucaucugggucgcgaccgagggcgcccugaacacccccaaggaccacaucgggacgcggaaccccgccaacaacgccgcgaucgugcuccagcugccgcagggcaccacccugcccaagggguucuacgccgagggcagccgcgggggcucccaggccagcucccggagcuccagccgcucccggaacagccuccgcaacuccacccccggcagcagccgggggacgucccccgcccgcauggccggcaacgggggcgacgcggcccuggcccugcuccugcuggaccggcucaaccagcuggagagcaagauguccgggaagggccagcagcagcagggccagaccgugaccaagaaguccgccgccgaggcguccaagaagccgcgccagaagcgcaccgccacgaaggccuacaacgucacccaggccuucgggcggcgcggccccgagcagacccaggggaacuucggcgaccaggagcugauccggcaggggaccgacuacaagcacuggccccagaucgcccaguucgcgcccagcgccuccgccuucuucggcaugagccgcaucggcauggaggugacgccguccgggaccuggcucaccuacaccggcgccaucaagcuggacgacaaggaccccaacuucaaggaccaggugauccugcucaacaagcacaucgacgccuacaagacguucccgcccaccgagcccaagaaggacaagaagaagaaggcggacgagacccaggcccugccccagcggcagaagauccagcagaccgucacgcugcuccccgccgccgaccuggacgacuucagcaagcagcugcagcaguccaugagcuccgcggacagcacccaggccugaggacuaguuauaagacugacuagcccgaugggccucccaacgggcccuccuccccuccuugcaccgagauuaauaaaaaaaaaaaaaaaaaaaaaaaaaaaaaaaaaaaaaaaaaaaaaaaaaaaaaaaaaaaaaaaaugcaucccccccccccccccccccccccccccccccaaaggcucuuuucagagccaccagaauu

SEQ ID NO: 21108 - RNA, 1477 nt, Artificial Sequence
  SARS-CoV-2__MT811507.1__nucleocapsid protein (N) mRNA gc
aggagaaagcuuaccaugagcgacaacggcccccagaaccagcgcaacgccccgcggaucaccuucgggggccccuccgacagcaccggguccaaccagaacggcgagcgcagcggggcccgguccaagcagcgccggccccagggccugcccaacaacacggcgagcugguucaccgcccucacccagcacggcaaggaggaccugaaguucccgcgcgggcagggcgugcccaucaacaccaacuccagccccgacgaccagaucggguacuaccggcgcgccacgcggcgcauccggggcggggacggcaagaugaaggaccugagcccccgcugguacuucuacuaccucggcaccgggccggaggccggccugcccuacggggccaacaaggacggcaucaucugggucgcgaccgagggcgcccugaacacccccaaggaccacaucgggacgcggaaccccgccaacaacgccgcgaucgugcuccagcugccgcagggcaccacccugcccaagggguucuacgccgagggcucccgcgggggcucccaggccagcucccggagcuccagccgcucccggaacagcucccgcaacagcacccccggcagcucccgggggacgagccccgcccgcauggccggcaacgggggcgacgcggcccucgcccugcugcuccuggaccggcugaaccaguucgaguccaagaugagcgggaagggccagcagcagcagggccagaccgugaccaagaaguccgccgccgaggcgagcaagaagccgcgccagaagcgcaccgccacgaaggccuacaacgucacccaggccuucgggcggcgcggccccgagcagacccaggggaacuucggcgaccaggagcucauccggcaggggaccgacuacaagcacuggccccagaucgcccaguucgcgcccuccgccagcgccuucuucggcaugucccgcaucggcauggaggugacgccgagcgggaccuggcugaccuacaccggcgccaucaagcuggacgacaaggaccccaacuucaaggaccaggugauccuccugaacaagcacaucgacgccuacaagacguucccgcccaccgagcccaagaaggacaagaagaagaaggcggacgagacccaggcccugccccagcggcagaagaagcagcagaccgucacgcuccugcccgccgccgaccuggacgacuucuccaagcagcuccagcagagcauguccaacgcggacagcacccaggccugaggacuaguuauaagacugacuagcccgaugggccucccaacgggcccuccuccccuccuugcaccgagauuaauaaaaaaaaaaaaaaaaaaaaaaaaaaaaaaaaaaaaaaaaaaaaaaaaaaaaaaaaaaaaaaaaugcaucccccccccccccccccccccccccccccccaaaggcucuuuucagagccaccagaauu

SEQ ID NO: 21109 - RNA, 1477 nt, Artificial Sequence
  SARS-CoV-2__MT811511.1__nucleocapsid protein (N) mRNA gc
aggagaaagcuuaccaugagcgacaacggcccccagaaccagcgcaacgccccgcggaucaccuucgggggccccuccgacagcaccggguccaaccagaacggcgagcgcagcggggcccgguccaagcagcgccggccccagggccugcccaacaacacggcgagcugguucaccgcccucacccagcacggcaaggaggaccugaaguucccgcgcgggcagggcgugcccaucaacaccaacuccagccccgacgaccagaucggguacuaccggcgcgccacgcggcgcauccggggcggggacggcaagaugaaggaccugagcccccgcugguacuucuacuaccucggcaccgggccggaggccggccugcccuacggggccaacaaggacggcaucaucugggucgcgaccgagggcgcccugaacacccccaaggaccacaucgggacgcggaaccccgccaacaacgccgcgaucgugcuccagcugccgcagggcaccacccugcccaagggguucuacgccgagggcucccgcgggggcucccaggccagcucccggagcuccagccgcucccggaacagcucccgcaacagcacccccggcagcucccgggggacgagccccgcccgcauggccggcaacgggggcgacgcggcccucgcccugcugcuccuggaccggcugaaccagcucgaguccaagaugagcgggaagggccagcagcagcagggccagaccgugaccaagaaguccgccgccgaggcgagcaagaagccgcgccagaagcgcaccgccacgaaggccuacaacgucacccaggccuucgggcggcgcggccccgagcagacccaggggaacuucggcgaccaggagcugauccggcaggggaccgacuacaagcacuggccccagaucgcccaguucgcgcccuccgccagcgccuucuucggcaugucccgcaucggcauggaggugacgccgagcgggaccuggcugaccuacaccggcgccaucaagcucgacgacaaggaccccaacuucaaggaccaggugauccugcugaacaagcacaucgacgccuacaagacguucccgcccaccgagcccaagaaggacaagaagaagaaggcggacgagacccaggcccuccugcagcggcagaagaagcagcagaccgucacgcugcuccccgccgccgaccuggacgacuucuccaagcagcugcagcagagcauguccagcgcggacuccacccaggccugaggacuaguuauaagacugacuagcccgaugggccucccaacgggcccuccuccccuccuugcaccgagauuaauaaaaaaaaaaaaaaaaaaaaaaaaaaaaaaaaaaaaaaaaaaaaaaaaaaaaaaaaaaaaaaaaugcaucccccccccccccccccccccccccccccccaaaggcucuuuucagagccaccagaauu

SEQ ID NO: 21110 - RNA, 1477 nt, Artificial Sequence
  SARS-CoV-2__MT811513.1__nucleocapsid protein (N) mRNA gc
aggagaaagcuuaccaugagcgacaacggcccccagaaccagcgcaacgccccgcggaucaccuucgggggccccuccgacagcaccggguccaaccagaacggcgagcgcagcggggcccgguccaagcagcgccggccccagggccugcccaacaacacggcgagcugguucaccgcccucacccagcacggcaaggaggaccugaaguucccgcgcgggcagggcgugcccaucaacaccaacuccagccccgacgaccagaucggguacuaccggcgcgccacgcggcgcauccggggcggggacggcaagaugaaggaccugagcccccgcugguacuucuacuaccucggcaccgggccggaggccggccugcccuacggggccaacaaggacggcaucaucugggucgcgaccgagggcgcccugaacacccccaaggaccacaucgggacgcggaaccccgccaacaacgccgcgaucgugcuccagcugccgcagggcaccacccugcccaagggguucuacgccgagggcagccgcgggggcucccaggccagcucccggagcuccagccgcucccggaacagccuccgcaacuccacccccggcagcagccgggggacgucccccgcccgcauggccggcaacgggggcgacgcggcccuggcccugcuccugcuggaccggcucaaccagcuggagagcaagauguccgggaagggccagcagcagcagggccagaccgugaccaagaaguccgccgccgaggcguccaagaagccgcgccagaagcgcaccgccacgaaggccuacaacgucacccaggccuucgggcggcgcggccccgagcagauccaggggaacuucggcgaccaggagcugauccggcaggggaccgacuacaagcacuggccccagaucgcccaguucgcgcccagcgccuccgccuucuucggcaugagccgcaucggcauggaggugaccccguccgggacguggcucaccuacaccggcgccaucaagcuggacgacaaggaccccaacuucaaggaccaggugauccugcucaacaagcacaucgacgccuacaagaccuucccgcccacggagcccaagaaggacaagaagaagaaggcggacgagacccaggcccugagccagcggcagaagaagcagcagaccgucacccugcuccccgccgccgaccuggacgacuucuccaagcagcugcagcagagcauguccagcgcggacuccacgcaggccugaggacuaguuauaagacugacuagcccgaugggccucccaacgggcccuccuccccuccuugcaccgagauuaauaaaaaaaaaaaaaaaaaaaaaaaaaaaaaaaaaaaaaaaaaaaaaaaaaaaaaaaaaaaaaaaaugcaucccccccccccccccccccccccccccccccaaaggcucuuuucagagccaccagaauu

SEQ ID NO: 21111 - RNA, 1477 nt, Artificial Sequence
  SARS-CoV-2__MT811515.1__nucleocapsid protein (N) mRNA gc
aggagaaagcuuaccaugagcgacaacggcccccagaaccagcgcaacgccccgcggaucaccuucgggggccuguccgacagcaccggguccaaccagaacggcgagcgcagcggggcccgguccaagcagcgccggccccagggccuccccaacaacacggcgagcugguucaccgcccugacccagcacggcaaggaggaccugaaguucccccgcgggcagggcgugccgaucaacaccaacuccagccccgacgaccagaucggguacuaccggcgcgccacgcggcgcauccggggcggggacggcaagaugaaggaccucagcccccgcugguacuucuacuaccugggcaccgggcccgaggccggccugccguacggggccaacaaggacggcaucaucugggucgcgaccgagggcgcccucaacacccccaaggaccacaucgggacgcggaaccccgccaacaacgccgcgaucgugcugcagcugccccagggcaccacccucccgaagggguucuacgccgagggcagccgcgggggcucccaggccagcucccggagcuccagccgcucccggaacagccugcgcaacuccacccccggcagcagccgggggacgucccccgcccgcauggccggcaacgggggcgacgcggcccuggcccuccugcugcucgaccggcugaaccagcuggagagcaagauguccgggaagggccagcagcagcagggccagaccgugaccaagaaguccgccgccgaggcguccaagaagccccgccagaagcgcaccgccacgaaggccuacaacgucacccaggccuucgggcggcgcggcccggagcagacccaggggaacuucggcgaccaggagcucauccggcaggggaccgacuacaagcacuggccccagaucgcccaguucgcgcccagcgccuccgccuucuucggcaugagccgcaucggcauggaggugacgcccuccgggaccuggcugaccuacaccggcgccaucaagcuggacgacaaggacccgaacuucaaggaccaggugauccuccugaacaagcacaucgacgccuacaagacguucccgcccaccgagcccaagaaggacaagaagaagaaggcggacgagacccaggcccugccccagcggcagaagaagcagcagaccgucacgcuccugcccgccgccgaccuggacgacuucagcaagcagcuccagcaguccaugagcuccgcggacagcacccaggccugaggacuaguuauaagacugacuagcccgaugggccucccaacgggcccuccuccccuccuugcaccgagauuaauaaaaaaaaaaaaaaaaaaaaaaaaaaaaaaaaaaaaaaaaaaaaaaaaaaaaaaaaaaaaaaaaugcaucccccccccccccccccccccccccccccccaaaggcucuuuucagagccaccagaauu

SEQ ID NO: 21112 - RNA, 1477 nt, Artificial Sequence
  SARS-CoV-2__MT811521.1__nucleocapsid protein (N) mRNA gc
aggagaaagcuuaccaugagcgacaacggcccccagaaccagcgcaacgccccgcggaucaccuucgggggccccuccgacagcaccggguccaaccagaacggcgagcgcagcggggcccgguccaagcagcgccggccccagggccugcccaacaacacggcgagcugguucaccgcccucacccagcacggcaaggaggaccugaaguucccgcgcgggcagggcgugcccaucaacaccaacuccagccccgacgaccagaucggguacuaccggcgcgccacgcggcgcauccggggcggggacggcaagaugaaggaccugagcccccgcugguacuucuacuaccucggcaccgggccggaggccggccugcccuacggggccaacaaggacggcaucaucugggucgcgaccgagggcgcccugaacacccccaaggaccacaucgggacgcggaaccccgccaacaacgccgcgaucgugcuccagcugccgcagggcaccacccugcccaagggguucuacgccgagggcucccgcgggggcucccaggccagcucccggagcuccagccgcucccggaacagcucccgcaacagcacccccggcagcucccgggggacgagccccgcccgcauggccggcaacgggggcgacgcggcccucacccugcugcuccuggaccggcugaaccagcucgaguccaagaugagcgggaagggccagcagcagcagggccagaccgugaccaagaaguccgccgccgaggccagcaagaagccgcgccagaagcgcacggcgaccaaggccuacaacgucacccaggccuucgggcggcgcggccccgagcagacccaggggaacuucggcgaccaggagcugauccggcaggggacggacuacaagcacuggccccagaucgcccaguucgcccccuccgcgagcgccuucuucggcaugucccgcaucggcauggaggugaccccgagcgggaccuggcugaccuacacgggcgccaucaagcucgacgacaaggaccccaacuucaaggaccaggugauccugcugaacaagcacaucgacgccuacaagaccuucccgcccaccgagcccaagaaggacaagaagaagaaggccgacgagacccaggcgcucccccagcggcagaagaagcagcagacggucacccugcugcccgccgccgaccucgacgacuucuccaagcagcugcagcagagcauguccagcgccgacuccacccaggcgugaggacuaguuauaagacugacuagcccgaugggccucccaacgggcccuccuccccuccuugcaccgagauuaauaaaaaaaaaaaaaaaaaaaaaaaaaaaaaaaaaaaaaaaaaaaaaaaaaaaaaaaaaaaaaaaaugcaucccccccccccccccccccccccccccccccaaaggcucuuuucagagccaccagaauu

SEQ ID NO: 21113 - RNA, 1477 nt, Artificial Sequence
  SARS-CoV-2__MT811726.1__nucleocapsid protein (N) mRNA gc
aggagaaagcuuaccaugagcgacaacggcccccagaaccagcgcaacgccccgcggaucaccuucgggggccccuccgacagcaccggguccaaccagaacggcgagcgcagcggggcccgguccaagcagcgccggccccagggccugcccaacaacacggcgagcugguucaccgcccucacccagcacggcaaggaggaccugaaguucccgcgcgggcagggcgugcccaucaacaccaacuccagccccgacgaccagaucggguacuaccggcgcgccacgcggcgcauccggggcggggacggcaagaugaaggaccugagcccccgcugguacuucuacuaccucggcaccgggccggaggccggccugcccuacggggccaacaaggacggcaucaucugggucgcgaccgagggcgcccugaacaccagcaaggaccacaucgggacgcggaaccccgccaacaacgccgcgaucgugcuccagcugccccagggcaccacccugccgaagggguucuacgccgagggcucccgcgggggcagccaggccuccagccgguccagcucccgcagccggaacuccagccgcaacagcacccccggcuccagccgggggacgucccccgcccgcauggccggcaacgggggcgacgcggcccucgcccugcugcuccuggaccggcugaaccagcucgagagcaagauguccgggaagggccagcagcagcagggccagaccgugaccaagaaguccgccgccgaggcguccaagaagccccgccagaagcgcaccgccacgaaggccuacaacgucacccaggccuucgggcggcgcggcccggagcagacccaggggaacuucggcgaccaggagcugauccggcaggggaccgacuacaagcacuggccccagaucgcccaguucgcgcccagcgccuccgccuucuucggcaugagccgcaucggcauggaggugacgcccuccgggaccuggcugaccuacaccggcgccaucaagcucgacgacaaggacccgaacuucaaggaccaggugauccugcugaacaagcacaucgacgccuacaagacguucccgcccaccgagcccaagaaggacaagaagaagaaggcggacgagacccaggcccucccccagcggcagaagaagcagcagaccgucacgcugcugcccgccgccgaccucgacgacuucagcaagcagcugcagcaguccaugagcuccgcggacagcacccaggccugaggacuaguuauaagacugacuagcccgaugggccucccaacgggcccuccuccccuccuugcaccgagauuaauaaaaaaaaaaaaaaaaaaaaaaaaaaaaaaaaaaaaaaaaaaaaaaaaaaaaaaaaaaaaaaaaugcaucccccccccccccccccccccccccccccccaaaggcucuuuucagagccaccagaauu

SEQ ID NO: 21114 - RNA, 1477 nt, Artificial Sequence
  SARS-CoV-2__MT806773.1__nucleocapsid protein (N) mRNA gc
aggagaaagcuuaccaugagcgacaacggcccccagaaccagcgcaacgccccgcggaucaccuucgggggccccuccgacagcaccggguccaaccagaacggcgagcgcagcggggcccgguccaagcagcgccggccccagggccugcccaacaacacggcgagcugguucaccgcccucacccagcacggcaaggaggaccugaaguucccgcgcgggcagggcgugcccaucaacaccaacuccagccccgacgaccagaucggguacuaccggcgcgccacgcggcgcauccggggcggggacggcaagaugaaggaccugagcccccgcugguacuucuacuaccucggcaccgggccggaggccggccugcccuacggggccaacaaggacggcaucaucugggucgcgaccgagggcgcccugaacacccccaaggaccacaucgggacgcggaaccccgccaacaacgccgcgaucgugcuccagcugccgcagggcaccacccugcccaagggguucuacgccgagggcagccgcgggggcucccaggccagcucccggagcuccagccgcucccggaacagcucccgcaacagcacccccggcagcauccgggggacgucccccgcccgcauggccggcaacgggggcgacgcggcccucgcccugcugcuccuggaccggcugaaccagcucgagagcaagauguccgggaagggccagcagcagcagggccagaccgugaccaagaaguccgccgccgaggcguccaagaagccgcgccagaagcgcaccgccacgaaggccuacaacgucacccaggccuucgggcggcgcggccccgagcagacccaggggaacuucggcgaccaggagcugauccggcaggggaccgacuacaagcacuggccccagaucgcccaguucgcgcccagcgccuccgccuucuucggcaugagccgcaucggcauggaggugacgccguccgggaccuggcugaccuacaccggcgccaucaagcucgacgacaaggaccccaacuucaaggaccaggugauccugcugaacaagcacaucgacgccuacaagacguucccgcccaccgagcccaagaaggacaagaagaagaaggcggacgagacccaggcccucccccagcggcagaagaagcagcagaccgucacgcugcugcccgccgccgaccucgacgacuucagcaagcagcugcagcaguccaugagcuccgcggacagcacccaggccugaggacuaguuauaagacugacuagcccgaugggccucccaacgggcccuccuccccuccuugcaccgagauuaauaaaaaaaaaaaaaaaaaaaaaaaaaaaaaaaaaaaaaaaaaaaaaaaaaaaaaaaaaaaaaaaaugcaucccccccccccccccccccccccccccccccaaaggcucuuuucagagccaccagaauu

SEQ ID NO: 21115 - RNA, 1477 nt, Artificial Sequence
  SARS-CoV-2__MT806776.1__nucleocapsid protein (N) mRNA gc
aggagaaagcuuaccaugagcgacaacggcccccagaaccagcgcaacgccccgcggaucaccuucgggggccccuccgacagcaccggguccaaccagaacggcgagcgcagcggggcccgguccaagcagcgccggccccagggccugcccaacaacacggcgagcugguucaccgcccucacccagcacggcaaggaggaccugaaguucccgcgcgggcagggcgugcccaucaacaccaacuccagccccgacgaccagaucggguacuaccggcgcgccacgcggcgcauccggggcggggacggcaagaugaaggaccugagcccccgcugguacuucuacuaccucggcaccgggccggaggccggccugcccuacggggccaacaaggacggcaucaucugggucgcgaccgagggcgcccugaacacccccaaggaccacaucgggacgcggaaccccgccaacaacgccgcgaucgugcuccagcugccgcagggcaccacccugcccaagggguucuacgccgagggcucccgcgggggcucccaggccagcucccggagcuccagccgcucccggaacagcucccgcaacagcacccccggcagcucccgggggacgagccccgcccgcauggccggcaacgggggcgacgcggcccucgcccugcugcuccuggaccggcugaaccagcucgaguccaagaugagcgggaagggccagcagcagcagggccagaccgugaccaagaaguccgccgccgaggcgagcaagaagccgcgccagaagcgcaccgccacgaaggccuacaacgucacccaggccuucgggcggcgcggccccgagcagacccaggggaacuucggcgaccaggagcugauccggcaggggaccgacuacaagcacuggccccagaucgcccaguucgcgcccuccgccagcgccuucuucggcaugucccgcaucggcauggaggugacgccgagcgggaccuggcugaccuacaccggcgccaucaagcucgacgacaaggaccccaacuucaaggaccaggugauccugcugaacaagcacaucgacgccuacaagacguucccgcccaucgagcccaagaaggacaagaagaagaaggcggacgagacccaggcccucccccagcggcagaagaagcagcagaccgucacccugcugcccgccgccgaccucgacgacuucuccaagcagcugcagcagagcauguccagcgcggacuccacgcaggccugaggacuaguuauaagacugacuagcccgaugggccucccaacgggcccuccuccccuccuugcaccgagauuaauaaaaaaaaaaaaaaaaaaaaaaaaaaaaaaaaaaaaaaaaaaaaaaaaaaaaaaaaaaaaaaaaugcaucccccccccccccccccccccccccccccccaaaggcucuuuucagagccaccagaauu

SEQ ID NO: 21116 - RNA, 1477 nt, Artificial Sequence
  SARS-CoV-2__MT806778.1__nucleocapsid protein (N) mRNA gc
aggagaaagcuuaccaugagcgacaacggcccccagaaccagcgcaacgccccgcggaucaccuucgggggccccuccgacagcaccggguccaaccagaacggcgagcgcagcggggcccgguccaagcagcgccggccccagggccugcccaacaacacggcgagcugguucaccgcccucacccagcacggcaaggaggaccugaaguucccgcgcgggcagggcgugcccaucaacaccaacuccagccccgacgaccagaucggguacuaccggcgcgccacgcggcgcauccggggcggggacggcaagaugaaggaccugagcccccgcugguacuucuacuaccucggcaccgggccggaggccggccugcccuacggggccaacaaggacggcaucaucugggucgcgaccgagggcgcccugaacacccccaaggaccacaucgggacgcggaaccccgccaacaacgccgcgaucgugcuccagcugccgcagggcaccacccugcccaagggguucuacgccgagggcagccgcgggggcucccaggccagcucccggagcuccagccgcucccggaacagcucccgcaacagcacccccggcagcucccgggggacgagccccgcccgcauguccggcaacgggggcgacgccgcgcucgcccugcugcuccuggaccggcugaaccagcucgagagcaagauguccgggaagggccagcagcagcagggccagaccgugaccaagaaguccgccgccgaggccuccaagaagccgcgccagaagcgcaccgcgacgaaggccuacaacgucacccaggccuucgggcggcgcggccccgagcagacccaggggaacuucggcgaccaggagcugauccggcaggggaccgacuacaagcacuggccccagaucgcccaguucgcccccagcgcguccgccuucuucggcaugagccgcaucggcauggaggugacgccguccgggaccuggcugaccuacaccggcgccaucaagcucgacgacaaggaccccaacuucaaggaccaggugauccugcugaacaagcacaucgacgccuacaagacguucccgcccaccgagcccaagaaggacaagaagaagaaggccgacgagacccaggcgcucccccagcggcagaagaagcagcagaccgucacgcugcugcccgccgccgaccucgacgacuucagcaagcagcugcagcaguccaugagcuccgccgacagcacccaggcgugaggacuaguuauaagacugacuagcccgaugggccucccaacgggcccuccuccccuccuugcaccgagauuaauaaaaaaaaaaaaaaaaaaaaaaaaaaaaaaaaaaaaaaaaaaaaaaaaaaaaaaaaaaaaaaaaugcaucccccccccccccccccccccccccccccccaaaggcucuuuucagagccaccagaauu

SEQ ID NO: 21117 - RNA, 1477 nt, Artificial Sequence
  SARS-CoV-2__MT806787.1__nucleocapsid protein (N) mRNA gc
aggagaaagcuuaccaugagcgacaacggcccccagaaccagcgcaacgccccgcggaucaccuucgggggccccuccgacagcaccggguccaaccagaacggcgagcgcagcggggcccgguccaagcagcgccggccccagggccugcccaacaacacggcgagcugguucaccgcccucacccagcacggcaaggaggaccugaaguucccgcgcgggcagggcgugcccaucaacaccaacuccagccccgacgaccagaucggguacuaccggcgcgccacgcggcgcauccggggcggggacggcaagaugaaggaccugagcccccgcugguacuucuacuaccucggcaccgggccggaggccggccugcccuacggggccaacaaggacggcaucaucugggucgcgaccgagggcgcccugaacacccccaaggaccacaucgggacgcggaaccccgccaacaacgccgcgaucgugcuccagcugccgcagggcaccacccugcccaagggguucuacgccgagggcucccgcgggggcucccaggccagcucccggagcuccagccgcucccggaacagcucccgcaacagcacccccggcagcucccgggggacgagccccgcccgcauggccggcaacugcggggacgcggcccucgcccugcugcuccuggaccggcugaaccagcucgaguccaagaugagcggcaaggggcagcagcagcagggccagaccgugaccaagaaguccgccgccgaggcgagcaagaagccgcgccagaagcgcaccgccacgaaggccuacaacgucacccaggccuucggccggcgcgggcccgagcagacccagggcaacuucggggaccaggagcugauccggcagggcaccgacuacaagcacuggccccagaucgcccaguucgcgcccuccgccagcgccuucuucgggaugucccgcaucggcauggaggugacgccgagcggcaccuggcugaccuacaccggggccaucaagcucgacgacaaggaccccaacuucaaggaccaggugauccugcugaacaagcacaucgacgccuacaagacguucccgcccaccgagcccaagaaggacaagaagaagaaggcggacgagacccaggcccucccccagcggcagaagaagcagcagaccgucacgcugcugcccgccgccgaccucgacgacuucuccaagcagcugcagcagagcauguccagcgcggacuccacccaggccugaggacuaguuauaagacugacuagcccgaugggccucccaacgggcccuccuccccuccuugcaccgagauuaauaaaaaaaaaaaaaaaaaaaaaaaaaaaaaaaaaaaaaaaaaaaaaaaaaaaaaaaaaaaaaaaaugcaucccccccccccccccccccccccccccccccaaaggcucuuuucagagccaccagaauu

SEQ ID NO: 21118 - RNA, 1477 nt, Artificial Sequence
  SARS-CoV-2__MT800928.1__nucleocapsid protein (N) mRNA gc
aggagaaagcuuaccaugagcgacaacggcccccagaaccagcgcaacgccccgcggaucaccuucgggggccccuccgacagcaccggguccaaccagaacggcgagcgcagcggggcccgguccaagcagcgccggccccagggccugcccaacaacacggcgagcugguucaccgcccucacccagcacggcaaggaggaccugaaguucccgcgcgggcagggcgugcccaucaacaccaacuccagccccgacgaccagaucggguacuaccggcgcgccacgcggcgcauccggggcggggacggcaagaugaaggaccugagcccccgcugguacuucuacuaccucggcaccgggccggaggccggccugcccuacggggccaacaaggacggcaucaucugggucgcgaccgagggcgcccugaacacccccaaggaccacaucgggacgcggaaccccgccaacaacgccgcgaucgugcuccagcugccgcagggcaccacccugcccaagggguucuacgccgagggcagccgcgggggcucccaggccagcucccggagcuccagccgcucccggaacagccuccgcaacuccacccccggcagcagcaagacgaccucccccgcccggauggccgggaacggcggggacgcggcccuggcccugcuccugcuggaccgccucaaccagcuggagagcaagauguccggcaaggggcagcagcagcagggccagaccgugaccaagaaguccgccgccgaggcguccaagaagccgcggcagaagcgcacggccaccaaggccuacaacgucacccaggccuucggccgccgggggcccgagcagacccagggcaacuucggggaccaggagcugauccgccagggcacggacuacaagcacuggccccagaucgcccaguucgcgcccagcgccuccgccuucuucgggaugagccggaucggcauggaggugaccccguccggcaccuggcucaccuacacgggggccaucaagcuggacgacaaggaccccaacuucaaggaccaggugauccugcucaacaagcacaucgacgccuacaagaccuucccgcccaccgagcccaagaaggacaagaagaagaaggcggacgagacccaggcccugccccagcgccagaagaagcagcagacggucacccugcuccccgccgccgaccuggacgacuucagcaagcagcugcagcaguccaugagcuccgcggacagcacccaggccugaggacuaguuauaagacugacuagcccgaugggccucccaacgggcccuccuccccuccuugcaccgagauuaauaaaaaaaaaaaaaaaaaaaaaaaaaaaaaaaaaaaaaaaaaaaaaaaaaaaaaaaaaaaaaaaaugcaucccccccccccccccccccccccccccccccaaaggcucuuuucagagccaccagaauu

SEQ ID NO: 21119 - RNA, 1477 nt, Artificial Sequence
  SARS-CoV-2__MT797771.1__nucleocapsid protein (N) mRNA gc
aggagaaagcuuaccaugagcgacaacggcccccagaaccagcgcaacgccccgcggaucaccuucgggggccccuccgacagcaccggguccaaccagaacggcgagcgcagcggggcccgguccaagcagcgccggccccagggccugcccaacaacacggcgagcugguucaccgcccucacccagcacggcaaggaggaccugaaguucccgcgcgggcagggcgugcccaucaacaccaacuccagccccgacgaccagaucggguacuaccggcgcgccacgcggcgcauccggggcggggacggcaagaugaaggaccugagcccccgcugguacuucuacuaccucggcaccgggccggaggccggccugcccuacggggccaacaaggacggcaucaucugggucgcgaccgagggcgcccugaacacccccaaggaccacaucgggacgcggaaccccgccaacaacgccgcgaucgugcuccagcugccgcagggcaccacccugcccaagggguucuacgccgagggcagccgcgggggcucccaggccagcucccggagcuccagccgcggccggaacuccagccgcaacuccacccccgggagcagccggggcacgucccccgcccgcauggccgggaacggcggggacgcggcccucgcccugcugcuccuggaccggcugaaccagcucgagagcaagauguccggcaagggccagcagcagcaggggcagaccgugaccaagaaguccgccgccgaggcguccaagaagccgcgccagaagcgcaccgccacgaaggccuacaacgucacccaggccuucggccggcgcgggcccgagcagacccagggcaacuucggggaccaggagcugauccggcagggcaccgacuacaagcacuggccccagaucgcccaguucgcgcccagcgccuccgccuucuucggcaugagccgcaucgggauggaggugacgccguccggcaccuggcugaccuacaccggggccaucaagcucgacgacaaggaccccaacuucaaggaccaggugauccugcugaacaagcacaucgacgccuacaagacguucccgcccaccgagcccaagaaggacaagaagaagaaggcggacgagacccaggcccuccugcagcggcagaagaagcagcagaccgucacgcugcuccccgccgccgaccuggacgacuucagcaagcagcugcagcaguccaugagcuccgcggacagcacccaggccugaggacuaguuauaagacugacuagcccgaugggccucccaacgggcccuccuccccuccuugcaccgagauuaauaaaaaaaaaaaaaaaaaaaaaaaaaaaaaaaaaaaaaaaaaaaaaaaaaaaaaaaaaaaaaaaaugcaucccccccccccccccccccccccccccccccaaaggcucuuuucagagccaccagaauu

SEQ ID NO: 21120 - RNA, 1477 nt, Artificial Sequence
  SARS-CoV-2__MT791844.1__nucleocapsid protein (N) mRNA gc
aggagaaagcuuaccaugagcgacaacggcccccagaaccagcgcaacgccccgcggaucaccuucgggggccccuccgacagcaccggguccaaccagaacggcgagcgcagcggggcccgguccaagcagcgccggccccagggccugcccaacaacacggcgagcugguucaccgcccucacccagcacggcaaggaggaccugaaguucccgcgcgggcagggcgugcccaucaacaccaacuccagccccgacgaccagaucggguacuaccggcgcgccacgcggcgcauccggggcggggacggcaagaugaaggaccugagcccccgcugguacuucuacuaccucggcaccgggccggaggccggccugcccuacggggccaacaaggacggcaucaucugggucgcgaccgagggcgcccugaacauccccaaggaccacaucgggacccggaaccccgccaacaacgccgcgaucgugcuccagcugccgcagggcacgacccugcccaagggguucuacgccgagggcucccgcgggggcucccaggccagcucccggagcuccagccgcucccggaacagcucccgcaacagcacccccggcagcucccgggggaccagccccgcccgcauggccggcaacgggggcgacgcggcccucgcccugcugcuccuggaccggcugaaccagcucgaguccaagaugagcgggaagggccagcagcagcagggccagacggugaccaagaaguccgccgccgaggcgagcaagaagccgcgccagaagcgcaccgccaccaaggccuacaacgucacgcaggccuucgggcggcgcggccccgagcagacccaggggaacuucggcgaccaggagcugauccggcaggggaccgacuacaagcacuggccccagaucgcccaguucgcgcccuccgccagcgccuucuucggcaugucccgcaucggcauggaggugaccccgagcgggacguggcugaccuacaccggcgccaucaagcucgacgacaaggaccccaacuucaaggaccaggugauccugcugaacaagcacaucgacgccuacaagaccuucccgcccacggagcccaagaaggacaagaagaagaaggcggacgagacccaggcccucccccagcggcagaagaagcagcagaccgucacccugcugcccgccgccgaccucgacgacuucuccaagcagcugcagcagagcauguccagcgcggacuccacgcaggccugaggacuaguuauaagacugacuagcccgaugggccucccaacgggcccuccuccccuccuugcaccgagauuaauaaaaaaaaaaaaaaaaaaaaaaaaaaaaaaaaaaaaaaaaaaaaaaaaaaaaaaaaaaaaaaaaugcaucccccccccccccccccccccccccccccccaaaggcucuuuucagagccaccagaauu

SEQ ID NO: 21121 - RNA, 1477 nt, Artificial Sequence
  SARS-CoV-2__MT791858.1__nucleocapsid protein (N) mRNA gc
aggagaaagcuuaccaugagcgacaacggcccccagaaccagcgcaacgccccgcggaucaccuucgggggccccuccgggagcaccggcuccaaccagaacggggagcgcagcggcgcccgguccaagcagcgccggccccagggccugcccaacaacacggcgagcugguucaccgcccucacccagcacgggaaggaggaccugaaguucccgcgcggccagggggugcccaucaacaccaacuccagccccgacgaccagaucggcuacuaccggcgcgccacgcggcgcauccgcgggggcgacggcaagaugaaggaccugagcccccggugguacuucuacuaccucgggaccggcccggaggccgggcugcccuacggcgccaacaaggacggcaucaucugggucgcgaccgagggggcccugaacacccccaaggaccacaucggcacgcggaaccccgccaacaacgccgcgaucgugcuccagcugccgcaggggaccacccugcccaagggcuucuacgccgaggggucccgcggcggcucccaggccagcucccggagcuccagccgcucccggaacagcucccgcaacagcacccccgggagcucccggggcacgagccccgcccgcauggccgggaacggcggggacgcggcccucgcccugcugcuccuggaccggcugaaccagcucgaguccaagaugagcggcaagggccagcagcagcaggggcagaccgugaccaagaaguccgccgccgaggcgagcaagaagccgcgccagaagcgcaccgccacgaaggccuacaacgucacccaggccuucggccggcgcgggcccgagcagacccagggcaacuucggggaccaggagcugauccggcagggcaccgacuacaagcacuggccccagaucgcccaguucgcgcccuccgccagcgccuucuucggcaugucccgcaucgggauggaggugacgccgagcggcaccuggcugaccuacaccggggccaucaagcucgacgacaaggaccccaacuucaaggaccaggugauccugcugaacaagcacaucgacgccuacaagacguucccgcccaccgagcccaagaaggacaagaagaagaaggcggacgagacccaggcccucccccagcggcagaagaagcagcagaccgucacgcugcugcccgccgccgaccucgacgacuucuccaagcagcugcagcagagcauguccagcgcggacuccacccaggccugaggacuaguuauaagacugacuagcccgaugggccucccaacgggcccuccuccccuccuugcaccgagauuaauaaaaaaaaaaaaaaaaaaaaaaaaaaaaaaaaaaaaaaaaaaaaaaaaaaaaaaaaaaaaaaaaugcaucccccccccccccccccccccccccccccccaaaggcucuuuucagagccaccagaauu

SEQ ID NO: 21122 - RNA, 1477 nt, Artificial Sequence
  SARS-CoV-2__MT791862.1__nucleocapsid protein (N) mRNA gc
aggagaaagcuuaccaugagcgacaacggcccccagaaccagcgcaacgccccgcggaucaccuucgggggccccuccgacagcaccggguccaaccagaacggcgagcgcagcggggcccgguccaagcagcgccggccccagggccugcccaacaacacggcgagcugguucaccgcccucacccagcacggcaaggaggaccugaaguucccgcgcgggcagggcgugcccaucaacaccaacuccagccccgacgaccagaucggguacuaccggcgcgccacgcggcgcauccggggcggggacggcaagaugaaggaccugagcccccgcugguacuucuacuaccucggcaccgggccggaggccggccugcccuacggggccaacaaggacggcaucaucugggucgcgaccgagggcgcccugaacacccccaaggaccacaucgggacgcggaaccccgccaacaacgccgcgaucgugcuccagcugccgcagggcaccacccugcccaagggguucuacgccgagggcagccgcgggggcacccaggccuccagccgguccagcucccgcagccggaacuccagccgcaacuccacgcccggcagcagccgggggaccucccccgcccgcauggccggcaacgggggcgacgcggcccucgcccugcugcuccuggaccggcugaaccagcucgagagcaagauguccgggaagggccagcagcagcagggccagaccgugaccaagaaguccgccgccgaggcguccaagaagccgcgccagaagcgcacggccaccaaggccuacaacgucacccaggccuucgggcggcgcggccccgagcagacccaggggaacuucggcgaccaggagcugauccggcaggggacggacuacaagcacuggccccagaucgcccaguucgcgcccagcgccuccgccuucuucggcaugagccgcaucggcauggaggugaccccguccgggaccuggcugaccuacacgggcgccaucaagcucgacgacaaggaccccaacuucaaggaccaggugauccugcugaacaagcacaucgacgccuacaagaccuucccgcccaccgagcccaagaaggacaagaagaagaaggcggacgagacccaggcccucccccagcggcagaagaagcagcagacggucacccugcugcccgccgccgaccucgacgacuucagcaagcagcugcagcaguccaugagcuccgcggacagcacccaggccugaggacuaguuauaagacugacuagcccgaugggccucccaacgggcccuccuccccuccuugcaccgagauuaauaaaaaaaaaaaaaaaaaaaaaaaaaaaaaaaaaaaaaaaaaaaaaaaaaaaaaaaaaaaaaaaaugcaucccccccccccccccccccccccccccccccaaaggcucuuuucagagccaccagaauu

SEQ ID NO: 21123 - RNA, 1477 nt, Artificial Sequence
  SARS-CoV-2__MT791896.1__nucleocapsid protein (N) mRNA gc
aggagaaagcuuaccaugagcgacaacggcccccagaaccagcgcaacgugccgcggaucaccuucgggggccccuccgacagcaccggguccaaccagaacggcgagcgcagcggggcccgguccaagcagcgccggccccagggccugcccaacaacacggccagcugguucaccgcgcucacccagcacggcaaggaggaccugaaguucccgcgcgggcagggcguccccaucaacaccaacuccagccccgacgaccagaucggguacuaccggcgcgccacgcggcgcauccggggcggggacggcaagaugaaggaccugagcccccgcugguacuucuacuaccucggcaccgggccggaggccggccugcccuacggggccaacaaggacggcaucaucuggguggccaccgagggcgcgcugaacacccccaaggaccacaucgggacgcggaaccccgccaacaacgccgccaucgugcuccagcugccgcagggcaccacccugcccaagggguucuacgcggagggcucccgcgggggcucccaggccagcucccggagcuccagccgcucccggaacagcucccgcaacagcacccccggcagcucccgggggacgagccccgcccgcauggccggcaacgggggcgacgccgcgcucgcccugcugcuccuggaccggcugaaccagcucgaguccaagaugagcgggaagggccagcagcagcagggccagaccgucaccaagaaguccgccgccgaggccagcaagaagccgcgccagaagcgcaccgcgacgaaggccuacaacgugacccaggccuucgggcggcgcggccccgagcagacccaggggaacuucggcgaccaggagcugauccggcaggggaccgacuacaagcacuggccccagaucgcccaguucgcccccuccgcgagcgccuucuucggcaugucccgcaucggcauggaggugacgccgagcgggaccuggcugaccuacaccggcgccaucaagcucgacgacaaggaccccaacuucaaggaccaggucauccugcugaacaagcacaucgacgccuacaagacguucccgcccaccgagcccaagaaggacaagaagaagaaggccgacgagacccaggcgcucccccagcggcagaagaagcagcagaccgugacgcugcugcccgccgccgaccucgacgacuucuccaagcagcugcagcagagcauguccagcgccgacuccacccaggcgugaggacuaguuauaagacugacuagcccgaugggccucccaacgggcccuccuccccuccuugcaccgagauuaauaaaaaaaaaaaaaaaaaaaaaaaaaaaaaaaaaaaaaaaaaaaaaaaaaaaaaaaaaaaaaaaaugcaucccccccccccccccccccccccccccccccaaaggcucuuuucagagccaccagaauu

SEQ ID NO: 21124 - RNA, 1477 nt, Artificial Sequence
  SARS-CoV-2__MT791938.1__nucleocapsid protein (N) mRNA gc
aggagaaagcuuaccaugagcgacaacggcccccagaaccagcgcaacgccccgcggaucaccuucgggggccccuccgacagcaccggguccaaccagaacggcgagcgcagcggggcccgguccaagcagcgccggccccagggccugcccaacaacacggcgagcugguucaccgcccucacccagcacggcaaggaggaccugaaguucccgcgcgggcagggcgugcccaucaacaccaacuccagccccgacgaccagaucggguacuaccggcgcgccacgcggcgcauccggggcggggacggcaagaugaaggaccugagcccccgcugguacuucuacuaccucggcaccgggccggagagcggccugcccuacggggccaacaaggacggcaucaucugggucgccaccgagggcgcgcugaacacccccaaggaccacaucgggacgcggaaccccgccaacaacgccgccaucgugcuccagcugccgcagggcaccacccugcccaagggguucuacgcggagggcucccgcgggggcagccaggccuccagccgguccagcucccgcagccggaacuccagccgcaacagcacccccggcuccagccgggggacgucccccgcccgcauggccggcaacgggggcgacgccgcgcucgcccugcugcuccuggaccggcugaaccagcucgagagcaagauguccgggaagggccagcagcagcagggccagaccgugaccaagaaguccgccgccgaggccuccaagaagccgcgccagaagcgcaccgcgacgaaggccuacaacgucacccaggccuucgggcggcgcggccccgagcagacccaggggaacuucggcgaccaggagcugauccggcaggggaccgacuacaagcacuggccccagaucgcccaguucgcccccagcgcguccgccuucuucggcaugagccgcaucggcauggaggugacgccguccgggaccuggcugaccuacaccggcgccaucaagcucgacgacaaggaccccaacuucaaggaccaggugauccugcugaacaagcacaucgacgccuacaagacguucccgcccaccgagcccaagaaggacaagaagaagaaggccgacgagacccaggcgcucccccagcggcagaagaagcagcagaccgucacgcugcugcccgccgccgaccucgacgacuucagcaagcagcugcagcaguccaugagcuccgccgacagcacccaggcgugaggacuaguuauaagacugacuagcccgaugggccucccaacgggcccuccuccccuccuugcaccgagauuaauaaaaaaaaaaaaaaaaaaaaaaaaaaaaaaaaaaaaaaaaaaaaaaaaaaaaaaaaaaaaaaaaugcaucccccccccccccccccccccccccccccccaaaggcucuuuucagagccaccagaauu

SEQ ID NO: 21125 - RNA, 1477 nt, Artificial Sequence
  SARS-CoV-2__MT791944.1__nucleocapsid protein (N) mRNA gc
aggagaaagcuuaccaugagcgacaacggcccccagaaccagcgcaacgccccgcggaucaccuucgggggccccuccgacagcaccggguccaaccagaacggcgagcgcagcggggcccgguccaagcagcgccggccccagggccugcccaacaacacggcgagcugguucaccgcccucacccagcacggcaaggaggaccugaaguucccgcgcgggcagggcgugcccaucaacaccaacuccagccccgacgaccagaucggguacuaccggcgcgccacgcggcgcauccggggcggggacggcaagaugaaggaccugagcccccgcugguacuucuacuaccucggcaccgggccggaggccggccugcccuacggggccaacaaggacggcaucaucugggucgcgaccgagggcgcccugaacacccccaaggaccacaucgggacgcggaaccccgccaacaacgccgcgaucgugcuccagcugccgcagggcaccacccugcccaagggguucuacgccgagggcucccgcgggggcucccaggccagcucccggagcuccagccgcucccggaacagcucccgcaacagcacccccggcagcucccgggggacgagccccgcccgcauggccggcaacgggggcgacgcggcccucgcccugcugcuccuggaccggcugaaccagcucgaguccaagaugagcgggaagggccagcagcagcagggccagaccgugaccaagaaguccgccgccgaggcgagcaagaagccgcgccagaagcgcaccgccacgaaggccuacaacgucacccaggccuucgggcggcgcggccccgagcagacccaggggaacuucggcgaccaggagcugauccggcaggggaccgacuacaagcaguggccccagaucgcccaguucgcgcccuccgccagcgccuucuucggcaugucccgcaucggcauggaggugacgccgagcgggaccuggcugaccuacaccggcgccaucaagcucgacgacaaggaccccaacuucaaggaccaggugauccugcugaacaagcacaucgacgccuacaagacguucccgcccaccgagcccaagaaggacaagaagaagaaggcggacgagacccaggcccucccccagcggcagaagaagcagcagaccgucacgcugcugcccgccgccgaccucgacgacuucuccaagcagcugcagcagagcauguccagcgcggacuccacccaggccugaggacuaguuauaagacugacuagcccgaugggccucccaacgggcccuccuccccuccuugcaccgagauuaauaaaaaaaaaaaaaaaaaaaaaaaaaaaaaaaaaaaaaaaaaaaaaaaaaaaaaaaaaaaaaaaaugcaucccccccccccccccccccccccccccccccaaaggcucuuuucagagccaccagaauu

SEQ ID NO: 21126 - RNA, 1477 nt, Artificial Sequence
  SARS-CoV-2__MT791948.1__nucleocapsid protein (N) mRNA gc
aggagaaagcuuaccaugagcgacaacggcccccagaaccagcgcaacgccccgcggaucaccuucgggggccccuccgacagcaccggguccaaccagaacggcgagcgcagcggggcccgguccaagcagcgccggccccagggccugcccaacaacacggcgagcugguucaccgcccucacccagcacggcaaggaggaccugaaguucccgcgcgggcagggcgugcccaucaacaccaacuccagccccgacgaccagaucggguacuaccggcgcgccacgcggcgcauccggggcggggacggcaagaugaaggaccugagcccccgcugguacuucuacuaccucggcaccgggccggaggccggccugcccuacggggccaacaaggacggcaucaucugggucgcgaccgagggcgcccugaacacccccaaggaccacaucgggacgcggaaccccgccaacaacgccgcgaucgugcuccagcugccgcagggcaccacccugcccaagggguucuacgccgagggcucccgcgggggcucccaggccagcucccggagcuccagccgcucccggaacagcucccgcaacagcacccccggcagcucccgggggacgagccccgcccgcauggccggcaacgggggcgacgcggcccucgcccugcugcuccuggaccggcugaaccagcucgaguccaagaugagcgggaagggccagcagcagcagggccagaccgugaccaagaaguccgccgccgaggcgagcaagaagccgcgccagaagcgcaccgccacgaaggccuacaacgucacccaggccuucgggcggcgcggccccgagcagacccaggggaacuucggcgaccaggagcugauccggcaggggaccgacuacaagcacuggccccagaucgcccaguucgcgcccuccgccagcgccuucuucggcaugucccgcaucggcauggaggugacgccgagcgggaccuggcugaccuacaccggcgccaucaagcucgacgacaaggaccccaacuucaaggaccaggugauccugcugaacaagcacaucgacgccuacaagacguucccgcccaccgagcccaagaaggacaagaagaagaaggcggacgagacccaggcccucccccagcggcagaagaagcagcagaccgucacgcugcugcccgccgccgaccucgacgacuucuccaagcagcugcagcagagcauguccagcgcggacuccacccagagcugaggacuaguuauaagacugacuagcccgaugggccucccaacgggcccuccuccccuccuugcaccgagauuaauaaaaaaaaaaaaaaaaaaaaaaaaaaaaaaaaaaaaaaaaaaaaaaaaaaaaaaaaaaaaaaaaugcaucccccccccccccccccccccccccccccccaaaggcucuuuucagagccaccagaauu

SEQ ID NO: 21127 - RNA, 1477 nt, Artificial Sequence
  SARS-CoV-2__MT786836.1__nucleocapsid protein (N) mRNA gc
aggagaaagcuuaccaugagcgacaacggcccccagaaccagcgcaacgccccgcggaucaccuucgggggccccuccgacagcaccggguccaaccagaacggcgagcgcagcggggcccgguccaagcagcgccggccccagggccugcccaacaacacggcgagcugguucaccgcccucacccagcacggcaaggaggaccugaaguucccgcgcgggcagggcgugcccaucaacaccaacuccagccccgacgaccagaucggguacuaccggcgcgccacgcggcgcauccggggcggggacggcaagaugaaggaccugagcccccgcugguacuucuacuaccucggcaccgggccggaggccggccugcccuacggggccaacaaggacggcaucaucugggucgcgaccgagggcgcccugaacacccccaaggaccacaucgggacgcggaaccccgccaacaacgccgcgaucgugcuccagcugccgcagggcaccacccugcccaagggguucuacgccgagggcucccgcgggggcucccaggccagcucccggagcuccagccgcucccggaacagcuccaagaacagcacccccggcagcucccgcgggacgagccccgcccggauggccggcaacgggggcgacgcggcccucgcccugcugcuccuggaccgccugaaccagcucgaguccaagaugagcgggaagggccagcagcagcagggccagaccgugaccaagaaguccgccgccgaggcgagcaagaagccgcggcagaagcgcaccgccacgaaggccuacaacgucacccaggccuucgggcgccggggccccgagcagacccaggggaacuucggcgaccaggagcugauccgccaggggaccgacuacaagcacuggccccagaucgcccaguucgcgcccuccgccagcgccuucuucggcaugucccggaucggcauggaggugacgccgagcgggaccuggcugaccuacaccggcgccaucaagcucgacgacaaggaccccaacuucaaggaccaggugauccugcugaacaagcacaucgacgccuacaagacguucccgcccaccgagcccaagaaggacaagaagaagaaggcggacgagacccaggcccucccccagcgccagaagaagcagcagaccgucacgcugcugcccgccgccgaccucgacgacuucuccaagcagcugcagcagagcauguccagcgcggacuccacccaggccugaggacuaguuauaagacugacuagcccgaugggccucccaacgggcccuccuccccuccuugcaccgagauuaauaaaaaaaaaaaaaaaaaaaaaaaaaaaaaaaaaaaaaaaaaaaaaaaaaaaaaaaaaaaaaaaaugcaucccccccccccccccccccccccccccccccaaaggcucuuuucagagccaccagaauu

SEQ ID NO: 21128 - RNA, 1477 nt, Artificial Sequence
  SARS-CoV-2__MT786839.1__nucleocapsid protein (N) mRNA gc
aggagaaagcuuaccaugagcgacaacggcccccagaaccagcgcaacgccccgcggaucaccuucgggggccccuccgacagcaccggguccaaccagaacggcgagcgcagcggggcccgguccaagcagcgccggccccagggccugcccaacaacacggcgagcugguucaccgcccucacccagcacggcaaggaggaccugaaguucccgcgcgggcagggcgugcccaucaacaccaacuccagccccgacgaccagaucggguacuaccggcgcgccacgcggcgcauccggggcggggacggcaagaugaaggaccugagcccccgcugguacuucuacuaccucggcaccgggccggaggccggccugcccuacggggccaacaaggacggcaucaucugggucgcgaccgagggcgcccugaacacccccaaggaccacaucgggacgcggaaccccgccaacaacgccgcgaucgugcuccagcugccgcagggcaccacccugcccaagggguucuacgccgagggcucccgcgggggcucccaggccagcucccggagcuccagccgcucccggaacagcucccgcaacagcacccccggcagcucccgggggaucagccccggccgcauggccgggaacggcggggacgccgcgcucgcccugcugcuccuggaccggcugaaccagcucgaguccaagaugagcggcaagggccagcagcagcaggggcagacggugaccaagaaguccgccgccgaggccagcaagaagccgcgccagaagcgcaccgcgaccaaggccuacaacgucacgcaggccuucggccggcgcgggcccgagcagacccagggcaacuucggggaccaggagcugauccggcagggcaccgacuacaagcacuggccccagaucgcccaguucgcccccuccgcgagcgccuucuucggcaugucccgcaucgggauggaggugaccccgagcggcacguggcugaccuacaccggggccaucaagcucgacgacaaggaccccaacuucaaggaccaggugauccugcugaacaagcacaucgacgccuacaagaccuucccgcccacggagcccaagaaggacaagaagaagaaggccgacgagacccaggcgcucccccagcggcagaagaagcagcagaccgucacccugcugcccgccgccgaccucgacgacuucuccaagcagcugcagcagagcauguccagcgccgacuccacgcaggcgugaggacuaguuauaagacugacuagcccgaugggccucccaacgggcccuccuccccuccuugcaccgagauuaauaaaaaaaaaaaaaaaaaaaaaaaaaaaaaaaaaaaaaaaaaaaaaaaaaaaaaaaaaaaaaaaaugcaucccccccccccccccccccccccccccccccaaaggcucuuuucagagccaccagaauu

SEQ ID NO: 21129 - RNA, 1477 nt, Artificial Sequence
  SARS-CoV-2__MT787500.1__nucleocapsid protein (N) mRNA gc
aggagaaagcuuaccaugagcgacaacggcccccagaaccagcgcaacgccccgcggaucaccuucgggggccccuccgacagcaccggguccaaccagaacggcgagcgcagcggggcccgguccaagcagcgccggccccagggccugcccaacaacacggcgagcugguucaccgcccucacccagcacggcaaggaggaccugaaguucccgcgcgggcagggcgugcccaucaacaccaacuccagccccgacgaccagaucggguacuaccggcgcgccacgcggcgcauccggggcggggacggcaagaugaaggaccugagcccccgcugguacuucuacuaccucggcaccgggccggaggccggccugcccuacggggccaacaaggacggcaucaucugggucgcgaccgagggcgcccugaacacccccaaggaccacaucgggacgcggaaccccgccaacaacgccgcgaucgugcuccagcugccgcagggcaccacccugcccaagggguucuacgccgagggcucccgcgggggcucccaggccagcucccggagcuccagccgcucccggaacagcuccaucaacagcacccccggcagcucccgcgggacgagccccgcccggauggccggcaacgggggcgacgcggcccucgcccugcugcuccuggaccgccugaaccagcucgaguccaagaugagcgggaagggccagcagcagcagggccagaccgugaccaagaaguccgccgccgaggcgagcaagaagccgcggcagaagcgcaccgccacgaaggccuacaacgucacccaggccuucgggcgccggggccccgagcagacccaggggaacuucggcgaccaggagcugauccgccaggggaccgacuacaagcacuggccccagaucgcccaguucgcgcccuccgccagcgccuucuucggcaugucccggaucggcauggaggugacgccgagcgggaccuggcugaccuacaccggcgccaucaagcucgacgacaaggaccccaacuucaaggaccaggugauccugcugaacaagcacaucgacgccuacaagacguucccgcccaccgagcccaagaaggacaagaagaagaaggcggacgagacccaggcccucccccagcgccagaagaagcagcagaccgucacgcugcugcccgccgccgaccucgacgacuucuccaagcagcugcagcagagcauguccagcgcggacuccacccaggccugaggacuaguuauaagacugacuagcccgaugggccucccaacgggcccuccuccccuccuugcaccgagauuaauaaaaaaaaaaaaaaaaaaaaaaaaaaaaaaaaaaaaaaaaaaaaaaaaaaaaaaaaaaaaaaaaugcaucccccccccccccccccccccccccccccccaaaggcucuuuucagagccaccagaauu

SEQ ID NO: 21130 - RNA, 1477 nt, Artificial Sequence
  SARS-CoV-2__MT787564.1__nucleocapsid protein (N) mRNA gc
aggagaaagcuuaccaugagcgacaacggcccccagaaccagcgcaacgccccgcggaucaccuucgggggccccuccgacagcaccggguccaaccagaacggcgagcgcagcggggcccgguccaagcagcgccggccccagggccugcccaacaacacggcgagcugguucaccgcccucacccagcacggcaaggaggaccugaaguucccgcgcgggcagggcgugcccaucaacaccaacuccagccccgacgaccagaucggguacuaccggcgcgccacgcggcgcauccggggcggggacggcaagaugaaggaccugagcccccgcugguacuucuacuaccucggcaccgggccggaggccggccugcccuacggggccaacaaggacggcaucaucugggucgcgaccgagggcgcccugaacacccccaaggaccacaucgggacgcggaaccccgccaacaacgccgcgaucgugcuccagcugccgcagggcaccacccugcccaagggguucuacgccgagggcucccgcgggggcucccaggccagcucccggagcuccagccgcucccggaacagcucccgcaacagcacccccggcagcuccaagcggacgagccccgcccgcauggccgggaacggcggggacgcggcccucgcccugcugcuccuggaccggcugaaccagcucgaguccaagaugagcggcaaggggcagcagcagcagggccagaccgugaccaagaaguccgccgccgaggcgagcaagaagccgcgccagaagcgcaccgccacgaaggccuacaacgucacccaggccuucggccggcgcgggcccgagcagacccagggcaacuucggggaccaggagcugauccggcagggcaccgacuacaaguacuggccccagaucgcccaguucgcgcccuccgccagcgccuucuucgggaugucccgcaucggcauggaggugacgccgagcggcaccuggcugaccuacaccggggccaucaagcucgacgacaaggaccccaacuucaaggaccaggugauccugcugaacaagcacaucgacgccuacaagacguucccgcccaccgagcccaagaaggacaagaagaagaaggcggacgagacccaggcccucccccagcggcagaagaagcagcagaccgucacgcugcugcccgccgccgaccucgacgacuucuccaagcagcugcagcagagcauguccagcgcggacuccacccaggccugaggacuaguuauaagacugacuagcccgaugggccucccaacgggcccuccuccccuccuugcaccgagauuaauaaaaaaaaaaaaaaaaaaaaaaaaaaaaaaaaaaaaaaaaaaaaaaaaaaaaaaaaaaaaaaaaugcaucccccccccccccccccccccccccccccccaaaggcucuuuucagagccaccagaauu

SEQ ID NO: 21131 - RNA, 1477 nt, Artificial Sequence
  SARS-CoV-2__MT789690.1__nucleocapsid protein (N) mRNA gc
aggagaaagcuuaccaugagcgacaacggcccccagaaccagcgcaacgccccgcggaucaccuucgggggccccuccgacagcaccggguccaaccagaacggcgagcgcagcggggcccgguccaagcagcgccggccccagggccugcccaacaacacggcgagcugguucaccgcccucacccagcacggcaaggaggaccugaaguucccgcgcgggcagggcgugcccaucaacaccaacuccagccccgacgaccagaucggguacuaccggcgcgccacgcggcgcauccggggcggggacggcaagaugaaggaccugagcccccgcugguacuucuacuaccucggcaccgggccggaggccggccugcccuacggggccaacaaggacggcaucaucugggucgcgaccgagggcgccuucaacacccccaaggaccacaucgggacgcggaaccccgccaacaacgccgcgaucgugcugcagcucccgcagggcaccacccugcccaagggguucuacgccgagggcagccgcgggggcucccaggccagcucccggagcuccagccgcucccggaacagccugcgcaacuccacccccggcagcagccgggggacgucccccgcccgcauggccggcaacgggggcgacgcggcccucgcccugcugcuccuggaccggcugaaccagcucgagagcaagauguccgggaagggccagcagcagcagggccagaccgugaccaagaaguccgccgccgaggcguccaagaagccgcgccagaagcgcaccgccacgaaggccuacaacgucacccaggccuucgggcggcgcggccccgagcagacccaggggaacuucggcgaccaggagcugauccggcaggggaccgacuacaagcacuggccccagaucgcccaguucgcgcccagcgccuccgccuucuucggcaugagccgcaucggcauggaggugacgccguccgggaccuggcugaccuacaccggcgccaucaagcucgacgacaaggaccccaacuucaaggaccaggugauccugcugaacaagcacaucgacgccuacaagacguucccgcccaccgagcccaagaaggacaagaagaagaaggcggacgagacccaggcccucccccagcggcagaagaagcagcagaccgucacgcugcugcccgccgccgaccucgacgacuucagcaagcagcugcagcaguccaugagcuccgcggacagcacccaggccugaggacuaguuauaagacugacuagcccgaugggccucccaacgggcccuccuccccuccuugcaccgagauuaauaaaaaaaaaaaaaaaaaaaaaaaaaaaaaaaaaaaaaaaaaaaaaaaaaaaaaaaaaaaaaaaaugcaucccccccccccccccccccccccccccccccaaaggcucuuuucagagccaccagaauu

SEQ ID NO: 21132 - RNA, 1477 nt, Artificial Sequence
  SARS-CoV-2__MT775831.1__nucleocapsid protein (N) mRNA gc
aggagaaagcuuaccaugagcgacaacggcccccagaaccagcgcaacgccccgcggaucaccuucgggggccccuccgacagcaccggguccaaccagaacggcgagcgcagcggggcccgguccaagcagcgccggccccagggccugcccaacaacacggcgagcugguucaccgcccucacccagcacggcaaggaggaccugaaguucccgcgcgggcagggcgugcccaucaacaccaacuccagccccgacgaccagaucggguacuaccggcgcgccacgcggcgcauccggggcggggacggcaagaugaaggaccugagcccccgcugguacuucuacuaccucggcaccgggccggaggccggccugcccuacggggccaacaaggacggcaucaucugggucgcgaccgagggcgcccugaacacccccaaggaccacaucgggacgcggaaccccgccaacaacgccgcgaucgugcuccagcugccgcagggcaccacccugcccaagggguucuacgccgagggcagccgcgggggcucccaggccagcucccggagcuccagccgcucccggaacagcucccgcaacagcacccccggcaacagcaagcggacgucccccgcccgcauggccgggaacggcggggacgcggcccucgcccugcugcuccuggaccggcugaaccagcucgagagcaagauguccggcaaggggcagcagcagcagggccagaccgugaccaagaaguccgccgccgaggcguccaagaagccgcgccagaagcgcaccgccacgaaggccuacaacgucacccaggccuucggccggcgcgggcccgagcagacccagggcaacuucggggaccaggagcugauccggcagggcaccgacuacaagcacuggccccagaucgcccaguucgcgcccagcgccuccgccuucuucgggaugagccgcaucggcauggaggugacgccguccggcaccuggcugaccuacaccggggccaucaagcucgacgacaaggaccccaacuucaaggaccaggugauccugcugaacaagcacaucgacgccuacaagacguucccgcccaccgagcccaagaaggacaagaagaagaaggcggacgagacccaggcccucccccagcggcagaagaagcagcagaccgucacgcugcugcccgccgccgaccucgacgacuucagcaagcagcugcagcaguccaugagcuccgcggacagcacccaggccugaggacuaguuauaagacugacuagcccgaugggccucccaacgggcccuccuccccuccuugcaccgagauuaauaaaaaaaaaaaaaaaaaaaaaaaaaaaaaaaaaaaaaaaaaaaaaaaaaaaaaaaaaaaaaaaaugcaucccccccccccccccccccccccccccccccaaaggcucuuuucagagccaccagaauu

SEQ ID NO: 21133 - RNA, 1477 nt, Artificial Sequence
  SARS-CoV-2__MT772427.1__nucleocapsid protein (N) mRNA gc
aggagaaagcuuaccaugagcgacaacggcccccagaaccagcgcaacgccccgcggaucaccuucgggggccccuccgacagcaccggguccaaccagaacggcgagcgcagcggggcccgguccaagcagcgccggccccagggccugcccaacaacacggcgagcugguucaccgcccucacccagcacggcaaggaggaccugaaguucccgcgcgggcagggcgugcccaucaacaccaacuccagccccgacgaccagaucggguacuaccggcgcgccacgcggcgcauccggggcggggacggcaagaugaaggaccugagcccccgcugguacuucuacuaccucggcaccgggccggaggccggccugcccuacggggccaacaaggacggcaucaucugggucgcgaccgagggcgcccugaacacccccaaggaccacaucgggacgcggaaccccgccaacaacgccgcgaucgugcuccagcugccgcagggcaccacccugcccaagggguucuacgccgagggcucccgcgggggcucccaggccagcucccggagcuccagccgcucccggaacagcucccgcaacagcacccccggcagcuccauggggacgagccccgcccggauggccggcaacgggggcgacgcggcccucgcccugcugcuccuggaccgccugaaccagcucgaguccaagaugagcgggaagggccagcagcagcagggccagaccgugaccaagaaguccgccgccgaggcgagcaagaagccgcggcagaagcgcaccgccacgaaggccuacaacgucacccaggccuucgggcgccggggccccgagcagacccaggggaacuucggcgaccaggagcugauccgccaggggaccgacuacaagcacuggccccagaucgcccaguucgcgcccuccgccagcgccuucuucggcaugucccggaucggcauggaggugacgccgagcgggaccuggcugaccuacaccggcgccaucaagcucgacgacaaggaccccaacuucaaggaccaggugauccugcugaacaagcacaucgacgccuacaagacguucccgcccaccgagcccaagaaggacaagaagaagaaggcggacgccacccaggcccucccccagcgccagaagaagcagcagaccgucacgcugcugcccgccgcggaccucgacgacuucuccaagcagcugcagcagagcauguccagcgccgacuccacccaggccugaggacuaguuauaagacugacuagcccgaugggccucccaacgggcccuccuccccuccuugcaccgagauuaauaaaaaaaaaaaaaaaaaaaaaaaaaaaaaaaaaaaaaaaaaaaaaaaaaaaaaaaaaaaaaaaaugcaucccccccccccccccccccccccccccccccaaaggcucuuuucagagccaccagaauu

SEQ ID NO: 21134 - RNA, 1477 nt, Artificial Sequence
  SARS-CoV-2__MT772433.1__nucleocapsid protein (N) mRNA gc
aggagaaagcuuaccaugagcgacaacggcccccagaaccagcgcaacgccccgcggaucaccuucgggggccccuccgacagcaccggguccaaccagaacguggagcgcagcggcgcccgguccaagcagcgccggccccaggggcugcccaacaacacggcgagcugguucaccgcccucacccagcacggcaaggaggaccugaaguucccgcgcggccaggggguccccaucaacaccaacuccagccccgacgaccagaucggcuacuaccggcgcgccacgcggcgcauccgcgggggcgacgggaagaugaaggaccugagcccccggugguacuucuacuaccucggcaccggcccggaggccgggcugcccuacggcgccaacaaggacgggaucaucuggguggcgaccgagggcgcccugaacacccccaaggaccacaucggcacgcggaaccccgccaacaacgccgcgaucgugcuccagcugccgcaggggaccacccugcccaagggcuucuacgccgaggggucccgcggcgggucccaggccagcucccggagcuccagccgcucccggaacagcucccgcaacagcacccccggcagcucccggggcacgagccccgcccgcauggccgggaacggcggggacgcggcccucgcccugcugcuccuggaccggcugaaccagcucgaguccaagaugagcggcaaggggcagcagcagcagggccagaccgucaccaagaaguccgccgccgaggcgagcaagaagccgcgccagaagcgcaccgccacgaaggccuacaacgugacccaggccuucggccggcgcgggcccgagcagacccagggcaacuucggggaccaggagcugauccggcagggcaccgacuacaagcacuggccccagaucgcccaguucgcgcccuccgccagcgccuucuucgggaugucccgcaucggcauggaggugacgccgagcggcaccuggcugaccuacaccggggccaucaagcucgacgacaaggaccccaacuucaaggaccaggucauccugcugaacaagcacaucgacgccuacaagacguucccgcccaccgagcccaagaaggacaagaagaagaaggcggacgagacccaggcccucccccagcggcagaagaagcagcagaccgugacgcugcugcccgccgccgaccucgacgacuucuccaagcagcugcagcagagcauguccagcgcggacuccacccaggccugaggacuaguuauaagacugacuagcccgaugggccucccaacgggcccuccuccccuccuugcaccgagauuaauaaaaaaaaaaaaaaaaaaaaaaaaaaaaaaaaaaaaaaaaaaaaaaaaaaaaaaaaaaaaaaaaugcaucccccccccccccccccccccccccccccccaaaggcucuuuucagagccaccagaauu

SEQ ID NO: 21135 - RNA, 1477 nt, Artificial Sequence
  SARS-CoV-2__MT766907.1__nucleocapsid protein (N) mRNA gc
aggagaaagcuuaccaugagcgacaacggcccccagaaccagcgcaacgccccgcggaucaccuucgggggccccuccgacagcaccggguccaaccagaacggcgagcgcagcggggcccgguccaagcagcgccggccccagggccugcccaacaacacggcgagcugguucaccgcccucacccagcacggcaaggaggaccugaaguucccgcgcgggcagggcgugcccaucaacaccaacuccagccccgacgaccagaucggguacuaccggcgcgccacgcggcgcauccggggcggggacggcaagaugaaggaccugagcccccgcugguacuucuacuaccucggcaccgggccggaggccggccugcccuacggggccaacaaggacggcaucaucugggucgcgaccgagggcgcccugaacacccccaaggaccacaucgggacgcggaaccccgccaacaacgccgcgaucgugcuccagcugccgcagggcaccacccugcccaagggguucuacgccgagggcagccgcgggggcucccaggccagcucccggagcuccagccgcucccggaacagcucccgcaacagcacccccggcgggagccggggcacgucccccgcccgcauggccgggaacggcggggacgcggcccucgcccugcugcuccuggaccggcugaaccagcucgagagcaagauguccggcaagggccagcagcagcaggggcagaccgugaccaagaaguccgccgccgaggcguccaagaagccgcgccagaagcgcaccgccacgaaggccuacaacgucacccaggccuucggccggcgcgggcccgagcagacccagggcaacuucggggaccaggagcugauccggcagggcaccgacuacaagcacuggccccagaucgcccaguucgcgcccagcgccuccgccuucuucggcaugagccgcaucgggauggaggugacgccguccggcaccuggcugaccuacaccggggccaucaagcucgacgacaaggaccccaacuucaaggaccaggugauccugcugaacaagcacaucgacgccuacaagacguucccgcccaccgagcccaagaaggacaagaagaagaaggcggacgagacccaggcccucccccagcggcagaagaagcagcagaccgucacgcugcugcccgccgccgaccucgacgacuucagcaagcagcugcagcaguccaugagcuccgcggacagcacccaggccugaggacuaguuauaagacugacuagcccgaugggccucccaacgggcccuccuccccuccuugcaccgagauuaauaaaaaaaaaaaaaaaaaaaaaaaaaaaaaaaaaaaaaaaaaaaaaaaaaaaaaaaaaaaaaaaaugcaucccccccccccccccccccccccccccccccaaaggcucuuuucagagccaccagaauu

SEQ ID NO: 21136 - RNA, 1477 nt, Artificial Sequence
  SARS-CoV-2__MT772085.1__nucleocapsid protein (N) mRNA gc
aggagaaagcuuaccaugagcgacaacggcccccagaaccagcgcaacgccccgcggaucaccuucgggggccccuccgacagcaccggguccaaccagaacggcgagcgcagcggggcccgguccaagcagcgccggccccagggccugcccaacaacacggcgagcugguucaccgcccucacccagcacggcaaggaggaccugaaguucccgcgcgggcagggcgugcccaucaacaccaacuccagccccgacgaccagaucggguacuaccggcgcgccacgcggcgcauccggggcggggacggcaagaugaaggaccugagcccccgcugguacuucuacuaccucggcaccgggccggaggccggccugcuguacggggccaacaaggacggcaucaucugggucgcgaccgagggcgcccucaacacccccaaggaccacaucgggacgcggaaccccgccaacaacgccgcgaucgugcugcagcugccccagggcaccacccucccgaagggguucuacgccgagggcucccgcgggggcucccaggccagcucccggagcuccagccgcucccggaacagcucccgcaacagcacccccggcagcucccgggggacgagccccgcccgcauggccggcaacgggggcgacgcggcccuggcccugcuccugcuggaccggcucaaccagcuggaguccaagaugagcgggaagggccagcagcagcagggccagaccgugaccaagaaguccgccgccgaggcgagcaagaagccccgccagaagcgcaccgccacgaaggccuacaacgucacccaggccuucgggcggcgcggcccggagcagacccaggggaacuucggcgaccaggagcugauccggcaggggaccgacuacaagcacuggccccagaucgcccaguucgcgcccuccgccagcgccuucuucggcaugucccgcaucggcauggaggugacgcccagcgggaccuggcucaccuacaccggcgccaucaagcuggacgacaaggacccgaacuucaaggaccaggugauccugcucaacaagcacaucgacgccuacaagacguucccgcccaccgagcccaagaaggacaagaagaagaaggcggacgagacccaggcccugccccagcggcagaagaagcagcagaccgucacgcugcuccccgccgccgaccuggacgacuucuccaagcagcugcagcagagcauguccagcgcggacuccacccaggccugaggacuaguuauaagacugacuagcccgaugggccucccaacgggcccuccuccccuccuugcaccgagauuaauaaaaaaaaaaaaaaaaaaaaaaaaaaaaaaaaaaaaaaaaaaaaaaaaaaaaaaaaaaaaaaaaugcaucccccccccccccccccccccccccccccccaaaggcucuuuucagagccaccagaauu

SEQ ID NO: 21137 - RNA, 1477 nt, Artificial Sequence
  SARS-CoV-2__MT758213.1__nucleocapsid protein (N) mRNA gc
aggagaaagcuuaccaugagcgacaacggcccccagaaccagcgcaacgccccgcggaucaccuucgggggccccuccgacagcaccggguccaaccagaacggcgagcgcagcggggcccgguccaagcagcgccggccccagggccugcccaacaacacggcgagcugguucaccgcccucacccagcacggcaaggaggaccugaaguucccgcgcgggcagggcgugcccaucaacaccaacuccagccccgacgaccagaucggguacuaccggcgcgccacgcggcgcauccggggcuccgacgggaagaugaaggaccugagcccccgcugguacuucuacuaccucggcaccggcccggaggccgggcugcccuacggcgccaacaaggacgggaucaucugggucgcgaccgagggcgcccugaacacccccaaggaccacaucggcacgcggaaccccgccaacaacgccgcgaucgugcuccagcugccgcaggggaccacccugcccaagggcuucuacgccgaggggucccgcggcgggagccaggccuccagccgguccagcucccgcagccggaacucccuccgcaacagcacccccggcagcucccggggcacgagccccgcccgcauggccgggaacggcggggacgcggcccuggcccugcuccugcuggaccggcucaaccagcuggaguccaagaugagcggcaaggggcagcagcagcagggccagaccgugaccaagaaguccgccgccgaggcgagcaagaagccgcgccagaagcgcaccgccacgaaggccuacaacgucacccaggccuucggccggcgcgggcccgagcagacccagggcaacuucggggaccaggagcugauccggcagggcaccgacuacaagcacuggccccagaucgcccaguucgcgcccuccgccagcgccuucuucgggaugucccgcaucggcauggaggugacgccgagcggcaccuggcucaccuacaccggggccaucaagcuggacgacaaggaccccaacuucaaggaccaggugauccugcucaacaagcacaucgacgccuacaagacguucccgcccaccgagcccaagaaggacaagaagaagaaggcggacgagacccaggcccugccccagcggcagaagaagcagcagaccgucacgcugcuccccgccgccgaccuggacgacuucuccaagcagcugcagcagagcauguccagcgcggacuccacccaggccugaggacuaguuauaagacugacuagcccgaugggccucccaacgggcccuccuccccuccuugcaccgagauuaauaaaaaaaaaaaaaaaaaaaaaaaaaaaaaaaaaaaaaaaaaaaaaaaaaaaaaaaaaaaaaaaaugcaucccccccccccccccccccccccccccccccaaaggcucuuuucagagccaccagaauu

SEQ ID NO: 21138 - RNA, 1477 nt, Artificial Sequence
  SARS-CoV-2__MT758471.1__nucleocapsid protein (N) mRNA gc
aggagaaagcuuaccaugagcgacaacggcccccagaaccagcgcaacgccccgcggaucaccuucgggggccccuccgacagcaccggguccaaccagaacggcgagcgcagcggggcccgguccaagcagcgccggccccagggccugcccaacaacacggcgagcugguucaccgcccucacccagcacggcaaggaggaccugaaguucccgcgcgggcagggcgugcccaucaacaccaacuccagccccgacgaccagaucggguacuaccggcgcgccacgcggcgcauccggggcggggacggcaagaugaaggaccugagcccccgcugguacuucuacuaccucggcaccgggccggaggccggccugcccuacggggccaacaaggacggcaucaucugggucgcgaccgagggcgcccugaacacccccaaggaccacaucgggacgcggaaccccgccaacaacgccgcgaucgugcuccagcugccgcagggcaccacccugcccaagggguucuacgccgagggcucccgcgggggcucccaggccagcucccggagcuccagccgcucccggaacagccuccgcaacuccacccccggcagcaaccgggggacgagccccgcccgcauggccggcaacgggggcgacgcggcccuggcccugcuccugcuggaccggcucaaccagcuggaguccaagaugagcgggaagggccagcagcagcagggccagaccgugaccaagaaguccgccgccgaggcgagcaagaagccgcgccagaagcgcaccgccacgaaggccuacaacgucacccaggccuucgggcggcgcggccccgagcagacccaggggaacuucggcgaccaggagcugauccggcaggggaccgacuacaagcacuggccccagaucgcccaguucgcgcccuccgccagcgccuucuucggcaugucccgcaucggcauggaggugacgccgagcgggaccuggcucaccuacaccggcgccaucaagcuggacgacaaggaccccaacuucaaggaccaggugauccugcucaacaagcacaucgacgccuacaagacguucccgcccaccgagcccaagaaggacaagaagaagaaggcggacgagacccaggcccugccccagcggcagaagaagcagcagaccgucacgcugcuccccgccgccgaccuggacgacuucuccaagcagcugcagcagagcauguccagcgcggacuccacccaggccugaggacuaguuauaagacugacuagcccgaugggccucccaacgggcccuccuccccuccuugcaccgagauuaauaaaaaaaaaaaaaaaaaaaaaaaaaaaaaaaaaaaaaaaaaaaaaaaaaaaaaaaaaaaaaaaaugcaucccccccccccccccccccccccccccccccaaaggcucuuuucagagccaccagaauu

SEQ ID NO: 21139 - RNA, 1477 nt, Artificial Sequence
  SARS-CoV-2__MT759844.1__nucleocapsid protein (N) mRNA gc
aggagaaagcuuaccaugagcgacaacggcccccagaaccagcgcaacgccccgcggaucaccuucgggggccccuccgacagcaccggguccaaccagaacggccagcgcagcggggcccgguccaagcagcgccggccccagggccugcccaacaacacggcgagcugguucaccgcccucacccagcacggcaaggaggaccugaaguucccgcgcgggcagggcgugcccaucaacaccaacuccagccccgacgaccagaucggguacuaccggcgcgccacgcggcgcauccggggcggggacggcaagaugaaggaccugagcccccgcugguacuucuacuaccucggcaccgggccggaggccggccugcccuacggggccaacaaggacggcaucaucugggucgcgaccgagggcgcccugaacacccccaaggaccacaucgggacgcggaaccccgccaacaacgccgcgaucgugcuccagcugccgcagggcaccacccugcccaagggguucuacgccgagggcucccgcgggggcucccaggccagcucccggagcuccagccgcucccggaacagcucccgcaacagcacccccggcagcucccgggggacgagccccgcccgcauggccggcaacgggggcgacgcggcccucgcccugcugcuccuggaccggcugaaccagcucgaguccaagaugagcgggaagggccagcagcagcagggccagaccgugaccaagaaguccgccgccgaggcgagcaagaagccgcgccagaagcgcaccgccacgaaggccuacaacgucacccaggccuucgggcggcgcggccccgagcagacccaggggaacuucggcgaccaggagcugauccggcaggggaccgacuacaagcacuggccccagaucgcccaguucgcgcccuccgccagcgccuucuucggcaugucccgcaucggcauggaggugacgccgagcgggaccuggcugaccuacaccggcgccaucaagcucgacgacaaggaccccaacuucaaggaccaggugauccugcugaacaagcacaucgacgccuacaagacguucccgcccaccgagcccaagaaggacaagaagaagaaggcggacgagacccaggcccucccccagcggcagaagaagcagcagaccgucacgcugcugcccgccgccgaccucgacgacuucuccaagcagcugcagcagagcauguccagcgcggacuccacccaggccugaggacuaguuauaagacugacuagcccgaugggccucccaacgggcccuccuccccuccuugcaccgagauuaauaaaaaaaaaaaaaaaaaaaaaaaaaaaaaaaaaaaaaaaaaaaaaaaaaaaaaaaaaaaaaaaaugcaucccccccccccccccccccccccccccccccaaaggcucuuuucagagccaccagaauu

SEQ ID NO: 21140 - RNA, 1477 nt, Artificial Sequence
  SARS-CoV-2__MT764180.1__nucleocapsid protein (N) mRNA gc
aggagaaagcuuaccaugagcgacaacggcccccagaaccagcgcaacgccccgcggaucaccuucgggggccccuccgacagcaccggguccaaccagaacggcgagcgcagcggggcccgguccaagcagcgccggccccagggccugcccaacaacacggcgagcugguucaccgcccucacccagcacggcaaggaggaccugaaguucccgcgcgggcagggcgugcccaucaacaccaacuccagccccgacgaccagaucggguacuaccggcgcgccacgcggcgcauccggggcggggacggcaagaugaaggaccugagcccccgcugguacuucuacuaccucggcaccgggccggaggccggccugcccuacggggccaacaaggacggcaucaucugggucgcgaccgagggcgcccugaacacccccaaggaccacaucgggacgcggaaccccgccaacaacgccgcgaucgugcuccagcugccgcagggcaccacccugcccaagggguucuacgccgagggcagccgcgggggcucccaggccagcucccggagcuccagccgcggccggaacuccagccgcaacuccacccccgggagcagccggggcacgucccccgcccgcauggccgggaacggcggggacgcggcccucgcccugcugcuccuggaccggcugaaccagcucgagagcaagauguccggcaagggccagcagcagcaggggcagaccgugaccaagaaguccgccgccgaggcguccaagaagccgcgccagaagcgcaccgccacgaaggccuacaacgucacccaggccuucggccggcgcgggcccgagcagacccagggcaacuucggggaccaggagcugauccggcagggcaccgacuacaagcacuggccccagaucgcccaguucgcgcccagcgccuccgccuucuucggcaugagccgcaucgggauggaggugacgccguccggcaccuggcugaccuacaccggggccaucaagcucgacgacaaggaccccaacuucaaggaccaggugauccugcugaacaagcacaucgacgccuacaagacguucccgcccaccgagcccaagaaggacaagaagaagaaggcggacgagacccaggcccucccccagcggcagaagaagcagcagaccgucacgcugcugcccgccgccgaccucgacgacuucagcaagcagcugcagcaguccaugagcuccgcggacagcacccaggccugaggacuaguuauaagacugacuagcccgaugggccucccaacgggcccuccuccccuccuugcaccgagauuaauaaaaaaaaaaaaaaaaaaaaaaaaaaaaaaaaaaaaaaaaaaaaaaaaaaaaaaaaaaaaaaaaugcaucccccccccccccccccccccccccccccccaaaggcucuuuucagagccaccagaauu

SEQ ID NO: 21141 - RNA, 1477 nt, Artificial Sequence
  SARS-CoV-2__MT755891.1__nucleocapsid protein (N) mRNA gc
aggagaaagcuuaccaugagcgacaacggcccccagaaccagcgcaacgccccgcggaucaccuucgggggccccuccgacagcaccggguccaaccagaacggcgagcgcagcggggcccgguccaagcagcgccggccccagggccugcccaacaacacggcgagcugguucaccgcccucacccagcacggcaaggaggaccugaaguucccgcgcgggcagggcgugcccaucaacaccaacuccagccccgacgaccagaucggguacuaccggcgcgccacgcggcgcauccggggcggggacggcaagaugaaggaccugagcccccgcugguacuucuacuaccucggcaccgggccggaggccggccugcccuacggggccaacaaggacggcaucaucugggucgcgaccgagggcgcccugaacacccccaaggaccacaucgggacgcggaaccccgccaacaacgccgcgaucgugcuccagcugccgcagggcaccacccugcccaagggguucuacgccgagggcagccgcgggggcucccaggccagcucccggagcuccagccgcucccggaacagccuccgcaacuccacccccggcagcagccgggggacgucccccgcccgcauggccggcaacgggggcgacgcggcccuggcccugcuccugcuggaccggcucaaccagcuggagagcaagauguccgggaagggccagcagcagcagggccagaccgugaccaagaaguccgccgccgaggcguccaagaagccgcgccagaagcgcaccgccacgaaggccuacaacgucacccaggccuucgggcggcgcggccccgagcagacccaggggaacuucggcgaccaggagcugauccggcaggggaccgacuacaagcacuggccccagaucgcccaguucgcgcccagcgccuccgccuucuucggcaugagccgcaucggcauggaggugacgccguccgggaccuggcucaccuacaccggcgccaucaagcuggacgacaaggaccccaacuucaaggaccaggugauccugcucaacaagcacaucgacgccuacaagacguucccgcccaccgagcccaagaaggacaagaagaagaaggcggacgagacccaggcccugcugcagcggcagaagaagcagcagaccgucacgcuccugcccgccgccgaccuggacgacuucagcaagcagcuccagcaguccaugagcuccgcggacagcacccaggccugaggacuaguuauaagacugacuagcccgaugggccucccaacgggcccuccuccccuccuugcaccgagauuaauaaaaaaaaaaaaaaaaaaaaaaaaaaaaaaaaaaaaaaaaaaaaaaaaaaaaaaaaaaaaaaaaugcaucccccccccccccccccccccccccccccccaaaggcucuuuucagagccaccagaauu

SEQ ID NO: 21142 - RNA, 1477 nt, Artificial Sequence
  SARS-CoV-2__MT757020.1__nucleocapsid protein (N) mRNA gc
aggagaaagcuuaccaugagcgacaacggcccccagaaccagcgcaacgccccgcggaucaccuucgggggccccuccgacagcaccggguccaaccagaacggcgagcgcagcggggcccgguccaagcagcgccggccccagggccugcccaacaacacggcgagcugguucaccgcccucacccagcacggcaaggaggaccugaaguucccgcgcgggcagggcgugcccaucaacaccaacuccagccccgacgaccagaucggguacuaccggcgcgccacgcggcgcauccggggcggggacggcaagaugaaggaccugagcccccgcugguacuucuacuaccucggcaccgggccggaggccggccugcccuacggggccaacaaggacggcaucaucugggucgcgaccgagggcgcccugaacacccccaaggaccacaucgggacgcggaaccccgccaacaacgccgcgaucgugcuccagcugccgcagggcaccacccugcccaagggguucuacgccgagggcucccgcgggggcucccaggccagcucccggagcuccagccgcucccggaacagcucccgcaacagcacccccggcagcucccgggggacgagccccgcccgcauggccggcaacgggggcgacgcggcccucgcccugcugcuccuggaccggcugaaccagcucgaguccaagaugagcgggaagggccagcagcagcagggccagaccgugaccaagaaguccgccgccgaggcgagcaagaagccgcgccagaagcgcaccgccacgaaggccuacaacgucacccaggccuucgggcggcgcggccccgagcagacccaggggaacuucggcgaccaggagcugauccggcaggggaccgacuacaagcacuggccccagaucgcccaguucgcgcccuccgccagcgccuucuucggcaugucccgcaucggcauggaggugacgccgagcgggaccuggcugaccuacaccggcgccaucaagcucgacgacaaggaccccaacuucaaggaccaggugauccugcugaacaagcacaucgacgccuacaagacguucccgcccaccgagcccaagaaggacaagaagaagaaggcggacgagacccaggcccucccccaccggcagaagaagcagcagaccgucacgcugcugcccgccgccgaccucgacgacuucuccaagcagcugcagcagagcauguccagcgcggacuccacccaggccugaggacuaguuauaagacugacuagcccgaugggccucccaacgggcccuccuccccuccuugcaccgagauuaauaaaaaaaaaaaaaaaaaaaaaaaaaaaaaaaaaaaaaaaaaaaaaaaaaaaaaaaaaaaaaaaaugcaucccccccccccccccccccccccccccccccaaaggcucuuuucagagccaccagaauu

SEQ ID NO: 21143 - RNA, 1477 nt, Artificial Sequence
  SARS-CoV-2__MT757085.1__nucleocapsid protein (N) mRNA gc
aggagaaagcuuaccaugagcgacaacggcccccagaaccagcgcaacgccccgcggaucaccuucgggggccccuccgacagcaccggguccaaccagaacggcgagcgcagcggggcccgguccaagcagcgccggccccagggccugcccaacaacacggcgagcugguucaccgcccucacccagcacggcaaggaggaccugaaguucccgcgcgggcagggcgugcccaucaacaccaacuccagccccgacgaccagaucggguacuaccggcgcgccacgcggcgcauccggggcggggacggcaagaugaaggaccugagcccccgcugguacuucuacuaccucggcaccgggccggaggccggccugcccuacggggccaacaaggacggcaucaucugggucgcgaccgagggcgcccugaacacccccaaggaccacaucgggacgcggaaccccgccaacaacgccgcgaucgugcuccagcugccgcagggcaccacccugcccaagggguucuacgccgagggcucccgcgggggcucccaggccagcucccggagcuccagccgcucccggaacagcucccgcaacagcacccccggcagcucccgggggacgagccccgcccgcauggccggcaacgggggcgacgcggcccucgcccugcugcuccuggaccggcugaaccagcucgaguccaagaugagcgggaagggccagcagcagcagggccagaccgugaccaagaaguccgccgccgaggcgagcaagaagccgcgccagaagcgcaccgccacgaaggccuacaacgucacccaggccuucgggcggcgcggccccgagcagacccaggggaacuucggcgaccaggagcugauccggcaggggaccgacuacaagcacuggccccagaucgcccaguucgcgcccuccgccagcgccuucuucggcaugucccgcaucggcauggaggugacgccgagcgggaccuggcugaccuacaccggcgccaucaagcucgacgacaaggaccccaacuucaaggaccaggugauccugcugaacaagcacaucgacgccuacaagacguucccgcccaccgagcccaagaaggacaagaagaagaaggcggacgagacccaggcccucccccagcggcagaagaagcagcagaccgucacgcugcugcccgccgccgaccucgacgacuucuccaagcagcugcagcagagcauguccagcgcggaccugacccaggccugaggacuaguuauaagacugacuagcccgaugggccucccaacgggcccuccuccccuccuugcaccgagauuaauaaaaaaaaaaaaaaaaaaaaaaaaaaaaaaaaaaaaaaaaaaaaaaaaaaaaaaaaaaaaaaaaugcaucccccccccccccccccccccccccccccccaaaggcucuuuucagagccaccagaauu

SEQ ID NO: 21144 - RNA, 1477 nt, Artificial Sequence
  SARS-CoV-2__MT757121.1__nucleocapsid protein (N) mRNA gc
aggagaaagcuuaccaugagcgacaacggcccccagaaccagcgcaacgccccgcggaucaccuucgggggccccuccgacagcaccggguccaaccagaacggcgagcgcagcggggcccgguccaagcagcgccggccccagggccugcccaacaacacggcgagcugguucaccgcccucacccagcacggcaaggaggaccugaaguucccgcgcgggcagggcgugcccaucaacaccaacuccagccccgacgaccagaucggguacuaccggcgcgccacgcggcgcauccggggcggggacggcaagaugaaggaccugagcccccgcugguacuucuacuaccucggcaccgggccggaggccggccugcccuacggggccaacaaggacggcaucaucugggucgcgaccgagggcgcccugaacacccccaaggaccacaucgggacgcggaaccccgccaacaacgccgcgaucgugcuccagcugccgcagggcaccacccugcccaagggguucuacgccgagggcucccgcgggggcucccaggccagcucccggagcuccagccgcucccggaacagcucccgcaacagcacccccggcagcuccaagcggacgagccccgcccgcauggccgggaacggcggggacgcggcccucgcccugcugcuccuggaccggcugaaccagcucgaguccaagaugagcggcaaggggcagcagcagcagggccagaccgugaccaagaaguccgccgccgaggcgagcaagaagccgcgccagaagcgcaccgccacgaaggccuacaacgucacccaggccuucggccggcgcgggcccgagcagacccagggcaacuucggggaccaggagcugacccggcagggcacggacuacaagcacuggccccagaucgcccaguucgcgcccuccgccagcgccuucuucgggaugucccgcaucggcauggaggugaccccgagcggcaccuggcugaccuacacgggggccaucaagcucgacgacaaggaccccaacuucaaggaccaggugauccugcugaacaagcacaucgacgccuacaagaccuucccgcccaccgagcccaagaaggacaagaagaagaaggcggacgagacccaggcccucccccagauccagaagaagcagcagacggucacccugcugcccgccgccgaccucgacgacuucuccaagcagcugcagcagagcauguccagcgcggacuccacccaggccugaggacuaguuauaagacugacuagcccgaugggccucccaacgggcccuccuccccuccuugcaccgagauuaauaaaaaaaaaaaaaaaaaaaaaaaaaaaaaaaaaaaaaaaaaaaaaaaaaaaaaaaaaaaaaaaaugcaucccccccccccccccccccccccccccccccaaaggcucuuuucagagccaccagaauu

SEQ ID NO: 21145 - RNA, 1477 nt, Artificial Sequence
  SARS-CoV-2__MT745605.1__nucleocapsid protein (N) mRNA gc
aggagaaagcuuaccaugagcgacaacggcccccagaaccagcgcaacgccccgcggaucaccuucgggggccccuccgacagcaccggguccaaccagaacggcgagcgcagcggggcccgguccaagcagcgccggccccagggccugcccaacaacacggcgagcugguucaccgcccucacccagcacggcaaggaggaccugaaguucccgcgcgggcagggcgugcccaucaacaccaacuccagccccgacgaccagaucggguacuaccggcgcgccacgcggcgcauccggggcggggacggcaagaugaaggaccugagcccccgcugguacuucuacuaccucggcaccgggccggaggccggccugcccuacggggccaacaaggacggcaucaucugggucgcgaccgagggcgcccugaacacccccaaggaccacaucgggacgcggaaccccgccaacaacgccgcgaucgugcuccagcugccgcagggcaccacccugcccaagggguucuacgccgagggcucccgcgggggcucccaggccagcucccggagcuccagccgcucccggaacagcucccgcaacagcacccccggcagcucccgggggacgagccccgcccgcauggccggcaacgggggcgacgcggcccucgcccugcugcuccuggaccggcugaaccagcucgaguccaagaugagcgggaagggccagcagcagcagggccagaccgugaccaagaaguccgccgccgaggcgagcaagaagccgcgccagaagcgcaccgccacgaaggccuacaacgucacccaggccuucgggcggcgcggccccgagcagacccaggggaacuucggcgaccaggagcugauccggcaggggaccgacuacaagcacuggccccagaucgcccaguucgcgcccuccgccagcgccuucuucggcaugucccgcaucggcauggaggugacgagcuccgggaccuggcugaccuacaccggcgccaucaagcucgacgacaaggacccgaacuucaaggaccaggugauccugcugaacaagcacaucgacgccuacaagacguucccgcccaccgagcccaagaaggacaagaagaagaaggcggacgagacccaggcccucccccagcggcagaagaagcagcagaccgucacgcugcugcccgccgccgaccucgacgacuucagcaagcagcugcagcaguccaugagcuccgcggacagcacccaggccugaggacuaguuauaagacugacuagcccgaugggccucccaacgggcccuccuccccuccuugcaccgagauuaauaaaaaaaaaaaaaaaaaaaaaaaaaaaaaaaaaaaaaaaaaaaaaaaaaaaaaaaaaaaaaaaaugcaucccccccccccccccccccccccccccccccaaaggcucuuuucagagccaccagaauu

SEQ ID NO: 21146 - RNA, 1477 nt, Artificial Sequence
  SARS-CoV-2__MT745658.1__nucleocapsid protein (N) mRNA gc
aggagaaagcuuaccaugagcgacaacggcccccagaaccagcgcaacgccccgcggaucaccuucgggggccccuccgacagcaccggguccaaccagaacggcgagcgcagcggggcccgguccaagcagcgccggccccagggccugcccaacaacacggcgagcugguucaccgcccucacccagcacggcaaggaggaccugaaguucccgcgcgggcagggcgugcccaucaacaccaacuccagccccgacgaccagaucggguacuaccggcgcgccacgcggcgcauccggggcggggacggcaagaugaaggaccugagcccccgcugguacuucuacuaccucggcaccgggccggaggccggccugcccuacggggccaacaaggacggcaucaucugggucgcgaccgagggcgcccugaacacccccaaggaccacaucgggacgcggaaccccgccaacaacgccgcgaucgugcuccagcugccgcagggcaccacccugcccaagggguucuacgccgagggcucccgcgggggcucccaggccagcucccggagcuccagccgcucccggaacagcucccgcaacagcacccccggcagcucccgggggacgagccccgcccgcauggccggcaacgggggcgacgcggcccucgcccugcugcuccuggaccggcugaaccagcucgaguccaagaucagcgggaagggccagcagcagcagggccagaccgugaccaagaaguccgccgccgaggcgagcaagaagccgcgccagaagcgcaccgccacgaaggccuacaacgucacccaggccuucgggcggcgcggccccgagcagacccaggggaacuucggcgaccaggagcugauccggcaggggaccgacuacaagcacuggccccagaucgcccaguucgcgcccuccgccagcgccuucuucggcaugucccgcaucggcauggaggugacgccgagcgggaccuggcugaccuacaucggcgccaucaagcucgacgacaaggaccccaacuucaaggaccaggugauccugcugaacaagcacaucgacgccuacaagaccuucccgcccacggagcccaagaaggacaagaagaagaaggcggacgagacccaggcccucccccagcggcagaagaagcagcagaccgucacccugcugcccgccgccgaccucgacgacuucuccaagcagcugcagcagagcauguccagcgcggacuccacgcaggccugaggacuaguuauaagacugacuagcccgaugggccucccaacgggcccuccuccccuccuugcaccgagauuaauaaaaaaaaaaaaaaaaaaaaaaaaaaaaaaaaaaaaaaaaaaaaaaaaaaaaaaaaaaaaaaaaugcaucccccccccccccccccccccccccccccccaaaggcucuuuucagagccaccagaauu

SEQ ID NO: 21147 - RNA, 1477 nt, Artificial Sequence
  SARS-CoV-2__MT745664.1__nucleocapsid protein (N) mRNA gc
aggagaaagcuuaccaugagcgacaacggcccccagaaccagcgcaacgccccgcggaucaccuucgggggccccuccgacagcaccggguccaaccagaacggcgagcgcagcggggcccgguccaagcagcgccggccccagggccugcccaacaacacggcgagcugguucaccgcccucacccagcacggcaaggaggaccugaaguucccgcgcgggcagggcgugcccaucaacaccaacuccagccccgacgaccagaucggguacuaccggcgcgccacgcggcgcauccggggcggggacggcaagaugaaggaccugagcccccgcugguacuucuacuaccucggcaccgggccggaggccggccugcccuacggggccaacaaggacggcaucaucugggucgcgaccgagggcgcccugaacacccccaaggaccacaucgggacgcggaaccccgccaacaacgccgcgaucgugcuccagcugccgcagggcaccacccugcccaagggguucuacgccgagggcucccgcgggggcucccaggccagcucccggagcuccagccgcucccggaacagcucccgcaacagcacccccggcagcuccaagcggacgagccccgcccgcauggccgggaacggcggggacgcggcccucgcccugcugcuccuggaccggcugaaccagcucgaguccaagaugagcggcaaggggcagcagcagcagggccagaccgugaccaagaaguccgccgccgaggcgagcaagaagccgcgccagaagcgcaccgccacgaaggccuacaacgucacccaggccuucggccggcgcgggcccgagcagacccagggcaacuucggggaccaggagcugauccggcagggcaccgacuacaagcacuggccccagaucgcccaguucgcgcccuccgccagcgccuucuucgggaugucccgcaucggcguggaggugacgccgagcggcaccuggcugaccuacaccggggccaucaagcucgacgacaaggaccccaacuucaaggaccaggucauccugcugaacaagcacaucgacgccuacaagacguucccgcccaccgagcccaagaaggacaagaagaagaaggcggacgagacccaggcccucccccagcggcagaagaagcagcagaccgugacgcugcugcccgccgccgaccucgacgacuucuccaagcagcugcagcagagcauguccagcgcggacuccacccaggccugaggacuaguuauaagacugacuagcccgaugggccucccaacgggcccuccuccccuccuugcaccgagauuaauaaaaaaaaaaaaaaaaaaaaaaaaaaaaaaaaaaaaaaaaaaaaaaaaaaaaaaaaaaaaaaaaugcaucccccccccccccccccccccccccccccccaaaggcucuuuucagagccaccagaauu

SEQ ID NO: 21148 - RNA, 1477 nt, Artificial Sequence
  SARS-CoV-2__MT745668.1__nucleocapsid protein (N) mRNA gc
aggagaaagcuuaccaugagcgacaacggcccccagaaccagcgcaacgcccugcggaucaccuucgggggcccguccgacagcaccggguccaaccagaacggcgagcgcagcggggcccgguccaagcagcgccggccccagggccuccccaacaacacggcgagcugguucaccgcccugacccagcacggcaaggaggaccugaaguucccccgcgggcagggcgugccgaucaacaccaacuccagccccgacgaccagaucggguacuaccggcgcgccacgcggcgcauccggggcggggacggcaagaugaaggaccucagcccccgcugguacuucuacuaccugggcaccgggcccgaggccggccugccguacggggccaacaaggacggcaucaucugggucgcgaccgagggcgcccucaacacccccaaggaccacaucgggacgcggaaccccgccaacaacgccgcgaucgugcugcagcugccccagggcaccacccucccgaagggguucuacgccgagggcagccgcgggggcucccaggccagcucccggagcuccagccgcucccggaacagcucccgcaaccugacccccggcagcagccgggggacgucccccgcccgcauggccggcaacgggggcgacgcggcccuggcccuccugcugcucgaccggcugaaccagcuggagagcaagauguccgggaagggccagcagcagcagggccagaccgugaccaagaaguccgccgccgaggcguccaagaagccccgccagaagcgcaccgccacgaaggccuacaacgucacccaggccuucgggcggcgcggcccggagcagacccaggggaacuucggcgaccaggagcucauccggcaggggaccgacuacaagcacuggccccagaucgcccaguucgcgcccagcgccuccgccuucuucggcaugagccgcaucggcauggaggugacgcccuccgggaccuggcugaccuacaccggcgccaucaagcuggacgacaaggacccgaacuucaaggaccaggugauccuccugaacaagcacaucgacgccuacaagacguucccgcccaccgagcccaagaaggacaagaagaagaaggcggacgagacccaggcccugccccagcggcagaagaagcagcagaccgucacgcuccugcccgccgccgaccuggacgacuucagcaagcagcuccagcaguccaugagcuccgcggacagcacccaggccugaggacuaguuauaagacugacuagcccgaugggccucccaacgggcccuccuccccuccuugcaccgagauuaauaaaaaaaaaaaaaaaaaaaaaaaaaaaaaaaaaaaaaaaaaaaaaaaaaaaaaaaaaaaaaaaaugcaucccccccccccccccccccccccccccccccaaaggcucuuuucagagccaccagaauu

SEQ ID NO: 21149 - RNA, 1477 nt, Artificial Sequence
  SARS-CoV-2__MT745678.1__nucleocapsid protein (N) mRNA gc
aggagaaagcuuaccaugagcgacaacggccugcagaaccagcgcaacgcgccccggaucaccuucgggggcccguccgacagcaccggguccaaccagaacggcgagcgcagcggggcccgguccaagcagcgccggccccagggccuccccaacaacacggccagcugguucaccgcccugacccagcacggcaaggaggaccugaaguucccccgcgggcagggcgugccgaucaacaccaacuccagccccgacgaccagaucggguacuaccggcgcgccacgcggcgcauccggggcggggacggcaagaugaaggaccucagcccccgcugguacuucuacuaccugggcaccgggcccgaggccggccugccguacggggccaacaaggacggcaucaucugggucgcgaccgagggcgcccucaacacccccaaggaccacaucgggacgcggaaccccgccaacaacgccgcgaucgugcugcagcugccccagggcaccacccucccgaagggguucuacgccgagggcagccgcgggggcucccaggccagcucccggagcuccagccgcucccggaacagcucccgcaacagcacccccggcagcucccgggggacgagccccgcccgcauggccggcaacgggggcgacgcggcccuggcccugcuccugcuggaccggcucaaccagcuggagcgcaagauguccgggaagggccagcagcagcagggccagaccgugaccaagaaguccgccgccgaggcguccaagaagccccgccagaagcggaccgccacgaaggccuacaacgucacccaggccuucgggcgccggggcccggagcagacccaggggaacuucggcgaccaggagcugauccgccaggggaccgacuacaagcacuggccccagaucgcccaguucgcgcccagcgccuccgccuucuucggcaugagccggaucggcauggaggugacgcccuccgggaccuggcucaccuacaccggcgccaucaagcuggacgacaaggacccgaacuucaaggaccaggugauccugcucaacaagcacaucgacgccuacaagacguucccgcccaccgagcccaagaaggacaagaagaagaaggcggacgagacccaggcccugccccagcgccagaagaagcagcagaccgucacgcugcuccccgccgccgaccuggacgacuucagcaagcagcugcagcaguccaugagcuccgcggacagcacccaggccugaggacuaguuauaagacugacuagcccgaugggccucccaacgggcccuccuccccuccuugcaccgagauuaauaaaaaaaaaaaaaaaaaaaaaaaaaaaaaaaaaaaaaaaaaaaaaaaaaaaaaaaaaaaaaaaaugcaucccccccccccccccccccccccccccccccaaaggcucuuuucagagccaccagaauu

SEQ ID NO: 21150 - RNA, 1477 nt, Artificial Sequence
  SARS-CoV-2__MT745697.1__nucleocapsid protein (N) mRNA gc
aggagaaagcuuaccaugagcgacaacggcccccagaaccagcgcaacgccccgcggaucaccuucgggggccccuccgacagcaccggguccaaccagaacggcgagcgcagcggggcccgguccaagcagcgccggccccagggccugcccaacaacacggcgagcugguucaccgcccucacccagcacggcaaggaggaccugaaguucccgcgcgggcacggcgugcccaucaacaccaacuccagccccgacgaccagaucggguacuaccggcgcgccacgcggcgcauccggggcggggacggcaagaugaaggaccugagcccccgcugguacuucuacuaccucggcaccgggccggaggccggccugcccuacggggccaacaaggacggcaucaucugggucgcgaccgagggcgcccugaacacccccaaggaccacaucgggacgcggaaccccgccaacaacgccgcgaucgugcuccagcugccgcagggcaccacccugcccaagggguucuacgccgagggcucccgcgggggcucccaggccagcucccggagcuccagccgcucccggaacagcucccgcaacagcacccccggcagcuccaagcggacgagccccgcccgcauggccgggaacggcggggacgcggcccucgcccugcugcuccuggaccggcugaaccagcucgaguccaagaugagcggcaaggggcagcagcagcagggccagaccgugaccaagaaguccgccgccgaggcgagcaagaagccgcgccagaagcgcaccgccacgaaggccuacaacgucacccaggccuucggccggcgcgggcccgagcagacccagggcaacuucggggaccaggagcugauccggcagggcaccgacuacaagcacuggccccagaucgcccaguucgcgcccuccgccagcgccuucuucgggaugucccgcaucggcauggaggugacgccgagcggcaccuggcugaccuacaccggggccaucaagcucgacgacaaggaccccaacuucaaggaccaggugauccugcugaacaagcacaucgacgccuacaagacguucccgcccaccgagcccaagaaggacaagaagaagaaggcggacgagacccaggcccucccccagcggcagaagaagcagcagaccgucacgcugcugcccgccgccgaccucgacgacuucuccaagcagcugcagcagagcauguccagcgcggacuccacccaggccugaggacuaguuauaagacugacuagcccgaugggccucccaacgggcccuccuccccuccuugcaccgagauuaauaaaaaaaaaaaaaaaaaaaaaaaaaaaaaaaaaaaaaaaaaaaaaaaaaaaaaaaaaaaaaaaaugcaucccccccccccccccccccccccccccccccaaaggcucuuuucagagccaccagaauu

SEQ ID NO: 21151 - RNA, 1477 nt, Artificial Sequence
  SARS-CoV-2__MT745698.1__nucleocapsid protein (N) mRNA gc
aggagaaagcuuaccaugagcgacaacggcccccagaaccagcgcaacgccccgcggaucaccuucgggggccccuccgacagcaccggguccaaccagaacggcgagcgcagcggggcccgguccaagcagcgccggccccagggccugcccaacaacacggcgagcugguucaccgcccucacccagcacggcaaggaggaccugaaguucccgcgcgggcagggcgugcccaucaacaccaacuccagccccgacgaccagaucggguacuaccggcgcgccacgcggcgcauccggggcggggacggcaagaugaaggaccugagcccccgcugguacuucuacuaccucggcaccgggccggaggccggccugcccuacggggccaacaaggacggcaucaucugggucgcgaccgagggcgcccugaacacccccaaggaccacaucgggacgcggaaccccgccaacaacgccgcgaucgugcuccagcugccgcagggcaccacccugcccaagggguucuacgccgagggcagccgcgggggcucccaggccagcucccgguucagcucccgcagccggaacuccagccgcaacuccacccccggcagcagccgggggacgucccccgcccgcauggccggcaacgggggcgacgcggcccucgcccugcugcuccuggaccggcugaaccagcucgagagcaagauguccgggaagggccagcagcagcagggccagaccgugaccaagaaguccgccgccgaggcguccaagaagccgcgccagaagcgcaccgccacgaaggccuacaacgucacccaggccuucgggcggcgcggccccgagcagacccaggggaacuucggcgaccaggagcugauccggcaggggaccgacuacaagcacuggccccagaucgcccaguucgcgcccagcgccuccgccuucuucggcaugagccgcaucggcauggaggugacgccguccgggaccuggcugaccuacaccggcgccaucaagcucgacgacaaggaccccaacuucaaggaccaggugauccugcugaacaagcacaucgacgccuacaagacguucccgcccaccgagcccaagaaggacaagaagaagaaggcggacgagacccaggcccucccccagcggcagaagaagcagcagaccgucacgcugcugcccgccgccgaccucgacgacuucagcaagcagcugcagcaguccaugagcuccgcggacagcacccaggccugaggacuaguuauaagacugacuagcccgaugggccucccaacgggcccuccuccccuccuugcaccgagauuaauaaaaaaaaaaaaaaaaaaaaaaaaaaaaaaaaaaaaaaaaaaaaaaaaaaaaaaaaaaaaaaaaugcaucccccccccccccccccccccccccccccccaaaggcucuuuucagagccaccagaauu

SEQ ID NO: 21152 - RNA, 1477 nt, Artificial Sequence
  SARS-CoV-2__MT750025.1__nucleocapsid protein (N) mRNA gc
aggagaaagcuuaccaugagcgacaacggcccccagaaccagcgcaacgccccgcggaucaccuucgggggccccuccgacagcaccggguccaaccagaacggcgagcgcagcggggcccgguccaagcagcgccggccccagggccugcccaacaacacggcgagcugguucaccgcccucacccagcacggcaaggaggaccugaaguucccgcgcgggcagggcgugcccaucaacaccaacuccagccccgacgaccagaucggguacuaccggcgcgccacgcggcgcauccggggcggggacggcaagaugaaggaccugagcccccgcugguacuucuacuaccucggcaccgggccggaggccggccugcccuacggggccaacaaggacggcaucaucugggucgcgaccgagggcgcccugaacacccccaaggaccacaucgggacgcggaaccccgccaacaacguggccaucgugcuccagcugccgcagggcaccacccugcccaagggguucuacgcggagggcucccgcgggggcucccaggccagcucccggagcuccagccgcucccggaacagcucccgcaacagcacccccggcagcucccgggggacgagccccgcccgcauggccggcaacgggggcgacgccgcgcucgcccugcugcuccuggaccggcugaaccagcucgaguccaagaugagcgggaagggccagcagcagcagggccagaccgucaccaagaaguccgccgccgaggccagcaagaagccgcgccagaagcgcaccgcgacgaaggccuacaacgugacccaggccuucgggcggcgcggccccgagcagacccaggggaacuucggcgaccaggagcugauccggcaggggaccgacuacaagcacuggccccagaucgcccaguucgcccccuccgcgagcgccuucuucggcaugucccgcaucggcauggaggugacgccgagcgggaccuggcugaccuacaccggcgccaucaagcucgacgacaaggaccccaacuucaaggaccaggucauccugcugaacaagcacaucgacgccuacaagacguucccgcccaccgagcccaagaaggacaagaagaagaaggccgacgagacccaggcgcucccccagcggcagaagaagcagcagaccgugacgcugcugcccgccgccgaccucgacgacuucuccaagcagcugcagcagagcauguccagcgccgacuccacccaggcgugaggacuaguuauaagacugacuagcccgaugggccucccaacgggcccuccuccccuccuugcaccgagauuaauaaaaaaaaaaaaaaaaaaaaaaaaaaaaaaaaaaaaaaaaaaaaaaaaaaaaaaaaaaaaaaaaugcaucccccccccccccccccccccccccccccccaaaggcucuuuucagagccaccagaauu

SEQ ID NO: 21153 - RNA, 1477 nt, Artificial Sequence
  SARS-CoV-2__MT750335.1__nucleocapsid protein (N) mRNA gc
aggagaaagcuuaccaugagcgacaacggcccccagaaccagcgcaacgccccgcggaucaccuucgggggccccuccgacagcaccggguccaaccagaacggcgagcgcagcggggcccgguccaagcagcgccggccccagggccugcccaacaacacggcgagcugguucaccgcccucacccagcacggcaaggaggaccugaaguucccgcgcgggcagggcgugcccaucaacaccaacuccagccccgacgaccagaucggguacuaccggcgcgccacgcggcgcauccggggcggggacggcaagaugaaggaccugagcccccgcugguacuucuacuaccucggcaccgggccggaggccggccugcccuacggggccaacaaggacggcaucaucugggucgcgaccgagggcgcccugaacacccccaaggaccacaucgggacgcggaaccccgccaacaacgccgcgaucgugcuccagcugccgcagggcaccacccugcccaagggguucuacgccgagggcucccgcgggggcucccaggccagcucccggagcuccagccgcucccggaacagcucccgcaacagcacccccggcagcuccaagcggacgagccccgggcgcauggccggcaacgggggcgacgccgcgcucgcccugcugcuccuggaccggcugaaccagcucgaguccaagaugagcgggaagggccagcagcagcagggccagaccgugaccaagaaguccgccgccgaggccagcaagaagccgcgccagaagcgcaccgcgacgaaggccuacaacgucacccaggccuucgggcggcgcggccccgagcagacccaggggaacuucggcgaccaggagcugauccggcaggggaccgacuacaagcacuggccccagaucgcccaguucgcccccuccgcgagcgccuucuucggcaugucccgcaucggcauggaggugacgccgagcgggaccuggcugaccuacaccggcgccaucaagcucgacgacaaggaccccaacuucaaggaccaggugauccugcugaacaagcacaucgacgccuacaagacguucccgcccaccgagcccaagaaggacaagaagaagaaggccgacgagacccaggcgcucccccagcggcagaagaagcagcagaccgucacgcugcugcccgccgccgaccucgacgacuucuccaagcagcugcagcagagcauguccagcgccgacuccacccaggcgugaggacuaguuauaagacugacuagcccgaugggccucccaacgggcccuccuccccuccuugcaccgagauuaauaaaaaaaaaaaaaaaaaaaaaaaaaaaaaaaaaaaaaaaaaaaaaaaaaaaaaaaaaaaaaaaaugcaucccccccccccccccccccccccccccccccaaaggcucuuuucagagccaccagaauu

SEQ ID NO: 21154 - RNA, 1477 nt, Artificial Sequence
  SARS-CoV-2__MT750358.1__nucleocapsid protein (N) mRNA gc
aggagaaagcuuaccaugagcgacaacggcccccagaaccagcgcaacgccccgcggaucaccuucgggggccccuccgacagcaccggguccaaccagaacggcgagcgcagcggggcccgguccaagcagcgccggccccagggccugcccaacaacacggcgagcugguucaccgcccucacccagcacggcaaggaggaccugaaguucccgcgcgggcagggcgugcccaucaacaccaacuccagccccgacgaccagaucggguacuaccggcgcgccacgcggcgcauccggggcggggacggcaagaugaaggaccugagcccccgcugguacuucuacuaccucggcaccgggccggaggccggccugcccuacggggccaacaaggacggcaucaucugggucgcgaccgagggcgcccugaacacccccaaguaccacaucgggacgcggaaccccgccaacaacgccgcgaucgugcuccagcugccgcagggcaccacccugcccaagggguucuacgccgagggcucccgcgggggcucccaggccagcucccggagcuccagccgcucccggaacagcucccgcaacagcacccccggcagcucccgggggacgagccccgcccgcauggccggcaacgggggcgacgcggcccucgcccugcugcuccuggaccggcugaaccagcucgaguccaagaugagcgggaagggccagcagcagcagggccagaccgugaccaagaaguccgccgccgaggcgagcaagaagccgcgccagaagcgcaccgccacgaaggccuacaacgucacccaggccuucgggcggcgcggccccgagcagacccaggggaacuucggcgaccaggagcugauccggcaggggaccgacuacaagcacuggccccagaucgcccaguucgcgcccuccgccagcgccuucuucggcaugucccgcaucggcauggaggugacgccgagcgggaccuggcugaccuacaccggcgccaucaagcucgacgacaaggaccccaacuucaaggaccaggugauccugcugaacaagcacaucgacgccuacaagacguucccgcccaccgagcccaagaaggacaagaagaagaaggcggacgagacccaggcccucccccagcggcagaagaagcagcagaccgucacgcugcugcccgccgccgaccucgacgacuucuccaagcagcugcagcagagcauguccagcgcggacuccacccaggccugaggacuaguuauaagacugacuagcccgaugggccucccaacgggcccuccuccccuccuugcaccgagauuaauaaaaaaaaaaaaaaaaaaaaaaaaaaaaaaaaaaaaaaaaaaaaaaaaaaaaaaaaaaaaaaaaugcaucccccccccccccccccccccccccccccccaaaggcucuuuucagagccaccagaauu

SEQ ID NO: 21155 - RNA, 1477 nt, Artificial Sequence
  SARS-CoV-2__MT750385.1__nucleocapsid protein (N) mRNA gc
aggagaaagcuuaccaugagcgacaacggcccccagaaccagcgcaacgccccgcggaucaccuucgggggccccuccgacagcaccggguccaaccagaacggcgagcgcagcggggcccgguccaagcagcgccggccccagggccugcccaacaacacggcgagcugguucaccgcccucacccagcacggcaaggaggaccugaaguucccgcgcgggcagggcgugcccaucaacaccaacuccagccccgacgaccagaucggguacuaccggcgcgccacgcggcgcauccggggcggggacggcaagaugaaggaccugagcccccgcugguacuucuacuaccucggcaccgggccggaggccggccugcccuacggggccaacaaggacggcaucaucugggucgcgaccgagggcgcccugaacacccccaaggaccacaucgggacgcggaaccccgccaacaacgccgcgaucgugcuccagcugccgcagggcaccacccugcccaagggguucuacgccgagggcucccgcgggggcucccaggccagcucccggagcuccagccgcucccggaacagcucccgcaacagcacccccggcagcucccgggggacgagccccgcccgcauggccggcaacgggggcgacgcggcccucgcccugcugcuccuggaccggcugaaccagcucgaguccaagaugagcgggaagggccagcagcagcagggccagaccgugaccaagaaguccgccgccgaggcgagcaagaagccgcgccagaagcgcaccgccacgaaggccuacaacgucacccaggccuucgggcggcgcggccccgagcagacccaggggaacuucggcgaccaggagcugauccggcaggggaccgacuacaagcacuggccccagaucgcccaguucgcgcccuccgccagcgccuucuucggcaugucccgcaucggcauggaggugacgccgagcgggaccuggcugaccuacaccggcgccaucaagcucgacgacaaggaccccaacuucaaggaccaggugauccugcugaacaagcacaucgacgccuacaagacguucccgcccaccgagcccaagaaguacaagaagaagaaggcggacgagacccaggcccucccccagcggcagaagaagcagcagaccgucacgcugcugcccgccgccgaccucgacgacuucuccaagcagcugcagcagagcauguccagcgcggacuccacccaggccugaggacuaguuauaagacugacuagcccgaugggccucccaacgggcccuccuccccuccuugcaccgagauuaauaaaaaaaaaaaaaaaaaaaaaaaaaaaaaaaaaaaaaaaaaaaaaaaaaaaaaaaaaaaaaaaaugcaucccccccccccccccccccccccccccccccaaaggcucuuuucagagccaccagaauu

SEQ ID NO: 21156 - RNA, 1477 nt, Artificial Sequence
  SARS-CoV-2__MT750413.1__nucleocapsid protein (N) mRNA gc
aggagaaagcuuaccaugagcgacaacggcccccagaaccagcgcaacgccccgcggaucaccuucgggggccccuccgacagcaccggguccaaccagaacggcgagcgcagcggggcccgguccaagcagcgccggccccagggccugcccaacaacacggcgagcugguucaccgcccucacccagcacggcaaggaggaccugaaguucccgcgcgggcagggcgugcccaucaacaccaacuccagccccgacgaccagaucggguacuaccggcgcgccacgcggcgcauccggggcggggacggcaagaugaaggaccugagcccccgcugguacuucuacuaccucggcaccgggccggaggccggccugcccuacggggccaacaaggacggcaucaucugggucgcgaccgagggcgcccugaacacccccaaggaccacaucgggacgcggaaccccgccaacaacgccagcaucgugcuccagcugccgcagggcaccacccugcccaagggguucuacgcggagggcucccgcgggggcagccaggccuccagccgguccagcucccgcagccggaacuccagccgcaacagcacccccggcuccagcaagcggacgucccccgcccgcauggccgggaacggcggggacgccgcgcucgcccugcugcuccuggaccggcugaaccagcucgagagcaagauguccggcaaggggcagcagcagcagggccagaccgugaccaagaaguccgccgccgaggccuccaagaagccgcgccagaagcgcaccgcgacgaaggccuacaacgucacccaggccuucggccggcgcgggcccgagcagacccagggcaacuucggggaccaggagcugauccggcagggcaccgacuacaagcacuggccccagaucgcccaguucgcccccagcgcguccgccuucuucgggaugagccgcaucggcauggaggugacgccguccggcaccuggcugaccuacaccggggccaucaagcucgacgacaaggaccccaacuucaaggaccaggugauccugcugaacaagcacaucgacgccuacaagacguucccgcccaccgagcccaagaaggacaagaagaagaaggccgacgagacccaggcgcucccccagcggcagaagaagcagcagaccgucacgcugcugcccgccgccgaccucgacgacuucagcaagcagcugcagcaguccaugagcuccgccgacagcacccaggcgugaggacuaguuauaagacugacuagcccgaugggccucccaacgggcccuccuccccuccuugcaccgagauuaauaaaaaaaaaaaaaaaaaaaaaaaaaaaaaaaaaaaaaaaaaaaaaaaaaaaaaaaaaaaaaaaaugcaucccccccccccccccccccccccccccccccaaaggcucuuuucagagccaccagaauu

SEQ ID NO: 21157 - RNA, 1477 nt, Artificial Sequence
  SARS-CoV-2__MT750418.1__nucleocapsid protein (N) mRNA gc
aggagaaagcuuaccaugagcgacaacggcccccagaaccagcgcaacgccccgcggaucaccuucgggggccccuccgacagcaccggguccaaccagaacggcgagcgcagcggggcccgguccaagcagcgccggccccagggccugcccaacaacacggcgagcugguucaccgcccucacccagcacggcaaggagaaccugaaguucccgcgcgggcagggcgugcccaucaacaccaacuccagccccgacgaccagaucggguacuaccggcgcgccacgcggcgcauccggggcggggacggcaagaugaaggaccugagcccccgcugguacuucuacuaccucggcaccgggccggaggccggccugcccuacggggccaacaaggacggcaucaucugggucgcgaccgagggcgcccugaacacccccaaggaccacaucgggacgcggaaccccgccaacaacgccgcgaucgugcuccagcugccgcagggcaccacccugcccaagggguucuacgccgagggcagccgcgggggcucccaggccagcucccggagcuccagccgcucccggaacagcucccgcagcagcacccccggcuccagccgggggacgucccccgcccgcauggccggcaacgggggcgacgcggcccucgcccugcugcuccuggaccggcugaaccagcucgagagcaagauguccgggaagggccagcagcagcagggccagaccgugaccaagaaguccgccgccgaggcguccaagaagccgcgccagaagcgcaccgccacgaaggccuacaacgucacccaggccuucgggcggcgcggccccgagcagacccaggggaacuucggcgaccaggagcugauccggcaggggaccgacuacaagcacuggccccagaucgcccaguucgcgcccagcgccuccgccuucuucggcaugagccgcaucggcauggaggugacgccguccgggaccuggcugaccuacaccggcgccaucaagcucgacgacaaggaccccaacuucaaggaccaggugauccugcugaacaagcacaucgacgccuacaagacguucccgcccaccgagcccaagaaguacaagaagaagaaggcggacgagacccaggcccucccccagcggcagaagaagcagcagaccgucacgcugcugcccgccgccgaccucgacgacuucagcaagcagcugcagcaguccaugagcuccgcggacagcacccaggccugaggacuaguuauaagacugacuagcccgaugggccucccaacgggcccuccuccccuccuugcaccgagauuaauaaaaaaaaaaaaaaaaaaaaaaaaaaaaaaaaaaaaaaaaaaaaaaaaaaaaaaaaaaaaaaaaugcaucccccccccccccccccccccccccccccccaaaggcucuuuucagagccaccagaauu

SEQ ID NO: 21158 - RNA, 1477 nt, Artificial Sequence
  SARS-CoV-2__MT740401.1__nucleocapsid protein (N) mRNA gc
aggagaaagcuuaccaugagcgacaacggcccccagaaccagcgcuccgccccgcggaucaccuucgggggccccagcgacuccaccgggagcaaccagaacggcgagcgcuccggggcccggagcaagcagcgccggccccagggccugcccaacaacacggcguccugguucaccgcccucacccagcacggcaaggaggaccugaaguucccgcgcgggcagggcgugcccaucaacaccaacagcucccccgacgaccagaucggguacuaccggcgcgccacgcggcgcauccggggcggggacggcaagaugaaggaccugagcccccgcugguacuucuacuaccucggcaccgggccggaggccggccugcccuacggggccaacaaggacggcaucaucugggucgcgaccgagggcgcccugaacacccccaaggaccacaucgggacgcggaaccccgccaacaacgccgcgaucgugcuccagcugccgcagggcaccacccugcccaagggguucuacgccgagggcucccgcgggggcagccaggccuccagccgguccagcucccgcagccggaacuccagccgcaacagcacccccggcuccagcaagcggacgucccccgcccgcauggccgggaacggcggggacgcggcccucgcccugcugcuccuggaccggcugaaccagcucgagagcaagauguccggcaaggggcagcagcagcagggccagaccgugaccaagaaguccgccgccgaggcgagcaagaagccgcgccagaagcgcaccgccacgaaggccuacaacgucacccaggccuucggccggcgcgggcccgagcagacccagggcaacuucggggaccaggagcugauccggcagggcaccgacuacaagcacuggccccagaucgcccaguucgcgcccagcgccuccgccuucuucgggaugagccgcaucggcauggaggugacgccguccggcaccuggcugaccuacaccggggccaucaagcucgacgacaaggaccccaacuucaaggaccaggugauccugcugaacaagcacaucgacgccuacaagacguucccgcccaccgagcccaagaaggacaagaagaagaaggcggacgagacccaggcccucccccagcggcagaagaagcagcagaccgucacgcugcugcccgccgccgaccucgacgacuucagcaagcagcugcagcaguccaugagcuccgcggacagcacccaggccugaggacuaguuauaagacugacuagcccgaugggccucccaacgggcccuccuccccuccuugcaccgagauuaauaaaaaaaaaaaaaaaaaaaaaaaaaaaaaaaaaaaaaaaaaaaaaaaaaaaaaaaaaaaaaaaaugcaucccccccccccccccccccccccccccccccaaaggcucuuuucagagccaccagaauu

SEQ ID NO: 21159 - RNA, 1477 nt, Artificial Sequence
  SARS-CoV-2__MT740431.1__nucleocapsid protein (N) mRNA gc
aggagaaagcuuaccaugagcuacaacggcccccagaaccagcgcaacgccccgcggaucaccuucgggggccccuccgacagcaccggguccaaccagaacggcgagcgcagcggggcccgguccaagcagcgccggccccagggccugcccaacaacacggcgagcugguucaccgcccucacccagcacggcaaggaggaccugaaguucccgcgcgggcagggcgugcccaucaacaccaacuccagccccgacgaccagaucggguacuaccggcgcgccacgcggcgcauccggggcggggacggcaagaugaaggaccugagcccccgcugguacuucuacuaccucggcaccgggccggaggccggccugcccuacggggccaacaaggacggcaucaucugggucgcgaccgagggcgcccugaacacccccaaggaccacaucgggacgcggaaccccgccaacaacgccgcgaucgugcuccagcugccgcagggcaccacccugcccaagggguucuacgccgagggcucccgcgggggcucccaggccagcucccggagcuccagccgcucccggaacagcucccgcaacagcacccccggcagcuccaagcggacgagccccgcccgcauggccgggaacggcggggacgcggcccucgcccugcugcuccuggaccggcugaaccagcucgaguccaagaugagcggcaaggggcagcagcagcagggccagaccgugaccaagaaguccgccgccgaggcgagcaagaagccgcgccagaagcgcaccgccacgaaggccuacaacgucacccaggccuucggccggcgcgggcccgagcagacccagggcaacuucggggaccaggagcugauccggcagggcaccgacuacaagcacuggccccagaucgcccaguucgcgcccuccgccagcgccuucuucgggaugucccgcaucggcauggaggugacgccgagcggcaccuggcugaccuacaccggggccaucaagcucgacgacaaggaccccaacuucaaggaccaggugauccugcugaacaagcacaucgacgccuacaagacguucccgcccaccgagcccaagaaggacaagaagaagaaggcggacgagacccaggcccucccccagcggcagaagaagcagcagaccgucacgcugcugcccgccgccgaccucgacgacuucuccaagcagcugcagcagagcauguccagcgcggacuccacccaggccugaggacuaguuauaagacugacuagcccgaugggccucccaacgggcccuccuccccuccuugcaccgagauuaauaaaaaaaaaaaaaaaaaaaaaaaaaaaaaaaaaaaaaaaaaaaaaaaaaaaaaaaaaaaaaaaaugcaucccccccccccccccccccccccccccccccaaaggcucuuuucagagccaccagaauu

SEQ ID NO: 21160 - RNA, 1477 nt, Artificial Sequence
  SARS-CoV-2__MT740438.1__nucleocapsid protein (N) mRNA gc
aggagaaagcuuaccaugagcgacaacggcccccagaaccagcgcaacgccccgcggaucaccuucgggggccccuccgacagcaccggguccaaccagaacggcgagcgcagcugggcccgguccaagcagcgccggccccaggggcugcccaacaacacggcgagcugguucaccgcccucacccagcacggcaaggaggaccugaaguucccgcgcggccagggggugcccaucaacaccaacuccagccccgacgaccagaucggcuacuaccggcgcgccacgcggcgcauccgcgggggcgacgggaagaugaaggaccugagcccccggugguacuucuacuaccucggcaccggcccggaggccgggcugcccuacggcgccaacaaggacgggaucaucugggucgcgaccgagggcgcccugaacacccccaaggaccacaucggcacgcggaaccccgccaacaacgccgcgaucgugcuccagcugccgcaggggaccacccugcccaagggcuucuacgccgaggggucccgcggcgggucccaggccagcucccggagcuccagccgcucccggaacagcucccgcaacagcacccccggcagcucccggggcacgagccccgcccgcauggccgggaacggcggggacgcggcccucgcccugcugcuccuggaccggcugaaccagcucgaguccaagaugagcggcaaggggcagcagcagcagggccagaccgugaccaagaaguccgccgccgaggcgagcaagaagccgcgccagaagcgcaccgccacgaaggccuacaacgucacccaggccuucggccggcgcgggcccgagcagacccagggcaacuucggggaccaggagcugauccggcagggcaccgacuacaagcacuggccccagaucgcccaguucgcgcccuccgccagcgccuucuucgggaugucccgcaucggcauggaggugacgccgagcggcaccuggcugaccuacaccggggccaucaagcucgacgacaaggaccccaacuucaaggaccaggugauccugcugaacaagcacaucgacgccuacaagacguucccgcccaccgagcccaagaaggacaagaagaagaaggcggacgagacccaggcccucccccagcggcagaagaagcagcagaccgucacgcugcugcccgccgccgaccucgacgacuucuccaagcagcugcagcagagcauguccagcgcggacuccacccaggccugaggacuaguuauaagacugacuagcccgaugggccucccaacgggcccuccuccccuccuugcaccgagauuaauaaaaaaaaaaaaaaaaaaaaaaaaaaaaaaaaaaaaaaaaaaaaaaaaaaaaaaaaaaaaaaaaugcaucccccccccccccccccccccccccccccccaaaggcucuuuucagagccaccagaauu

SEQ ID NO: 21161 - RNA, 1477 nt, Artificial Sequence
  SARS-CoV-2__MT740444.1__nucleocapsid protein (N) mRNA gc
aggagaaagcuuaccaugagcgacaacggcccccagaaccagcgcaacgccccgcggaucaccuucgggggccccuccgacagcaccggguccaaccagaacggcgagcgcagcggggcccgguccaagcagcgccggccccagggccugcccaacaacacggcgagcugguucaccgcccucacccagcacggcaaggaggaccugaaguucccgcgcgggcagggcgugcccaucaacaccaacuccagccccgacgaccagaucggguacuaccggcgcgccacgcggcgcauccggggcggggacggcaagaugaaggaccugagcccccgcugguacuucuacuaccucggcaccgggccggaggccggccugcccuacggggccaacaaggacggcaucaucugggucgcgaccgagggcgcccugaacacccccaaggaccacaucgggacgcggaaccccgccaacaacgccuccaucgugcuccagcugccgcagggcaccacccugcccaagggguucuacgcggagggcucccgcgggggcagccaggccuccagccgguccagcucccgcagccggaacucccuccgcaacagcacccccggcagcucccgggggacgagccccgcccgcauggccggcaacgggggcgacgccgcgcuggcccugcuccugcuggaccggcucaaccagcuggaguccaagaugagcgggaagggccagcagcagcagggccagaccgugaccaagaaguccgccgccgaggccagcaagaagccgcgccagaagcgcaccgcgacgaaggccuacaacgucacccaggccuucgggcggcgcggccccgagcagacccaggggaacuucggcgaccaggagcugauccggcaggggaccgacuacaagcacuggccccagaucgcccaguucgcccccuccgcgagcgccuucuucggcaugucccgcaucggcauggaggugacgccgagcgggaccuggcucaccuacaccggcgccaucaagcuggacgacaaggaccccaacuucaaggaccaggugauccugcucaacaagcacaucgacgccuacaagacguucccgcccaccgagcccaagaaggacaagaagaagaaggccgacgagacccaggcgcugccccagcggcagaagaagcagcagaccgucacgcugcuccccgccgccgaccuggacgacuucuccaagcagcugcagcagagcauguccagcgccgacuccacccaggcgugaggacuaguuauaagacugacuagcccgaugggccucccaacgggcccuccuccccuccuugcaccgagauuaauaaaaaaaaaaaaaaaaaaaaaaaaaaaaaaaaaaaaaaaaaaaaaaaaaaaaaaaaaaaaaaaaugcaucccccccccccccccccccccccccccccccaaaggcucuuuucagagccaccagaauu

SEQ ID NO: 21162 - RNA, 1477 nt, Artificial Sequence
  SARS-CoV-2__MT731669.1__nucleocapsid protein (N) mRNA gc
aggagaaagcuuaccaugagcgacaacggcccccagaaccagcgcaacgccccgcggaucaccuucgggggccccuccgacagcaccggguccaaccagaacggcgagcgcagcggggcccgguccaagcagcgccggccccagggccugcccaacaacacggcgagcugguucaccgcccucacccagcacggcaaggaggaccugaaguucccgcgcgggcagggcgugcccaucaacaccaacuccagccccgacgaccagaucggguacuaccggcgcgccacgcggcgcauccggggcggggacggcaagaugaaggaccugagcccccgcugguacuucuacuaccucggcaccgggccggaggccggccugcccuacggggccaacaaggacggcaucaucugggucgcgaccgagggcgcccugaacacccccaaggaccacaucgggacgcggaaccccuccaacaacgccgccaucgugcuccagcugccgcagggcaccacccugcccaagggguucuacgcggagggcucccgcgggggcagccaggccuccagccgguccagcucccgcagccggaacucccuccgcaacagcacccccggcagcucccgggggacgagccccgcccgcauggccggcaacgggggcgacgccgcgcuggcccugcuccugcuggaccggcucaaccagcuggaguccaagaugagcgggaagggccagcagcagcagggccagaccgugaccaagaaguccgccgccgaggccagcaagaagccgcgccagaagcgcaccgcgacgaaggccuacaacgucacccaggccuucgggcggcgcggccccgagcagacccaggggaacuucggcgaccaggagcugauccggcaggggaccgacuacaagcacuggccccagaucgcccaguucgcccccuccgcgagcgccuucuucggcaugucccgcaucggcauggaggugacgccgagcgggaccuggcucaccuacaccggcgccaucaagcuggacgacaaggaccccaacuucaaggaccaggugauccugcucaacaagcacaucgacgccuacaagacguucccgcccaccgagcccaagaaggacaagaagaagaaggccgacgagacccaggcgcugccccagcggcagaagaagcagcagaccgucacgcugcuccccgccgccgaccuggacgacuucuccaagcagcugcagcagagcauguccagcgccgacuccacccaggcgugaggacuaguuauaagacugacuagcccgaugggccucccaacgggcccuccuccccuccuugcaccgagauuaauaaaaaaaaaaaaaaaaaaaaaaaaaaaaaaaaaaaaaaaaaaaaaaaaaaaaaaaaaaaaaaaaugcaucccccccccccccccccccccccccccccccaaaggcucuuuucagagccaccagaauu

SEQ ID NO: 21163 - RNA, 1477 nt, Artificial Sequence
  SARS-CoV-2__MT712859.1__nucleocapsid protein (N) mRNA gc
aggagaaagcuuaccaugagcgacaacggcccccagaaccagcgcaacgccccgcggaucaccuucgggggccccuccgacagcaccggguccaaccagaacggcgagcgcagcggggcccgguccaagcagcgccggccccagggccugcccaacaacacggcgagcugguucaccgcccucacccagcacggcaaggaggaccugaaguucccgcgcgggcagggcgugcccaucaacaccaacuccagccccgacgaccagaucggguacuaccggcgcgccacgcggcgcauccggggcggggacggcaagaugaaggaccugagcccccgcugguacuucuacuaccucggcaccgggccggaggccggccugcccuacggggccaacaaggacggcaucaucugggucgcgaccgagggcgcccugaacacccccaaggaccacaucgggacgcggaaccccgccaacaacgccgcgaucgugcuccagcugccgcagggcaccacccugcccaagggguucuacgccgagggcucccgcgggggcucccaggccagcucccggagcuccagccgcucccggaacagcucccgcaacagcacccccggcagcucccgggggacgagccccgcccgcauggccggcaacgggggcgacgcggcccucgcccugcugcuccuggaccggcugaaccagcucgaguccaagaugagcgggaagggccagcagcagcagggccagaccgugaccaagaaguccgccgccgaggcgagcaagaagccgcgccagaagcgcaccgccacgaaggccuacaacgucacccaggccuucgggcggcgcggccccgagcagacccaggggaacuucggcgaccaggagcugauccggcaggggaccgacuacaagcacuggccccagaucgcccaguucgcgcccuccgccagcgccuucuucggcaugucccgcaucggcauggaggugacgccgagcgggaccuggcugaccuacaccggcgccaucaagcucgacgacaaggaccccaacuucaaggaccaggugauccugcugaacaagcacaucgacgccuacaagacguucccgcccaccgagcccaagaaggaccggaagaagaaggcggacgagacccaggcccucccccagcgccagaagaagcagcagaccgucacgcugcugcccgccgccgaccucgacgacuucuccaagcagcugcagcagagcauguccagcgcggacuccacccaggccugaggacuaguuauaagacugacuagcccgaugggccucccaacgggcccuccuccccuccuugcaccgagauuaauaaaaaaaaaaaaaaaaaaaaaaaaaaaaaaaaaaaaaaaaaaaaaaaaaaaaaaaaaaaaaaaaugcaucccccccccccccccccccccccccccccccaaaggcucuuuucagagccaccagaauu

SEQ ID NO: 21164 - RNA, 1477 nt, Artificial Sequence
  SARS-CoV-2__MT706136.1__nucleocapsid protein (N) mRNA gc
aggagaaagcuuaccaugagcgacaacggcccccagaaccagcgcaacgccccgcggaucaccuucgggggccccuccgacagcaccggguccaaccagaacggcgagcgcagcggggcccgguccaagcagcgccggccccagggccugcccaacaacacggcgagcugguucaccgcccucacccagcacggcaaggaggaccugaaguucccgcgcgggcagggcgugcccaucaacaccaacuccagccccgacgaccagaucggguacuaccggcgcgccacgcggcgcauccggggcggggacggcaagaugaaggaccugagcccccgcugguacuucuacuaccucggcaccgggccggaggccggccugcccuacggggccaacaaggacggcaucaucugggucgcgaccgagggcgcccugaacacccccaaggaccacaucgggacgcggaaccccgccaacaacgccgcgaucgugcuccagcugccgcagggcaccacccugcccaagggguucuacgccgagggcagccgcgggggcucccaggccagcucccggagcuccagccgcucccggaacagcucccgcaacagcacccccagcuccagccggggcacgucccccgcccgcauggccgggaacggcggggacgcggcccucgcccugcugcuccuggaccggcugaaccagcucgagagcaagauguccggcaaggggcagcagcagcagggccagaccgugaccaagaaguccgccgccgaggcguccaagaagccgcgccagaagcgcaccgccacgaaggccuacaacgucacccaggccuucggccggcgcgggcccgagcagacccagggcaacuucggggaccaggagcugauccggcagggcaccgacuacaagcacuggccccagaucgcccaguucgcgcccagcgccuccgccuucuucgggaugagccgcaucggcauggaggugacgccguccggcaccuggcugaccuacaccggggccaucaagcucgacgacaaggaccccaacuucaaggaccaggugauccugcugaacaagcacaucgacgccuacaagacguucccgcccaccgagcccaagaaggacaagaagaagaaggcggacgagacccaggcccucccccagcggcagaagaagcagcagaccgucacgcugcugcccgccgccgaccucgacgacuucagcaagcagcugcagcaguccaugagcuccgcggacagcacccaggccugaggacuaguuauaagacugacuagcccgaugggccucccaacgggcccuccuccccuccuugcaccgagauuaauaaaaaaaaaaaaaaaaaaaaaaaaaaaaaaaaaaaaaaaaaaaaaaaaaaaaaaaaaaaaaaaaugcaucccccccccccccccccccccccccccccccaaaggcucuuuucagagccaccagaauu

SEQ ID NO: 21165 - RNA, 1477 nt, Artificial Sequence
  SARS-CoV-2__MT706164.1__nucleocapsid protein (N) mRNA gc
aggagaaagcuuaccaugagcgacaacggcccccagaaccagcgcaacgccccgcggaucaccuucgggggccccuccgacagcaccggguccaaccagaacggcgagcgcagcggggcccgguccaagcagcgccggccccagggccugcccaacaacacggcgagcugguucaccgcccucacccagcacggcaaggaggaccugaaguucccgcgcgggcagggcgugcccaucaacaccaacuccagccccgacgaccagaucggguacuaccggcgcgccacgcggcgcauccggggcggggacggcaagaugaaggaccugagcccccgcugguacuucuacuaccucggcaccgggccggaggccggccugcccuacggggccaacaaggacggcaucaucugggucgcgaccgagggcgcccugaacacccccaaggaccacaucgggacgcggaaccccgccaacaacgccgcgaucgugcuccagcugccgcagggcaccacccugcccaagggguucuacgccgagggcucccgcgggggcucccaggccagcucccggagcuccagccgcucccggaacagcucccgcaacagcacccccggcagcucccgggggacgagccccgcccgcauggccggcaacgggggcgacgcggcccucgcccugcugcuccuggaccggcugaaccagcucgaguccaagaugagcgggaagggccagcagcagcagggccagaccgugaccaagaaguccgccgccgaggcgagcaagaagccgcgccagaagcgcaccgccacgaaggccuacaacgucacccaggccuucgggcggcgcggccccgagcagacccaggggaacuucggcgaccaggagcugauccggcaggggaccgacuacaagcacuggccccagaucgcccaguucgcgcccuccgccagcgccuucuucggcaugucccgcaucggcauggaggugacgccgagcgggacccugcucaccuacaccggcgccaucaagcuggacgacaaggaccccaacuucaaggaccaggugauccugcucaacaagcacaucgacgccuacaagacguucccgcccaccgagcccaagaaggacaagaagaagaaggcggacgagacccaggcccugccccagcggcagaagaagcagcagaccgucacgcugcuccccgccgccgaccuggacgacuucuccaagcagcugcagcagagcauguccagcgcggacuccacccaggccugaggacuaguuauaagacugacuagcccgaugggccucccaacgggcccuccuccccuccuugcaccgagauuaauaaaaaaaaaaaaaaaaaaaaaaaaaaaaaaaaaaaaaaaaaaaaaaaaaaaaaaaaaaaaaaaaugcaucccccccccccccccccccccccccccccccaaaggcucuuuucagagccaccagaauu

SEQ ID NO: 21166 - RNA, 1477 nt, Artificial Sequence
  SARS-CoV-2__MT706232.1__nucleocapsid protein (N) mRNA gc
aggagaaagcuuaccaugagcgacaacggcccccagaaccagcgcaacgccccgcggaucaccuucgggggccccuccgacagcaccggguccaaccagaacggcgagcgcagcggggcccgguccaagcagcgccggccccagggccugcccaacaacacggcgagcugguucaccgcccucacccagcacggcaaggaggaccugaaguucccgcgcgggcagggcgugcccaucaacaccaacuccagccccgacgaccagaucggguacuaccggaucgccacgcgccggauccgcggcggggacggcaagaugaaggaccugagcccccggugguacuucuacuaccucggcaccgggccggaggccggccugcccuacggggccaacaaggacggcaucaucugggucgcgaccgagggcgcccugaacacccccaaggaccacaucgggacgcgcaaccccgccaacaacgccgcgaucgugcuccagcugccgcagggcaccacccugcccaagggguucuacgccgagggcucccgcgggggcucccaggccagcucccggagcuccagccggucccgcaacagcucccggaacagcacccccggcagcucccgcgggacgagccccgcccggauggccggcaacgggggcgacgcggcccucgcccugcugcuccuggaccgccugaaccagcucgaguccaagaugagcgggaagggccagcagcagcagggccagaccgugaccaagaaguccgccgccgaggcgagcaagaagccgcggcagaagcgcaccgccacgaaggccuacaacgucacccaggccuucgggcgccggggccccgagcagacccaggggaacuucggcgaccaggagcugauccgccaggggaccgacuacaagcacuggccccagaucgcccaguucgcgcccuccgccagcgccuucuucggcaugucccggaucggcauggaggugacgccgagcgggaccuggcugaccuacaccggcgccaucaagcucgacgacaaggaccccaacuucaaggaccaggugauccugcugaacaagcacaucgacgccuacaagacguucccgcccaccgagcccaagaaggacaagaagaagaaggcggacgagacccaggcccucccccagcgccagaagaagcagcagaccgucacgcugcugcccgccgccgaccucgacgacuucuccaagcagcugcagcagagcauguccagcgcggacuccacccaggccugaggacuaguuauaagacugacuagcccgaugggccucccaacgggcccuccuccccuccuugcaccgagauuaauaaaaaaaaaaaaaaaaaaaaaaaaaaaaaaaaaaaaaaaaaaaaaaaaaaaaaaaaaaaaaaaaugcaucccccccccccccccccccccccccccccccaaaggcucuuuucagagccaccagaauu

SEQ ID NO: 21167 - RNA, 1477 nt, Artificial Sequence
  SARS-CoV-2__MT706311.1__nucleocapsid protein (N) mRNA gc
aggagaaagcuuaccaugagcgacaacggcccccagaaccagcgcaacgccacccggaucaccuucgggggcccguccgacagcacgggguccaaccagaacggcgagcgcagcggggcccgguccaagcagcgccggccccagggccugcccaacaacaccgcgagcugguucaccgcccucacccagcacggcaaggaggaccugaaguucccccgcgggcagggcgugccgaucaacacgaacuccagccccgacgaccagaucggguacuaccggcgcgccacccggcgcauccggggcggggacggcaagaugaaggaccugagcccccgcugguacuucuacuaccucggcaccgggcccgaggccggccugccguacggggccaacaaggacggcaucaucugggucgcgaccgagggcgcccugaacacgcccaaggaccacaucgggacccggaaccccgccaacaacgccgcgaucgugcuccagcugccccagggcaccacccugccgaagggguucuacgccgagggcucccgcgggggcucccaggccagcucccggagcuccagccgcucccggaacagcucccgcaacagcacgcccggcagcucccgggggaccagccccgcccgcauggccggcaacgggggcgacgcggcccucgcccugcugcuccuggaccggcugaaccagcucgaguccaagaugagcgggaagggccagcagcagcagggccagaccgugaccaagaaguccgccgccgaggcgagcaagaagccccgccagaagcgcacggccaccaaggccuacaacgucacccaggccuucgggcggcgcggcccggagcagacccaggggaacuucggcgaccaggagcugauccggcaggggacggacuacaagcacuggccccagaucgcccaguucgcgcccuccgccagcgccuucuucggcaugucccgcaucggcauggaggugacccccagcgggaccuggcugaccuacacgggcgccaucaagcucgacgacaaggacccgaacuucaaggaccaggugauccugcugaacaagcacaucgacgccuacaagaccuucccgcccaccgagcccaagaaggacaagaagaagaaggcggacgagacccaggcccucccccagcggcagaagaagcagcagacggucacccugcugcccgccgccgaccucgacgacuucuccaagcagcugcagcagagcauguccagcgcggacuccacccaggccugaggacuaguuauaagacugacuagcccgaugggccucccaacgggcccuccuccccuccuugcaccgagauuaauaaaaaaaaaaaaaaaaaaaaaaaaaaaaaaaaaaaaaaaaaaaaaaaaaaaaaaaaaaaaaaaaugcaucccccccccccccccccccccccccccccccaaaggcucuuuucagagccaccagaauu

SEQ ID NO: 21168 - RNA, 1477 nt, Artificial Sequence
  SARS-CoV-2__MT706312.1__nucleocapsid protein (N) mRNA gc
aggagaaagcuuaccaugagcgacaacggcccccagaaccagcgcaacgccccgcggaucaccuucgggggccccuccgacagcaccggguccaaccagaacggcgagcgcagcggggcccgguccaagcagcgccggccccagggccugcccaacaacacggcgagcugguucaccgcccucacccagcacggcaaggaggaccugaaguucccgcgcgggcagggcgugcccaucaacaccaacuccagccccgacgaccagaucggguacuaccggcgcgccacgcggcgcauccggggcggggacggcaagaugaaggaccugagcccccgcugguacuucuacuaccucggcaccgggccggaggccggccugcccuacggggccaacaaggacggcaucaucugggucgcgaccgagggcgcccugaacacccccaaggaccacaucgggacgcggaaccccgccaacaacgccgcgaucgugcuccagcugccgcagggcaccacccugcccaagggguucuacgccgagggcucccgcgggggcucccaggccagcucccggagcuccagccgcucccggaacagcucccgcaacagcacccccggcagcucccgggggacgagccccggccgcauggccgggaacggcggggacgccgcgcucgcccugcugcuccuggaccggcugaaccagcucgaguccaagaugagcggcaagggccagcagcagcaggggcagaccgugaccaagaaguccgccgccgaggccagcaagaagccgcgccagaagcgcaccgcgacgaaggccuacaacgucacccaggccuucggccggcgcgggcccgagcagacccagggcaacuucggggaccaggagcugauccggcagggcaccgacuacaagcacuggccccagaucgcccaguucgcccccuccgcgagcgccuucuucggcaugucccgcaucgggauggaggugacgccgagcggcaccuggcugaccuacaccggggccaucaagcucgacgacaaggaccccaacuucaaguaccaggugauccugcugaacaagcacaucgacgccuacaagacguucccgcccaccgagcccaagaaggacaagaagaagaaggccgacgagacccaggcgcucccccagcggcagaagaagcagcagaccgucacgcugcugcccgccgccgaccucgacgacuucuccaagcagcugcagcagagcauguccagcgccgacuccacccaggcgugaggacuaguuauaagacugacuagcccgaugggccucccaacgggcccuccuccccuccuugcaccgagauuaauaaaaaaaaaaaaaaaaaaaaaaaaaaaaaaaaaaaaaaaaaaaaaaaaaaaaaaaaaaaaaaaaugcaucccccccccccccccccccccccccccccccaaaggcucuuuucagagccaccagaauu

SEQ ID NO: 21169 - RNA, 1477 nt, Artificial Sequence
  SARS-CoV-2__MT706334.1__nucleocapsid protein (N) mRNA gc
aggagaaagcuuaccaugagcgacaacggcccccagaaccagcgcaacgccccgcggaucaccuucgggggccccuccgacagcaccggguccaaccagaacggcgagcgcagcggggcccgguccaagcagcgccggccccagggccugcccaacaacacggcgagcugguucaccgcccucacccagcacggcaaggaggaccugaaguucccgcgcgggcagggcgugcccaucaacaccaacuccagccccgacgaccagaucggguacuaccggcgcgccacgcggcgcauccggggcggggacggcaagaugaaggaccugagcccccgcugguacuucuacuaccucggcaccgggccggaggccggccugcccuacggggccaacaaggacggcaucaucugggucgcgaccgagggcgcccugaacacccccaaggaccacaucgggacgcggaaccccgccaacaacgccgcgaucgugcuccagcugccgcagggcaccacccugcccaagggguucuacgccgagggcucccgcgggggcucccaggccagcucccggagcuccagccgcucccggaacagcucccgcaacagcacccccggcagcucccgggggacgagccccgcccgcauggccggcaacgggggcgacgcggcccucgcccugcugcuccuggaccggcugaaccagcucgaguccaagaugagcgggaagggccagcagcagcagggccagaccgugaucaagaaguccgccgccgaggcgagcaagaagccgcgccagaagcgcaccgccaccaaggccuacaacgucacgcaggccuucgggcggcgcggccccgagcagacccaggggaacuucggcgaccaggagcugauccggcaggggaccgacuacaagcacuggccccagaucgcccaguucgcgcccuccgccagcgccuucuucggcaugucccgcaucggcauggaggugaccccgagcgggacguggcugaccuacaccggcgccaucaagcucgacgacaaggaccccaacuucaaggaccaggugauccugcugaacaagcacaucgacgccuacaagaccuucccgcccacggagcccaagaaggacaagaagaagaaggcggacgagacccaggcccucccccagcggcagaagaagcagcagaccgucacccugcugcccgccgccgaccucgacgacuucuccaagcagcugcagcagagcauguccagcgcggacuccacgcaggccugaggacuaguuauaagacugacuagcccgaugggccucccaacgggcccuccuccccuccuugcaccgagauuaauaaaaaaaaaaaaaaaaaaaaaaaaaaaaaaaaaaaaaaaaaaaaaaaaaaaaaaaaaaaaaaaaugcaucccccccccccccccccccccccccccccccaaaggcucuuuucagagccaccagaauu

SEQ ID NO: 21170 - RNA, 1477 nt, Artificial Sequence
  SARS-CoV-2__MT706337.1__nucleocapsid protein (N) mRNA gc
aggagaaagcuuaccaugagcgacaacggcccccagaaccagcgcaacgccccgcggaucaccuucgggggccccuccgacagcaccggguccaaccagaacggcgagcgcagcggggcccgguccaagcagcgccggccccagggccugcccaacaacacggcgagcugguucaccgcccucacccagcacggcaaggaggaccugaaguucccgcgcgggcagggcgugcccaucaacaccaacuccagccccgacgaccagaucggguacuaccggcgcgccacgcggcgcauccggggcggggacggcaagaugaaggaccugagcccccgcugguacuucuacuaccucggcaccgggccggaggccggccugcccuacggggccaacaaggacggcaucaucugggucgcgaccgagggcgcccugaacacccccaaggaccacaucgggacgcggaaccccgccaacaacgccgcgaucgugcuccagcugccgcagggcaccacccugcccaagggguucuacgccgagggcucccgcgggggcucccaggccagcucccggagcuccagccgcucccggaacagcucccgcaacagcacccccggcagcucccgggggacgagccccgcccgcauggccggcaacgggggcgacgcggcccucgcccugcugcuccuggaccggcugaaccagcucgaguccaagaugagcgggaagggccagcagcagcagggccagaccgugaccaagaaguccgccgccgaggcgagcaagaagccgcgccagaagcgcaccgccacgaaggccuacaacgucacccaggccuucgggcggcgcggccccgagcagacccaggggaacuucggcgaccaggagcugauccggcaggggaccgacuacaagcacuggccccagaucgcccaguucgcgcccuccgccagcgccuucuucggcaugucccgcaucggcauggaggugacgccgagcgggaccuggcugaccuacaccggcgccaucaagcucgacgacaaggaccccaacuucaaggaccaggugauccugcugaacaagcacaucgacgccuacaagacguucccgcccaccgagcccaagaaggacaagaagaagaaggcggacgagacccagguccucccccagcggcagaagaagcagcagaccgugacgcugcugcccgccgccgaccucgacgacuucuccaagcagcugcagcagagcauguccagcgccgacuccacccaggcgugaggacuaguuauaagacugacuagcccgaugggccucccaacgggcccuccuccccuccuugcaccgagauuaauaaaaaaaaaaaaaaaaaaaaaaaaaaaaaaaaaaaaaaaaaaaaaaaaaaaaaaaaaaaaaaaaugcaucccccccccccccccccccccccccccccccaaaggcucuuuucagagccaccagaauu

SEQ ID NO: 21171 - RNA, 1477 nt, Artificial Sequence
  SARS-CoV-2__MT706363.1__nucleocapsid protein (N) mRNA gc
aggagaaagcuuaccaugagcgacaacggcccccagaaccagcgcaacgccccgcggaucaccuucgggggccccuccgacagcaccggguccaaccagaacggcgagcgcagcggggcccgguccaagcagcgccggccccagggccugcccaacaacacggcgagcugguucaccgcccucacccagcacggcaaggaggaccugaaguucccgcgcgggcagggcgugcccaucaacaccaacuccagccccgacgaccagaucggguacuaccggcgcgccacgcggcgcauccggggcggggacggcaagaugaaggaccugagcccccgcugguacuucuacuaccucggcaccgggccggaggccggccugcccuacggggccaacaaggacggcaucaucugggucgcgaccgagggcgcccugaacacccccaaggaccacaucgggacgcggaaccccgccaacaacgccgcgaucgugcuccagcugccgcagggcaccacccugcccaagggguucuacgccgagggcucccgcgggggcucccaggccagcucccggagcuccagccgcucccggaacagcucccgcaacagcacccccggcagcucccgggggacgagccccgcccgcauggccggcaacgggggcgacgcggcccucgcccugcugcuccuggaccggcugaaccagcucgaguccaagaugagcgggaagggccagcagcagcagggccagaccgugaccaagaaguccgccgccgaggcgagcaagaagccgcgccagaagcgcaccgccacgaaggccuacaacgucacccaggccuucgggcggcgcggccccgagcagacccaggggaacuucggcgaccaggagcugauccggcaggggaccgacuacaagcacuggccccagaucgcccaguucgcgcccuccgccagcgccuucuucggcaugucccgcaucggcauggaggugacgccgagcgggaccuggcugaccuacaccggcgccuucaagcucgacgacaaggaccccaacuucaaggaccaggugauccugcugaacaagcacaucgacgccuacaagacguucccgcccaccgagcccaagaaggacaagaagaagaaggcggacgagacccaggcccucccccagcggcagaagaagcagcagaccgucacgcugcugcccgccgccgaccucgacgacuucuccaagcagcugcagcagagcauguccagcgcggacuccacccaggccugaggacuaguuauaagacugacuagcccgaugggccucccaacgggcccuccuccccuccuugcaccgagauuaauaaaaaaaaaaaaaaaaaaaaaaaaaaaaaaaaaaaaaaaaaaaaaaaaaaaaaaaaaaaaaaaaugcaucccccccccccccccccccccccccccccccaaaggcucuuuucagagccaccagaauu

SEQ ID NO: 21172 - RNA, 1477 nt, Artificial Sequence
  SARS-CoV-2__MT706376.1__nucleocapsid protein (N) mRNA gc
aggagaaagcuuaccaugagcgacaacggcccccagaaccagcgcaacgccccgcggaucaccuucgggggccccuccgacagcaccggguccaaccagaacggcgagcgcagcggggcccgguccaagcagcgccggccccagggccugcccaacaacacggcgagcugguucaccgcccucacccagcacggcaaggaggaccugaaguucccgcgcgggcagggcgugcccaucaacaccaacuccagccccgacgaccagaucggguacuaccggcgcgccacgcggcgcauccggggcggggacggcaagaugaaggaccugagcccccgcugguacuucuacuaccucggcaccgggccggaggccggccugcccuacggggccaacaaggacggcaucaucugggucgcgaccgagggcgcccugaacacccccaaggaccacaucgggacgcggaaccccgccaacaacgccgcgaucgugcuccagcugccgcagggcaccacccugcccaagggguucuacgccgagggcucccgcgggggcucccaggccagcucccggagcuccagccgcucccggaacagcucccgcaacagcacccccggcagcucccgggggacgagccccgcccgcaucgccggcaacgggggcgacgcggcccucgcccugcugcuccuggaccggcugaaccagcucgaguccaagaugagcgggaagggccagcagcagcagggccagaccgugaccaagaaguccgccgccgaggcgagcaagaagccgcgccagaagcgcaccgccacgaaggccuacaacgucacccaggccuucgggcggcgcggccccgagcagacccaggggaacuucggcgaccaggagcugauccggcaggggaccgacuacaagcacuggccccagaucgcccaguucgcgcccuccgccagcgccuucuucggcaugucccgcaucggcauggaggugacgccgagcgggaccuggcugaccuacaccggcgccaucaagcucgacgacaaggaccccaacuucaaggaccaggugauccugcugaacaagcacaucgacgccuacaagacguucccgcccaccgagcccaagaaggacaagaagaagaaggcggacgagacccaggcccucccccagcggcagaagaagcagcagaccgucacgcugcugcccgccgccgaccucgacgacuucuccaagcagcugcagcagagcauguccagcgcggacuccacccaggccugaggacuaguuauaagacugacuagcccgaugggccucccaacgggcccuccuccccuccuugcaccgagauuaauaaaaaaaaaaaaaaaaaaaaaaaaaaaaaaaaaaaaaaaaaaaaaaaaaaaaaaaaaaaaaaaaugcaucccccccccccccccccccccccccccccccaaaggcucuuuucagagccaccagaauu

SEQ ID NO: 21173 - RNA, 1477 nt, Artificial Sequence
  SARS-CoV-2__MT706398.1__nucleocapsid protein (N) mRNA gc
aggagaaagcuuaccaugagcgacaacggcccccagaaccagcgcaacgccccgcggaucaccuucgggggccccuccgacagcaccggguccaaccagaacggcgagcgcagcggggcccgguccaagcagcgccggccccagggccugcccaacaacacggcgagcugguucaccgcccucacccagcacggcaaggaggaccugaaguucccgcgcgggcagggcgugcccaucaacaccaacuccagccccgacgaccagaucggguacuaccggcgcgccacgcggcgcauccggggcggggacggcaagaugaaggaccugagcccccgcugguacuucuacuaccucggcaccgggccggaggccggccugcccuacggggccaacaaggacggcaucaucugggucgcgaccgagggcgcccugaacacccccaagcaccacaucgggacgcggaaccccgccaacaacgccgcgaucgugcuccagcugccgcagggcaccacccugcccaagggguucuacgccgagggcucccgcgggggcucccaggccagcucccggagcuccagccgcucccggaacagcucccgcaacagcacccccggcagcucccgggggacgagccccgcccgcauggccggcaacgggggcgacgcggcccucgcccugcugcuccuggaccggcugaaccagcucgaguccaagaugagcgggaagggccagcagcagcagggccagaccgugaccaagaaguccgccgccgaggcgagcaagaagccgcgccagaagcgcaccgccacgaaggccuacaacgucacccaggccuucgggcggcgcggccccgagcagacccaggggaacuucggcgaccaggagcugauccggcaggggaccgacuacaagcacuggccccagaucgcccaguucgcgcccuccgccagcgccuucuucggcaugucccgcaucggcauggaggugacgccgagcgggaccuggcugaccuacaccggcgccaucaagcucgacgacaaggaccccaacuucaaggaccaggugauccugcugaacaagcacaucgacgccuacaagacguucccgcccaccgagcccaagaaggacaagaagaagaaggcggacgagacccaggcccucccccagcggcagaagaagcagcagaccgucacgcugcugcccgccgccgaccucgacgacuucuccaagcagcugcagcagagcauguccagcgcggacuccacccaggccugaggacuaguuauaagacugacuagcccgaugggccucccaacgggcccuccuccccuccuugcaccgagauuaauaaaaaaaaaaaaaaaaaaaaaaaaaaaaaaaaaaaaaaaaaaaaaaaaaaaaaaaaaaaaaaaaugcaucccccccccccccccccccccccccccccccaaaggcucuuuucagagccaccagaauu

SEQ ID NO: 21174 - RNA, 1477 nt, Artificial Sequence
  SARS-CoV-2__MT704017.1__nucleocapsid protein (N) mRNA gc
aggagaaagcuuaccaugagcgacaacggcccccagaaccagcgcaacgccccgcggaucaccuucgggggccccuccgacagcaccggguccaaccagaacggcgagcgcagcggggcccgguccaagcagcgccggccccagggccugcccaacaacacggcgagcugguucaccgcccucacccagcacggcaaggaggaccugaaguucccgcgcgggcagggcgugcccaucaacaccaacuccagccccgacgaccagaucggguacuaccggcgcgccacgcggcgcauccggggcggggacggcaagaugaaggaccugagcccccgcugguacuucuacuaccucggcaccgggccggaggucggccugcccuacggggccaacaaggacggcaucaucuggguggccaccgagggcgcgcugaacacccccaaggaccacaucgggacgcggaaccccgccaacaacgccgccaucgugcuccagcugccgcagggcaccacccugcccaagggguucuacgcggagggcucccgcgggggcucccaggccagcucccggagcuccagccgcucccggaacagcucccgcaacagcacccccggcagcucccgggggacgagccccgcccgcauggccggcaacgggggcgacgccgcgcucgcccugcugcuccuggaccggcugaaccagcucgaguccaagaugagcgggaagggccagcagcagcagggccagaccgucaccaagaaguccgccgccgaggccagcaagaagccgcgccagaagcgcaccgcgacgaaggccuacaacgugacccaggccuucgggcggcgcggccccgagcagacccaggggaacuucggcgaccaggagcugauccggcaggggaccgacuacaagcacuggccccagaucgcccaguucgcccccuccgcgagcgccuucuucggcaugucccgcaucggcauggaggugacgccgagcgggaccuggcugaccuacaccggcgccaucaagcucgacgacaaggaccccaacuucaaggaccaggucauccugcugaacaagcacaucgacgccuacaagacguucccgcccaccgagcccaagaaggacaagaagaagaaggccgacgagacccaggcgcucccccagcggcagaagaagcagcagaccgugacgcugcugcccgccgccgaccucgacgacuucuccaagcagcugcagcagagcauguccagcgccgacuccacccaggcgugaggacuaguuauaagacugacuagcccgaugggccucccaacgggcccuccuccccuccuugcaccgagauuaauaaaaaaaaaaaaaaaaaaaaaaaaaaaaaaaaaaaaaaaaaaaaaaaaaaaaaaaaaaaaaaaaugcaucccccccccccccccccccccccccccccccaaaggcucuuuucagagccaccagaauu

SEQ ID NO: 21175 - RNA, 1477 nt, Artificial Sequence
  SARS-CoV-2__MT704066.1__nucleocapsid protein (N) mRNA gc
aggagaaagcuuaccaugagcgacaacggcccccagaaccagcgcaacgccccgcggaucaccuucgggggccccuccgacagcaccggguccaaccagaacggcgagcgcagcggggcccgguccaagcagcgccggccccagggccugcccaacaacacggcgagcugguucaccgcccucacccagcacggcaaggaggaccugaaguucccgcgcgggcagggcgugcccaucaacaccaacuccagccccgacgaccagaucggguacuaccggcgcgccacgcggcgcauccggggcggggacggcaagaugaaggaccugagcccccgcugguacuucuacuaccucggcaccgggccggaggccggccugcccuacggggccaacaaggacggcaucaucugggucgcgaccgagggcgcccugaacacccccaaggaccacaucgggacgcggaacagcgccaacaacgccgcgaucgugcuccagcugccccagggcaccacccugccgaagggguucuacgccgagggcucccgcgggggcagccaggccuccagccgguccagcucccgcagccggaacuccagccgcaacagcacccccggcuccagccgggggacgucccccgcccgcauggccggcaacgggggcgacgcggcccucgcccugcugcuccuggaccggcugaaccagcucgagagcaagauguccgggaagggccagcagcagcagggccagaccgugaccaagaaguccgccgccgaggcguccaagaagccccgccagaagcgcaccgccacgaaggccuacaacgucacccaggccuucgggcggcgcggcccggagcagacccaggggaacuucggcgaccaggagcugauccggcaggggaccgacuacaagcacuggccccagaucgcccaguucgcgcccagcgccuccgccuucuucggcaugagccgcaucggcauggaggugacgcccuccgggaccuggcugaccuacaccggcgccaucaagcucgacgacaaggacccgaacuucaaggaccaggugauccugcugaacaagcacaucgacgccuacaagacguucccgcccaccgagcccaagaaggacaagaagaagaaggcggacgagacccaggcccucccccagcggcagaagaagcagcagaccgucacgcugcugcccgccgccgaccucgacgacuucagcaagcagcugcagcaguccaugagcuccgcggacagcacccaggccugaggacuaguuauaagacugacuagcccgaugggccucccaacgggcccuccuccccuccuugcaccgagauuaauaaaaaaaaaaaaaaaaaaaaaaaaaaaaaaaaaaaaaaaaaaaaaaaaaaaaaaaaaaaaaaaaugcaucccccccccccccccccccccccccccccccaaaggcucuuuucagagccaccagaauu

SEQ ID NO: 21176 - RNA, 1477 nt, Artificial Sequence
  SARS-CoV-2__MT704068.1__nucleocapsid protein (N) mRNA gc
aggagaaagcuuaccaugagcgacaacggcccccagaaccagcgcaacgccccgcggaucaccuucgggggccccuccgacagcaccggguccaaccagaacggcgagcgcagcggggcccgguccaagcagcgccggccccagggccugcccaacaacacggcgagcugguucaccgcccucacccagcacggcaaggaggaccugaaguucccgcgcgggcagggcgugcccaucaacaccaacuccagccccgacgaccagaucggguacuaccggcgcgccacgcggcgcauccggggcggggacggcaagaugaaggaccugagcccccgcugguacuucuacuaccucggcaccgggccggaggccggccugcccuacggggccaacaaggacggcaucaucugggucgcgaccgagggcgcccugaacacccccaaggaccacaucgggacgcggaaccccgccaacaacgccgcgaucgugcuccagcugccgcagggcaccacccugcccaagggguucuacgccgagggcucccgcgggggcucccaggccagcucccggagcuccagccgcucccggaacagcucccgcaacagcacccccggcagcucccgggggacgagccccgcccgcauggccggcaacgggggcgacgcggcccucgcccugcugcuccuggaccggcugaaccagcucgaguccaagaugagcgggaagggccagcagcagcagggccagaccgugaccaagaaguccgccgccgaggcgagcaagaagccgcgccagaagcgcaccgccacgaaggccuacaacgucacccaggccuucgggcggcgcggccccgagcagacccaggggaacuucggcgaccuggagcugauccggcaggggaccgacuacaagcacuggccccagaucgcccaguucgcgcccuccgccagcgccuucuucggcaugucccgcaucggcauggaggugacgccgagcgggaccuggcucaccuacaccggcgccaucaagcuggacgacaaggaccccaacuucaaggaccaggugauccugcucaacaagcacaucgacgccuacaagacguucccgcccaccgagcccaagaaggacaagaagaagaaggcggacgagacccaggcccugccccagcggcagaagaagcagcagaccgucacgcugcuccccgccgccgaccuggacgacuucuccaagcagcugcagcagagcauguccagcgcggacuccacccaggccugaggacuaguuauaagacugacuagcccgaugggccucccaacgggcccuccuccccuccuugcaccgagauuaauaaaaaaaaaaaaaaaaaaaaaaaaaaaaaaaaaaaaaaaaaaaaaaaaaaaaaaaaaaaaaaaaugcaucccccccccccccccccccccccccccccccaaaggcucuuuucagagccaccagaauu

SEQ ID NO: 21177 - RNA, 1477 nt, Artificial Sequence
  SARS-CoV-2__MT704112.1__nucleocapsid protein (N) mRNA gc
aggagaaagcuuaccaugagcgacaacggcccccagaaccagcgcaacgccccgcggaucaccuucgggggccccuccgacagcaccggguccaaccagaacggcgagcgcagcggggcccgguccaagcagcgccggccccagggccugcccaacaacacggcgagcugguucaccgcccucacccagcacggcaaggaggaccugaaguucccgcgcgggcagggcgugcccaucaacaccaacuccagccccgacgaccagaucggguacuaccggcgcgccacgcggcgcauccggggcggggacggcaagaugaaggaccugagcccccgcugguacuucuacuaccucggcaccgggccggaggccggccugcccuacggggccaacaaggacggcaucaucugggucgcgaccgagggcgcccugaacacccccaaggaccacaucgggacgcggaaccccgccaacaacgccgcgaucgugcuccagcugccgcagggcaccacccugcccaagggguucuacgccgagggcagccgcgggggcucccaggccagcucccggagcuccagccgcucccggaacaacagccgcaacuccacccccggcagcagccgggggacgucccccgcccgcauggccggcaacgggggcgacgcggcccucgcccugcugcuccuggaccggcugaaccagcucgagagcaagauguccgggaagggccagcagcagcagggccagaccgugaccaagaaguccgccgccgaggcguccaagaagccgcgccagaagcgcaccgccacgaaggccuacaacgucacccaggccuucgggcggcgcggccccgagcagacccaggggaacuucggcgaccaggagcugauccggcaggggaccgacuacaagcacuggccccagaucgcccaguucgcgcccagcgccuccgccuucuucggcaugagccgcaucggcauggaggugacgccguccgggaccuggcugaccuacaccggcgccaucaagcucgacgacaaggaccccaacuucaaggaccaggugauccugcugaacaagcacaucgacgccuacaagacguucccgcccaccgagcccaagaaggacaagaagaagaaggcggacgagacccaggcccucccccagcggcagaagaagcagcagaccgucacgcugcugcccgccgccgaccucgacgacuucagcaagcagcugcagcaguccaugagcuccgcggacagcacccaggccugaggacuaguuauaagacugacuagcccgaugggccucccaacgggcccuccuccccuccuugcaccgagauuaauaaaaaaaaaaaaaaaaaaaaaaaaaaaaaaaaaaaaaaaaaaaaaaaaaaaaaaaaaaaaaaaaugcaucccccccccccccccccccccccccccccccaaaggcucuuuucagagccaccagaauu

SEQ ID NO: 21178 - RNA, 1477 nt, Artificial Sequence
  SARS-CoV-2__MT683418.1__nucleocapsid protein (N) mRNA gc
aggagaaagcuuaccaugagcgacaacggcccccagaaccagcgcaacgccccgcggaucaccuucgggggccccuccgacagcaccggguccaaccagaacggcgagcgcagcgggucccggagcaagcagcgccggccccagggccugcccaacaacacggccuccugguucaccgcgcucacccagcacggcaaggaggaccugaaguucccgcgcgggcagggcgugcccaucaacaccaacagcucccccgacgaccagaucggguacuaccggcgcgccacgcggcgcauccggggcggggacggcaagaugaaggaccugagcccccgcugguacuucuacuaccucggcaccgggccggaggccggccugcccuacggggccaacaaggacggcaucaucugggucgccaccgagggcgcgcugaacacccccaaggaccacaucgggacgcggaaccccgccaacaacgccgccaucgugcuccagcugccgcagggcaccacccugcccaagggguucuacgcggagggcucccgcgggggcagccaggccuccagccgguccagcucccgcagccggaacuccagccgcaacagcacccccggcuccagccgggggacgucccccgcccgcauggccggcaacgggggcgacgccgcgcucgcccugcugcuccuggaccggcugaaccagcucgagagcaagauguccgggaagggccagcagcagcagggccagaccgugaccaagaaguccgccgccgaggccagcaagaagccgcgccagaagcgcaccgcgacgaaggccuacaacgucacccaggccuucgggcggcgcggccccgagcagacccaggggaacuucggcgaccaggagcugauccggcaggggaccgacuacaagcacuggccccagaucgcccaguucgcccccagcgcguccgccuucuucggcaugagccgcaucggcauggaggugacgccguccgggaccuggcugaccuacaccggcgccaucaagcucgacgacaacgaccccaacuucaaggaccaggugauccugcugaacaagcacaucgacgccuacaagacguucccgcccaccgagcccaagaaggacaagaagaagaaggccgacgagacccaggcgcucccccagcggcagaagaagcagcagaccgucacgcugcugcccgccgccgaccucgacgacuucagcaagcagcugcagcaguccaugagcuccgccgacagcacccaggcgugaggacuaguuauaagacugacuagcccgaugggccucccaacgggcccuccuccccuccuugcaccgagauuaauaaaaaaaaaaaaaaaaaaaaaaaaaaaaaaaaaaaaaaaaaaaaaaaaaaaaaaaaaaaaaaaaugcaucccccccccccccccccccccccccccccccaaaggcucuuuucagagccaccagaauu

SEQ ID NO: 21179 - RNA, 1477 nt, Artificial Sequence
  SARS-CoV-2__MT678839.1__nucleocapsid protein (N) mRNA gc
aggagaaagcuuaccaugagcgacaacggcccccagaaccagcgcaacgccccgcggaucaccuucgggggccccuccgacagcaccggguccaaccagaacggcgagcgcagcggggcccgguccaagcagcgccggccccagggccugcccaacaacacggcgagcugguucaccgcccucacccagcacggcaaggaggaccugaaguucccgcgcgggcagggcgugcccaucaacaccaacuccagccccgacgaccagaucggguacuaccggcgcgccacgcggcgcauccggggcggggacggcaagaugaaggaccugagcccccgcugguacuucuacuaccucggcaccgggccggaggccggccugcccuacggggccaacaaggacggcaucaucugggucgcgaccgagggcgcccugaacacccccaaggaccacaucgggacgcggaaccccgccaacaacgccgcgaucgugcuccagcugccgcagggcaccacccugcccaagggguucuacgccgagggcucccgcgggggcucccaggccagcucccggagcuccagccgcucccggaacagcucccgcaacagcacccccggcagcucccgggggacgagccccgcccgcauggccggcaacgggggcgacgcggcccucgcccugcugcuccuggaccggcugaaccagcucgaguccaagaugagcgggaagggccagcagcagcagggccagaccgugaccaagaaguccgccgccgaggcgagcaagaagccgcgccagaagcgcaccgccacgaaggccuacaacgucacccaggccuucgggcggcgcggccccgagcagacccaggggaacuucggcgaccaggagcugauccggcaggggaccgacuacaagcacuggccccagaucgcccaguucgcgcccuccgccagcgccuucuucggcaugucccgcaucggcauggaggugacgccgagcgggaccuggcugaccuacaccggcgccaucaagcucgacgacaaggaccccaacuucaaggaccaggugauccugcugaacaagcacaucgacgccuacaucacguucccgcccaccgagcccaagaaggacaagaagaagaaggcggacgagacccaggcccucccccagcggcagaagaagcagcagaccgucacgcugcugcccgccgccgaccucgacgacuucuccaagcagcugcagcagagcauguccagcgcggacuccacccaggccugaggacuaguuauaagacugacuagcccgaugggccucccaacgggcccuccuccccuccuugcaccgagauuaauaaaaaaaaaaaaaaaaaaaaaaaaaaaaaaaaaaaaaaaaaaaaaaaaaaaaaaaaaaaaaaaaugcaucccccccccccccccccccccccccccccccaaaggcucuuuucagagccaccagaauu

SEQ ID NO: 21180 - RNA, 1477 nt, Artificial Sequence
  SARS-CoV-2__MT611442.1__nucleocapsid protein (N) mRNA gc
aggagaaagcuuaccaugagcgacaacggcccccagaaccagcgcaacgccccgcggaucaccuucgggggccccuccgacagcaccggguccaaccagaacggcgagcgcagcggggcccgguccaagcagcgccggccccagggccugcccaacaacacggcgagcugguucaccgcccucacccagcacggcaaggaggaccugaaguucccgcgcgggcagggcgugcccaucaacaccaacuccagccccgacgaccagaucggguacuaccggcgcgccacgcggcgcauccggggcggggacggcaagaugaaggaccugagcccccgcugguacuucuacuaccucggcaccgggccggaggccggccugcccuacggggccaacaaggacggcaucaucugggucgcgaccgagggcgcccugaacacccccaaggaccacaucgggacgcggaaccccgccaacaacgccgcgaucgugcuccagcugccgcagggcaccacccugcccaagggguucuacgccgagggcucccgcgggggcucccaggccagcucccggagcuccagccgcucccggaacagcucccgcaacagcacccccggcagcucccgggggacgagccccgcccgcauggccggcaacgggggcgacgcggcccucgcccugcugcuccuggaccggcugaaccagcucgaguccaagaugagcgggaagggccagcagcagcagggccagaccgugaccaagaaguccgccgccgaggcgagcaagaagccgcgccagaagcgcaccgccacgaaggccuacaacgucacccaggccuucgggcggcgcggccccgagcagauccaggggaacuucggcgaccaggagcugauccggcaggggaccgacuacaagcacuggccccagaucgcccaguucgcgcccuccgccagcgccuucuucggcaugucccgcaucggcauggaggugaccccgagcgggacguggcugaccuacaccggcgccaucaagcucgacgacaaggaccccaacuucaaggaccaggugauccugcugaacaagcacaucgacgccuacaagaccuucccgcccacggagcccaagaaggacaagaagaagaaggcggacgagacccaggcccucccccagcggcagaagaagcagcagaccgucacccugcugcccgccgccgaccucgacgacuucuccaagcagcugcagcagagcauguccagcgcggacuccacgcaggccugaggacuaguuauaagacugacuagcccgaugggccucccaacgggcccuccuccccuccuugcaccgagauuaauaaaaaaaaaaaaaaaaaaaaaaaaaaaaaaaaaaaaaaaaaaaaaaaaaaaaaaaaaaaaaaaaugcaucccccccccccccccccccccccccccccccaaaggcucuuuucagagccaccagaauu

SEQ ID NO: 21181 - RNA, 1477 nt, Artificial Sequence
  SARS-CoV-2__MT676368.1__nucleocapsid protein (N) mRNA gc
aggagaaagcuuaccaugagcgacaacggcccccagaaccagcgcaacgccccgcggaucaccuucgggggccccuccgacagcaccggguccaaccagaacggcgagcgcagcggggcccgguccaagcagcgccggccccagggccugcccaacaacacggcgagcugguucaccgcccucacccagcacggcaaggaggaccugaaguucccgcgcgggcagggcgugcccaucaacaccaacuccagccccgacgaccagaucggguacuaccggcgcgccacgcggcgcauccggggcggggacggcaagaugaaggaccugagcccccgcugguacuucuacuaccucggcaccgggccggaggccggccugcccuacggggccaacaaggacggcaucaucugggucgcgaccgagggcgcccugaacacccccaaggaccacaucgggacgcggaaccccgccaacaacgccgcgaucgugcuccagcugccgcagggcaccacccugcccaagggguucuacgccgagggcagccgcgggggcucccaggccagcucccggagcuccagccgcucccggaacagccuccgcaacuccacccccggcagcagccgggggacgucccccgcccgcauggccggcaacgggggcgacgcggugcuggcccugcuccugcuggaccggcucaaccagcuggagagcaagauguccgggaagggccagcagcagcagggccagaccgucaccaagaaguccgccgccgaggccuccaagaagccgcgccagaagcgcaccgcgacgaaggccuacaacgugacccaggccuucgggcggcgcggccccgagcagacccaggggaacuucggcgaccaggagcugauccggcaggggaccgacuacaagcacuggccccagaucgcccaguucgcccccagcgcguccgccuucuucggcaugagccgcaucggcauggaggugacgccguccgggaccuggcucaccuacaccggcgccaucaagcuggacgacaaggaccccaacuucaaggaccaggucauccugcucaacaagcacaucgacgccuacaagacguucccgcccaccgagcccaagaaggacaagaagaagaaggccgacgagacccaggcgcugccccagcggcagaagaagcagcagaccgugacgcugcuccccgccgccgaccuggacgacuucagcaagcagcugcagcaguccaugagcuccgccgacagcacccaggcgugaggacuaguuauaagacugacuagcccgaugggccucccaacgggcccuccuccccuccuugcaccgagauuaauaaaaaaaaaaaaaaaaaaaaaaaaaaaaaaaaaaaaaaaaaaaaaaaaaaaaaaaaaaaaaaaaugcaucccccccccccccccccccccccccccccccaaaggcucuuuucagagccaccagaauu

SEQ ID NO: 21182 - RNA, 1477 nt, Artificial Sequence
  SARS-CoV-2__MT669322.1__nucleocapsid protein (N) mRNA gc
aggagaaagcuuaccaugagcgacaacggcccccagaaccagcgcaacgccccgcggaucaccuucgggggccccuccgacagcaccggguccaaccagaacggcgagcgcagcggggcccgguccaagcagcgccggccccagggccugcccaacaacacggcgagcugguucaccgcccucacccagcacggcaaggaggaccugaaguucccgcgcgggcagggcgugcccaucaacaccaacuccagccccgacgaccagaucggguacuaccggcgcgccacgcggcgcauccggggcggggacggcaagaugaaggaccugagcccccgcugguacuucuacuaccucggcaccgggccggaggccggccugcccuacggggccaacaaggacggcaucaucugggucgcgaccgagggcgcccugaacacccccaaggaccacaucgggacgcggaaccccgccaacaacgccgcgaucgugcuccagcugccgcagggcaccacccugcccaagggguucuacgccgagggcagccgcgggggcucccaggccagcucccggagcuccagccgcucccggaacagccuccgcaacuccacccccggcagcagcgggcggacgucccccgcccgcauggccggcaacgggggcgacgcggcccuggcccugcuccugcuggaccggcucaaccagcuggagagcaagauguccgggaagggccagcagcagcagggccagaccgugaccaagaaguccgccgccgaggcguccaagaagccgcgccagaagcgcaccgccacgaaggccuacaacgucacccaggccuucgggcggcgcggccccgagcagacccaggggaacuucggcgaccaggagcugauccggcaggggaccgacuacaagcacuggccccagaucgcccaguucgcgcccagcgccuccgccuucuucggcaugagccgcaucggcauggaggugacgccguccgggaccuggcucaccuacaccggcgccaucaagcuggacgacaaggaccccaacuucaaggaccaggugauccugcucaacaagcacaucgacgccuacaagacguucccgcccaccgagcccaagaaggacaagaagaagaaggcggacgagacccaggcccugccccagcggcagaagaagcagcagaccgucacgcugcuccccgccgccgaccuggacgacuucagcaagcagcugcagcaguccaugagcuccgcggacagcacccaggccugaggacuaguuauaagacugacuagcccgaugggccucccaacgggcccuccuccccuccuugcaccgagauuaauaaaaaaaaaaaaaaaaaaaaaaaaaaaaaaaaaaaaaaaaaaaaaaaaaaaaaaaaaaaaaaaaugcaucccccccccccccccccccccccccccccccaaaggcucuuuucagagccaccagaauu

SEQ ID NO: 21183 - RNA, 1477 nt, Artificial Sequence
  SARS-CoV-2__MT671828.1__nucleocapsid protein (N) mRNA gc
aggagaaagcuuaccaugagcgacaacggcccccagaaccagcgcaacgccccgcggaucaccuucgggggccccuccgacagcaccggguccaaccagaacggcgagcgcagcggggcccgguccaagcagcgccggccccagggccugcccaacaacacggcgagcugguucaccgcccucacccagcacggcaaggaggaccugaaguucccgcgcgggcagggcgugcccaucaacaccaacuccagccccgacgaccagaucggguacuaccggcgcgccacgcggcgcauccggggcggggacggcaagaugaaggaccugagcccccgcugguacuucuacuaccucggcaccgggccggaggccggccugcccuacggggccaacaaggacggcaucaucugggucgcgaccgagggcgcccugaacacccccaagcaccacaucgggacgcggaaccccgccaacaacgccgcgaucgugcuccagcugccgcagggcaccacccugcccaagggguucuacgccgagggcucccgcgggggcucccaggccagcucccggagcuccagccgcucccggaacagcucccgcaacagcacccccggcagcuccaagcggacgagccccgcccgcauggccgggaacggcggggacgcggcccucgcccugcugcuccuggaccggcugaaccagcucgaguccaagaugagcggcaaggggcagcagcagcagggccagaccgugaccaagaaguccgccgccgaggcgagcaagaagccgcgccagaagcgcaccgccacgaaggccuacaacgucacccaggccuucggccggcgcgggcccgagcagacccagggcaacuucggggaccaggagcugauccggcagggcaccgacuacaagcacuggccccagaucgcccaguucgcgcccuccgccagcgccuucuucgggaugucccgcaucggcauggaggugacgccgagcggcaccuggcugaccuacaccggggccaucaagcucgacgacaaggaccccaacuucaaggaccaggugauccugcugaacaagcacaucgacgccuacaagacguucccgcccaccgagcccaagaaggacaagaagaagaaggcggacgagacccaggcccucccccagcggcagaagaagcagcagaccgucacgcugcugcccgccgccgaccucgacgacuucuccaagcagcugcagcagagcauguccagcgcggacuccacccaggccugaggacuaguuauaagacugacuagcccgaugggccucccaacgggcccuccuccccuccuugcaccgagauuaauaaaaaaaaaaaaaaaaaaaaaaaaaaaaaaaaaaaaaaaaaaaaaaaaaaaaaaaaaaaaaaaaugcaucccccccccccccccccccccccccccccccaaaggcucuuuucagagccaccagaauu

SEQ ID NO: 21184 - RNA, 1477 nt, Artificial Sequence
  SARS-CoV-2__MT664107.1__nucleocapsid protein (N) mRNA gc
aggagaaagcuuaccaugagcgacaacggcccccagaaccagcgcaacgccccgcggaucaccuucgggggccccuccgacagcaccggguccaaccagaacggcgagcgcagcggggcccgguccaagcagcgccggccccagggccugcccaacaacacggcgagcugguucaccgcccucacccagcacggcaaggaggaccugaaguucccgcgcgggcagggcgugcccaucaacaccaacuccagccccgacgaccagaucggguacuaccggcgcgccacgcggcgcauccggggcggggacggcaagaugaaggaccugagcccccgcugguacuucuacuaccucggcaccgggccggaggccggccugcccuacggggccaacaaggacggcaucaucugggucgcgaccgagggcgcccugaacacccccaaggaccacaucgggacgcggaaccccgccaacaacgccgcgaucgugcuccagcugccgcagggcaccacccugcccaagggguucuacgccgagggcagccgcgggggcucccaggccagcucccggagcuccagccgcucccggaacagccuccgcaacuccacccccggcagcagccgggggacgucccccgcccgcauggccggcaacgggggcgacgcggcccuggcccugcuccugcuggaccggcucaaccagcuggagagcaagauguccgggaagggccagcagcagcagggccagaccgugaccaagaaguccgccgccgaggcguccaagaagccgcgccagaagcgcaccgccacgaaggccuacaaccugauccaggccuucgggcggcgcggccccgagcagacccaggggaacuucggcgaccaggagcucauccggcaggggaccgacuacaagcacuggccccagaucgcccaguucgcgcccagcgccuccgccuucuucggcaugagccgcaucggcauggaggucaccccguccgggacguggcugaccuacaccggcgccaucaagcuggacgacaaggaccccaacuucaaggaccaggugauccuccugaacaagcacaucgacgccuacaagaccuucccgcccacggagcccaagaaggacaagaagaagaaggcggacgagacccaggcccugccccagcggcagaagaagcagcagaccgugacccuccugcccgccgccgaccuggacgacuucagcaagcagcuccagcaguccaugagcuccgcggacagcacgcaggccugaggacuaguuauaagacugacuagcccgaugggccucccaacgggcccuccuccccuccuugcaccgagauuaauaaaaaaaaaaaaaaaaaaaaaaaaaaaaaaaaaaaaaaaaaaaaaaaaaaaaaaaaaaaaaaaaugcaucccccccccccccccccccccccccccccccaaaggcucuuuucagagccaccagaauu

SEQ ID NO: 21185 - RNA, 1477 nt, Artificial Sequence
  SARS-CoV-2__MT664203.1__nucleocapsid protein (N) mRNA gc
aggagaaagcuuaccaugagcgacaacggcccccagaaccagcgcaacgccccgcggaucaccuucgggggccccuccaacagcaccggguccaaccagaacggcgagcgcagcggggcccgguccaagcagcgccggccccagggccugcccaacaacacggcgagcugguucaccgcccucacccagcacggcaaggaggaccugaaguucccgcgcgggcagggcgugcccaucaacaccaacuccagccccgacgaccagaucggguacuaccggcgcgccacgcggcgcauccggggcggggacggcaagaugaaggaccugagcccccgcugguacuucuacuaccucggcaccgggccggaggccggccugcccuacggggccaacaaggacggcaucaucugggucgcgaccgagggcgcccugaacacccccaaggaccacaucgggacgcggaaccccgccaacaacgccgcgaucgugcuccagcugccgcagggcaccacccugcccaagggguucuacgccgagggcagccgcgggggcucccaggccagcucccggagcuccagccgcucccggaacagccuccgcaacuccacccccggcagcagccgggggacgucccccgcccgcauggccggcaacgggggcgacgcggcccuggcccugcuccugcuggaccggcucaaccagcuggagagcaagauguccgggaagggccagcagcagcagggccagaccgugaccaagaaguccgccgccgaggcguccaagaagccgcgccagaagcgcaccgccacgaaggccuacaacgucacccaggccuucgggcggcgcggccccgagcagacccaggggaacuucggcgaccaggagcugauccggcaggggaccgacuacaagcacuggccccagaucgcccaguucgcgcccagcgccuccgccuucuucggcaugagccgcaucggcauggaggugacgccguccgggaccuggcucaccuacaccggcgccaucaagcuggacgacaaggaccccaacuucaaggaccaggugauccugcucaacaagcacaucgacgccuacaagacguucccgcccaccgagcccaagaaggacaagaagaagaaggcggacgagacccaggcccugccccagcggcagaagaagcagcagaccgucacgcugcuccccgccgccgaccuggacgacuucagcaagcagcugcagcaguccaugagcuccgcggacagcacccaggccugaggacuaguuauaagacugacuagcccgaugggccucccaacgggcccuccuccccuccuugcaccgagauuaauaaaaaaaaaaaaaaaaaaaaaaaaaaaaaaaaaaaaaaaaaaaaaaaaaaaaaaaaaaaaaaaaugcaucccccccccccccccccccccccccccccccaaaggcucuuuucagagccaccagaauu

SEQ ID NO: 21186 - RNA, 1477 nt, Artificial Sequence
  SARS-CoV-2__MT667351.1__nucleocapsid protein (N) mRNA gc
aggagaaagcuuaccaugagcgacaacggcccccagaaccagcgcaacgccccgcggaucaccuucgggggccccuccgacagcaccggguccaaccagaacggcgagcgcagcggggcccgguccaagcagcgccggccccagggccugcccaacaacacggcgagcugguucaccgcccucacccagcacggcaaggaggaccugaaguucccgcgcgggcagggcgugcccaucaacaccaacuccagccccgacgaccggaucggguacuaccgccgggccacgcgccggauccgcggcggggacggcaagaugaaggaccugagcccccggugguacuucuacuaccucggcaccgggccggaggccggccugcccuacggggccaacaaggacggcaucaucugggucgcgaccgagggcgcccugaacacccccaaggaccacaucgggacgcgcaaccccgccaacaacgccgcgaucgugcuccagcugccgcagggcaccacccugcccaagggguucuacgccgagggcucccgcgggggcucccaggccagcucccggagcuccagccggucccgcaacagcucccggaacagcacccccggcagcuccaagcgcacgagccccgcccggauggccgggaacggcggggacgcggcccucgcccugcugcuccuggaccgccugaaccagcucgaguccaagaugagcggcaaggggcagcagcagcagggccagaccgugaccaagaaguccgccgccgaggcgagcaagaagccgcgccagaagcggaccgccacgaaggccuacaacgucacccaggccuucggccgccgggggcccgagcagacccagggcaacuucggggaccaggagcugauccgccagggcaccgacuacaagcacuggccccagaucgcccaguucgcgcccuccgccagcgccuucuucgggaugucccggaucggcauggaggugacgccgagcggcaccuggcugaccuacaccggggccaucaagcucgacgacaaggaccccaacuucaaggaccaggugauccugcugaacaagcacaucgacgccuacaagacguucccgcccaccgagcccaagaaggacaagaagaagaaggcggacgagacccaggcccucccccagcgccagaagaagcagcagaccgucacgcugcugcccgccgccgaccucgacgacuucuccaagcagcugcagcagagcauguccagcgcggacuccacccaggccugaggacuaguuauaagacugacuagcccgaugggccucccaacgggcccuccuccccuccuugcaccgagauuaauaaaaaaaaaaaaaaaaaaaaaaaaaaaaaaaaaaaaaaaaaaaaaaaaaaaaaaaaaaaaaaaaugcaucccccccccccccccccccccccccccccccaaaggcucuuuucagagccaccagaauu

SEQ ID NO: 21187 - RNA, 1477 nt, Artificial Sequence
  SARS-CoV-2__MT646074.1__nucleocapsid protein (N) mRNA gc
aggagaaagcuuaccaugagcgacaacggcccccagaaccagcgcaacgccccgcggaucaccuucgggggccccuccgacagcaccggguccaaccagaacggcgagcgcagcggggcccgguccaagcagcgccggccccagggccugcccaacaacacggcgagcugguucaccgcccucacccagcacggcaaggaggaccugaaguucccgcgcgggcagggcgugcccaucaacaccaacuccagccccgacgaccagaucggguacuaccggcgcgccacgcggcgcauccggggcggggacggcaagaugaaggaccugagcccccgcugguacuucuacuaccucggcaccgggccggaggccggccugcccuacggggccaacaaggacggcaucaucugggucgcgaccgagggcgcccugaacacccccaaggaccacaucgggacgcggaaccccgccaacaacgccgcgaucgugcuccagcugccgcagggcaccacccugcccaagggguucuacgccgagggcagccgcgggggcucccaggccagcucccggagccucucccgcagccggaacuccagccgcaacuccacccccggcagcagcaagcggacgucccccgcccgcauggccgggaacggcggggacgcggcccuggcccugcuccugcuggaccggcucaaccagcuggagagcaagauguccggcaaggggcagcagcagcagggccagaccgugaccaagaaguccgccgccgaggcguccaagaagccgcgccagaagcgcaccgccacgaaggccuacaacgucacccaggccuucggccggcgcgggcccgagcagacccagggcaacuucggggaccaggagcugauccggcagggcaccgacuacaagcacuggccccagaucgcccaguucgcgcccagcgccuccgccuucuucgggaugagccgcaucggcauggaggugacgccguccggcaccuggcucaccuacaccggggccaucaagcuggacgacaaggaccccaacuucaaggaccaggugauccugcucaacaagcacaucgacgccuacaagacguucccgcccaccgagcccaagaaggacaagaagaagaaggcggacgagacccaggcccugccccagcggcagaagaagcagcagaccgucacgcugcuccccgccgccgaccuggacgacuucagcaagcagcugcagcaguccaugagcuccgcggacagcacccaggccugaggacuaguuauaagacugacuagcccgaugggccucccaacgggcccuccuccccuccuugcaccgagauuaauaaaaaaaaaaaaaaaaaaaaaaaaaaaaaaaaaaaaaaaaaaaaaaaaaaaaaaaaaaaaaaaaugcaucccccccccccccccccccccccccccccccaaaggcucuuuucagagccaccagaauu

SEQ ID NO: 21188 - RNA, 1477 nt, Artificial Sequence
  SARS-CoV-2__MT641507.1__nucleocapsid protein (N) mRNA gc
aggagaaagcuuaccaugagcgacaacggcccccagaaccagcgcaacgccccgcggaucaccuucgggggccccuccgacagcaccggguccaaccagaacggcgagcgcagcggggcccgguccaagcagcgccggccccagggccugcccaacaacacggcgagcugguucaccgcccucacccagcacggcaaggaggaccugaaguucccgcgcgggcagggcgugcccaucaacaccaacuccagccccgacgaccagaucggguacuaccggcgcgccacgcggcgcauccggggcggggacggcaagaugaaggaccugagcccccgcugguacuucuacuaccucggcaccgggccggaggccggccugcccuacggggccaacaaggacggcaucaucugggucgcgaccgagggcgcccugaacacccccaaggaccacaucgggacgcggaaccccgccaacaacgccgcgaucgugcuccagcugccgcagggcaccacccugcccaagggguucuacgccgagggcucccgcgggggcucccaggccagcucccggagcuccagccgcucccggaacagcucccgcaacagcacccccggcagcucccgggggacgagccccgcccgcauggccggcaacgggggcgacgcggcccucgcccugcugcuccuggaccggcugaaccagcucgaguccaagaugagcgggaagggccagcagcagcagggccagaccgugaccaagaaguccgccgccgaggcgagcaagaagccgcgccagaagcgcaccgccacgaaggccuacaacgucacccaggccuucgggcggcgcggccccgagcagacccaggagaacuucggggaccaggagcugauccggcagggcaccgacuacaagcacuggccccagaucgcccaguucgcgcccuccgccagcgccuucuucgggaugucccgcaucggcauggaggugacgccgagcggcaccuggcugaccuacaccggggccaucaagcucgacgacaaggaccccaacuucaaggaccaggugauccugcugaacaagcacaucgacgccuacaagacguucccgcccaccgagcccaagaaggacaagaagaagaaggcggacgagacccaggcccucccccagcggcagaagaagcagcagaccgucacgcugcugcccgccgccgaccucgacgacuucuccaagcagcugcagcagagcauguccagcgcggacuccacccaggccugaggacuaguuauaagacugacuagcccgaugggccucccaacgggcccuccuccccuccuugcaccgagauuaauaaaaaaaaaaaaaaaaaaaaaaaaaaaaaaaaaaaaaaaaaaaaaaaaaaaaaaaaaaaaaaaaugcaucccccccccccccccccccccccccccccccaaaggcucuuuucagagccaccagaauu

SEQ ID NO: 21189 - RNA, 1477 nt, Artificial Sequence
  SARS-CoV-2__MT641510.1__nucleocapsid protein (N) mRNA gc
aggagaaagcuuaccaugagcgacaacggcccccagaaccagcgcaacgccccgcggaucaccuucgggggccccuccgacagcaccggguccaaccagaacggcgagcgcagcggggcccgguccaagcagcgccggccccagggccugcccaacaacacggcgagcugguucaccgcccucacccagcacggcaaggaggaccugaaguucccgcgcgggcagggcgugcccaucaacaccaacuccagccccgacgaccagaucggguacuaccggcgcgccacgcggcgcauccggggcggggacggcaagaugaaggaccugagcccccgcugguacuucuacuaccucggcaccgggccggaggccggccugcccuacggggccaacaaggacggcaucaucugggucgcgaccgagggcgcccugaacacccccaaggaccacaucgggacgcggaaccccgccaacaacgccgcgaucgugcuccagcugccgcgcggcaccacccugcccaagggguucuacgccgagggcucccgcgggggcucccaggccagcucccggagcuccagccggucccgcaacagcucccggaacagcacccccggcagcucccgcgggacgagccccgcccggauggccggcaacgggggcgacgcggcccucgcccugcugcuccuggaccgccugaaccagcucgaguccaagaugagcgggaagggccagcagcagcagggccagaccgugaccaagaaguccgccgccgaggcgagcaagaagccgcgccagaagcggaccgccacgaaggccuacaacgucacccaggccuucgggcgccggggccccgagcagacccaggggaacuucggcgaccaggagcugauccgccaggggaccgacuacaagcacuggccccagaucgcccaguucgcgcccuccgccagcgccuucuucggcaugucccggaucggcauggaggugacgccgagcgggaccuggcugaccuacaccggcgccaucaagcucgacgacaaggaccccaacuucaaggaccaggugauccugcugaacaagcacaucgacgccuacaagacguucccgcccaccgagcccaagaaggacaagaagaagaaggcggacgagacccaggcccucccccagcgccagaagaagcagcagaccgucacgcugcugcccgccgccgaccucgacgacuucuccaagcagcugcagcagagcauguccagcgcggacuccacccaggccugaggacuaguuauaagacugacuagcccgaugggccucccaacgggcccuccuccccuccuugcaccgagauuaauaaaaaaaaaaaaaaaaaaaaaaaaaaaaaaaaaaaaaaaaaaaaaaaaaaaaaaaaaaaaaaaaugcaucccccccccccccccccccccccccccccccaaaggcucuuuucagagccaccagaauu

SEQ ID NO: 21190 - RNA, 1477 nt, Artificial Sequence
  SARS-CoV-2__MT641567.1__nucleocapsid protein (N) mRNA gc
aggagaaagcuuaccaugagcgacaacggcccccagaaccagcgcaacgccccgcggaucaccuucgggggccccuccgacagcaccggguccaaccagaacggcgagcgcagcggggcccgguccaagcagcgccggccccagggccugcccaacaacacggcgagcugguucaccgcccucacccagcacggcaaggaggaccugaaguucccgcgcgggcagggcgugcccaucaacaccaacuccagccccgacgaccagaucggguacuaccggcgcgccacgcggcgcauccggggcggggacggcaagaugaaggaccugagcccccgcugguacuucuacuaccucggcaccgggccggaggccggccugcccuacggggccaacaaggacggcaucaucugggucgcgaccgagggcgcccugaacacccccaaggaccacaucgggacgcggaaccccgccaacuacgccgcgaucgugcuccagcugccgcagggcaccacccugcccaagggguucuacgccgagggcucccgcgggggcucccaggccagcucccggagcuccagccgcucccggaacagcucccgcaacagcacccccggcagcucccgggggacgagccccgcccgcauggccggcaacgggggcgacgcggcccucgcccugcugcuccuggaccggcugaaccagcucgaguccaagaugagcgggaagggccagcagcagcagggccagaccgugaccaagaaguccgccgccgaggcgagcaagaagccgcgccagaagcgcaccgccacgaaggccuacaacgucacccaggccuucgggcggcgcggccccgagcagacccaggggaacuucggcgaccaggagcugauccggcaggggaccgacuacaagcacuggccccagaucgcccaguucgcgcccuccgccagcgccuucuucggcaugucccgcaucggcauggaggugacgccgagcgggaccuggcugaccuacaccggcgccaucaagcucgacgacaaggaccccaacuucaaggaccaggugauccugcugaacaagcacaucgacgccuacaagacguucccgcccaccgagcccaagaaggacaagaagaagaaggcggacgagacccaggcccucccccagcggcagaagaagcagcagaccgucacgcugcugcccgccgccgaccucgacgacuucuccaagcagcugcagcagagcauguccagcgcggacuccacccaggccugaggacuaguuauaagacugacuagcccgaugggccucccaacgggcccuccuccccuccuugcaccgagauuaauaaaaaaaaaaaaaaaaaaaaaaaaaaaaaaaaaaaaaaaaaaaaaaaaaaaaaaaaaaaaaaaaugcaucccccccccccccccccccccccccccccccaaaggcucuuuucagagccaccagaauu

SEQ ID NO: 21191 - RNA, 1477 nt, Artificial Sequence
  SARS-CoV-2__MT641667.1__nucleocapsid protein (N) mRNA gc
aggagaaagcuuaccaugagcgacaacggcccccagaaccagcgcaacgccccgcggaucaccuucgggggccccuccgacagcaccggguccaaccagaacggcgagcgcagcggggcccgguccaagcagcgccggccccagggccugcccaacaacacggcgagcugguucaccgcccucacccagcacggcaaggaggaccugaaguucccgcgcgggcagggcgugcccaucaacaccaacuccagccccgacgaccagaucggguacuaccggcgcgccacgcggcgcauccugggcggggacggcaagaugaaggaccucagcccccggugguacuucuacuaccugggcaccgggccggaggccggccugcccuacggggccaacaaggacggcaucaucugggucgcgaccgagggcgcccucaacacccccaaggaccacaucgggacgcgcaaccccgccaacaacgccgcgaucgugcugcagcugccgcagggcaccacccuccccaagggguucuacgccgagggcucccgcgggggcucccaggccagcucccggagcuccagccggucccgcaacagcucccggaacagcacccccggcagcuccaagcgcacgagccccgcccggauggccgggaacggcggggacgcggcccuggcccugcuccugcuggaccgccucaaccagcuggaguccaagaugagcggcaaggggcagcagcagcagggccagaccgugaccaagaaguccgccgccgaggcgagcaagaagccgcggcagaagcgcaccgccacgaaggccuacaacgucacccaggccuucggccgccgggggcccgagcagacccagggcaacuucggggaccaggagcugauccgccagggcaccgacuacaagcacuggccccagaucgcccaguucgcgcccuccgccagcgccuucuucgggaugucccggaucggcauggaggugacgccgagcggcaccuggcucaccuacaccggggccaucaagcuggacgacaaggaccccaacuucaaggaccaggugauccugcucaacaagcacaucgacgccuacaagacguucccgcccaccgagcccaagaaggacaagaagaagaaggcggacgagacccaggcccugccccagcgccagaagaagcagcagaccgucacgcugcuccccgccgccgaccuggacgacuucuccaagcagcugcagcagagcauguccagcgcggacuccacccaggccugaggacuaguuauaagacugacuagcccgaugggccucccaacgggcccuccuccccuccuugcaccgagauuaauaaaaaaaaaaaaaaaaaaaaaaaaaaaaaaaaaaaaaaaaaaaaaaaaaaaaaaaaaaaaaaaaugcaucccccccccccccccccccccccccccccccaaaggcucuuuucagagccaccagaauu

SEQ ID NO: 21192 - RNA, 1477 nt, Artificial Sequence
  SARS-CoV-2__MT641708.1__nucleocapsid protein (N) mRNA gc
aggagaaagcuuaccaugagcgacaacggcccccagaaccagcgcaacgccccgcggaucaccuucgggggccccuccgacagcaccggguccaaccagaacggcgagcgcagcggggcccgguccaagcagcgccggccccagggccugcccaacaacacggcgagcugguucaccgcccucacccagcacggcaaggaggaccugaaguucccgcgcgggcagggcgugcccaucaacaccaacuccagccccgacgaccagaucggguacuaccggcgcgccacgcggcgcauccggggcggggacggcaagaugaaggaccugagcccccgcugguacuucuacuaccucggcaccgggccggaggccggccugcccuacggggccaacaaggacggcaucaucugggucgcgaccgagggcgcccugaacacccccaaggaccacaucgggacgcggaaccccgccaacaacgccgcgaucgugcuccagcugccgcagggcaccacccugcccaagggguucuacgccgagggcucccgcgggggcucccaggccagcucccggagcuccagccgcucccggaacagcucccgcaacagcacccccggcagcucccgggggacgagccccgcccgcauggccggcaacgggggcgacgcggcccucgcccugcugcuccuggaccggcugaaccagcucgaguccaagaugagcgggaagggccagcagcagcagggccagaccgugaccaagaaguccgccgccgaggcguucaagaagccgcgccagaagcgcaccgccacgaaggccuacaacgucacccaggccuucgggcggcgcggccccgagcagacccaggggaacuucggcgaccaggagcugauccggcaggggaccgacuacaagcacuggccccagaucgcccaguucgcgcccagcgccuccgccuucuucggcaugagccgcaucggcauggaggugacgccguccgggaccuggcugaccuacaccggcgccaucaagcucgacgacaaggaccccaacuucaaggaccaggugauccugcugaacaagcacaucgacgccuacaagacguucccgcccaccgagcccaagaaggacaagaagaagaaggcggacgagacccaggcccucccccagcggcagaagaagcagcagaccgucacgcugcugcccgccgccgaccucgacgacuucagcaagcagcugcagcaguccaugagcuccgcggacagcacccaggccugaggacuaguuauaagacugacuagcccgaugggccucccaacgggcccuccuccccuccuugcaccgagauuaauaaaaaaaaaaaaaaaaaaaaaaaaaaaaaaaaaaaaaaaaaaaaaaaaaaaaaaaaaaaaaaaaugcaucccccccccccccccccccccccccccccccaaaggcucuuuucagagccaccagaauu

SEQ ID NO: 21193 - RNA, 1477 nt, Artificial Sequence
  SARS-CoV-2__MT641710.1__nucleocapsid protein (N) mRNA gc
aggagaaagcuuaccaugagcgacaacggcccccagaaccagcgcaacgccccgcggaucaccuucgggggccccuccgacagcaccggguccaaccagaacggcgagcgcagcggggcccgguccaagcagcgccggccccagggccugcccaacaacacggcgagcugguucaccgcccucacccagcacggcaaggaggaccugaaguucccgcgcgggcagggcgugcccaucaacaccaacuccagccccgacgaccagaucggguacuaccggcgcgccacgcggcgcauccggggcggggacggcaagaugaaggaccugagcccccgcugguacuucuacuaccucggcaccgggccggaggccggccugcccuacggggccaacaaggacggcaucaucugggucgcgaccgagggcgcccugaacacccccaaggaccacaucgggacgcggaaccccgccaacaacgccgcgaucgugcuccagcugccgcagggcaccacccugcccaagggguucuacgccgagggcucccgcgggggcucccaggccagcucccggagcuccagccgcucccggaacagcucccgcaacagcacccccggcagcucccgggggacgagccccgcccgcauggccggcaacgggggcgacgcggcccucgcccugcugcuccuggaccggcugaaccagcucgaguccaagaugagcgggaagggccagcagcagcagggccagaccgugaccaagaaguccgccgccgaggcgagcaagaagccgcgccagaagcgcaccgccacgaaggccuacaacgucacccaggccuucgggcggcgcggccccgagcagacccaggggaacuucggcgaccaggagcugauccggcaggggaccgacuacaagcacuggccccagaucgcccaguucgcgcccuccgccagcgccuucuucggcaugucccgcaucggcauggaggugacgccgagcgggaccuggcugaccuacaccggcgccaucaagcucgacgacaaggaccccaacuucaaggaccaggugauccugcugaacaagcacaucgacgccuacaagacguucccgcccaccgagcccaagaaggacaagaagaagaaggcggacgagacccaggcccucucccagcggcagaagaagcagcagaccgucacgcugcugcccgccgccgaccucgacgacuucagcaagcagcugcagcaguccaugagcuccgcggacagcacccaggccugaggacuaguuauaagacugacuagcccgaugggccucccaacgggcccuccuccccuccuugcaccgagauuaauaaaaaaaaaaaaaaaaaaaaaaaaaaaaaaaaaaaaaaaaaaaaaaaaaaaaaaaaaaaaaaaaugcaucccccccccccccccccccccccccccccccaaaggcucuuuucagagccaccagaauu

SEQ ID NO: 21194 - RNA, 1477 nt, Artificial Sequence
  SARS-CoV-2__MT641738.1__nucleocapsid protein (N) mRNA gc
aggagaaagcuuaccaugagcgacaacggcccccagaaccagcgcaacgccccgcggaucaccuucgggggccccuccgacagcaccggguccaaccagaacggcgagcgcagcggggcccgguccaagcagcgccggccccagggccugcccaacaacacggcgagcugguucaccgcccucacccagcacggcaaggaggaccugaaguucccgcgcgggcagggcgugcccaucaacaccaacuccagccccgacgaccagaucggguacuaccggcgcgccacgcggcgcauccggggcggggacggcaagaugaaggaccugagcccccgcugguacuucuacuaccucggcaccgggccggaggccggccugcccuacggggccaacaaggacggcaucaucugggucgcgaccgagggcgcccugaacacccccaaggaccacaucgggacgcggaaccccgccaacaacgccgcgaucgugcuccagcugccgcagggcaccacccugcccaagggguucuacgccgagggcucccgcgggggcucccaggccagcucccggagcuccagccgcucccggaacagcucccgcaacagcacccccggcagcucccgggggacgagccccgcccgcauggccggcaacgggggcgacgcggcccucgcccugcugcuccuggaccggcugaaccagcucgaguccaagaugagcgggaagggccagcagcagcagggccagaccgugaccaagaaguccgccgccgaggcgagcaagaagccgcgccagaagcgcaccgccacgaaggccuacaacgucacccaggccuucgggcggcgcggccccgagcagacccaggggaacuucggcgaccaggagcugauccggcaggggaccgacuacaagcacugcccccagaucgcccaguucgcgcccuccgccagcgccuucuucggcaugucccgcaucggcauggaggugacgccgagcgggaccuggcugaccuacaccggcgccaucaagcucgacgacaaggaccccaacuucaaggaccaggugauccugcugaacaagcacaucgacgccuacaagacguucccgcccaccgagcccaagaaggacaagaagaagaaggcggacgagacccaggcccucucccagcggcagaagaagcagcagaccgucacgcugcugcccgccgccgaccucgacgacuucagcaagcagcugcagcaguccaugagcuccgcggacagcacccaggccugaggacuaguuauaagacugacuagcccgaugggccucccaacgggcccuccuccccuccuugcaccgagauuaauaaaaaaaaaaaaaaaaaaaaaaaaaaaaaaaaaaaaaaaaaaaaaaaaaaaaaaaaaaaaaaaaugcaucccccccccccccccccccccccccccccccaaaggcucuuuucagagccaccagaauu

SEQ ID NO: 21195 - RNA, 1477 nt, Artificial Sequence
  SARS-CoV-2__MT642069.1__nucleocapsid protein (N) mRNA gc
aggagaaagcuuaccaugagcgacaacggcccccagaaccagcgcaacgccccgcggaucaccuucgggggccccuccgacagcaccggguccaaccagaacggcgagcgcagcggggcccgguccaagcagcgccggccccagggccugcccaacaacacggcgagcugguucaccgcccucacccagcacggcaagguggaccugaaguucccgcgcgggcagggcguccccaucaacaccaacuccagccccgacgaccagaucggguacuaccggcgcgccacgcggcgcauccggggcggggacggcaagaugaaggaccugagcccccgcugguacuucuacuaccucggcaccgggccggaggccggccugcccuacggggccaacaaggacggcaucaucuggguggcgaccgagggcgcccugaacacccccaaggaccacaucgggacgcggaaccccgccaacaacgccgcgaucgugcuccagcugccgcagggcaccacccugcccaagggguucuacgccgagggcucccgcgggggcucccaggccagcucccggagcuccagccgcucccggaacagcucccgcaacagcacccccggcagcucccgggggacgagccccgcccgcauggccggcaacgggggcgacgcggcccucgcccugcugcuccuggaccggcugaaccagcucgaguccaagaugagcgggaagggccagcagcagcagggccagaccgucaccaagaaguccgccgccgaggcgagcaagaagccgcgccagaagcgcaccgccacgaaggccuacaacgugacccaggccuucgggcggcgcggccccgagcagacccaggggaacuucggcgaccaggagcugauccggcaggggaccgacuacaagcacuggccccagaucgcccaguucgcgcccuccgccagcgccuucuucggcaugucccgcaucggcauggaggugacgccgagcgggaccuggcugaccuacaccggcgccaucaagcucgacgacaaggaccccaacuucaaggaccaggucauccugcugaacaagcacaucgacgccuacaagacguucccgcccaccgagcccaagaaggacaagaagaagaaggcggacgagacccaggcccucccccagcggcagaagaagcagcagaccgugacgcugcugcccgccgccgaccucgacgacuucuccaagcagcugcagcagagcauguccagcgcggacuccacccaggccugaggacuaguuauaagacugacuagcccgaugggccucccaacgggcccuccuccccuccuugcaccgagauuaauaaaaaaaaaaaaaaaaaaaaaaaaaaaaaaaaaaaaaaaaaaaaaaaaaaaaaaaaaaaaaaaaugcaucccccccccccccccccccccccccccccccaaaggcucuuuucagagccaccagaauu

SEQ ID NO: 21196 - RNA, 1477 nt, Artificial Sequence
  SARS-CoV-2__MT642080.1__nucleocapsid protein (N) mRNA gc
aggagaaagcuuaccaugagcgacaacggcccccagaaccagcgcaacgccccgcggaucaccuucgggggccccuccgacagcaccggguccaaccagaacggcgagcgcagcggggcccgguccaagcagcgccggccccagggccugcccaacaacacggcgagcugguucaccgcccucacccagcacggcaagguggaccugaaguucccgcgcgggcagggcguccccaucaacaccaacuccagccccgacgaccagaucggguacuaccggcgcgccacgcggcgcauccggggcggggacggcaagaugaaggaccugagcccccgcugguacuucuacuaccucggcaccgggccggaggccggccugcccuacggggccaacaaggacggcaucaucuggguggcgaccgagggcgcccugaacacccccaaggaccacaucgggacgcggaaccccgccaacaacgccgcgaucgugcuccagcugccgcagggcaccacccugcccaagggguucuacgccgagggcagccgcgggggcucccaggccagcucccggagcuccagccgcucccggaacagccuccgcaacuccacccccggcagcagccgggggacgucccccgcccgcauggccggcaacgggggcgacgcggcccuggcccugcuccugcuggaccggcucaaccagcuggagagcaagauguccgggaagggccagcagcagcagggccagaccgucaccaagaaguccgccgccgaggcguccaagaagccgcgccagaagcgcaccgccacgaaggccuacaacgugacccaggccuucgggcggcgcggccccgagcagacccaggggaacuucggcgaccaggagcugauccggcaggggaccgacuacaagcacuggccccagaucgcccaguucgcgcccagcgccuccgccuucuucggcaugagccgcaucggcauggaggugacgccguccgggaccuggcucaccuacaccggcgccaucaagcuggacgacaaggaccccaacuucaaggaccaggucauccugcucaacaagcacaucgacgccuacaagacguucccgcccaccgagcccaagaaggacaagaagaagaaggcggacgagacccaggcccugccccagcggcagaagaagcagcagaccgugacgcugcuccccgccgccgaccuggacgacuucagcaagcagcugcagcaguccaugagcuccgcggacagcacccaggccugaggacuaguuauaagacugacuagcccgaugggccucccaacgggcccuccuccccuccuugcaccgagauuaauaaaaaaaaaaaaaaaaaaaaaaaaaaaaaaaaaaaaaaaaaaaaaaaaaaaaaaaaaaaaaaaaugcaucccccccccccccccccccccccccccccccaaaggcucuuuucagagccaccagaauu

SEQ ID NO: 21197 - RNA, 1477 nt, Artificial Sequence
  SARS-CoV-2__MT642120.1__nucleocapsid protein (N) mRNA gc
aggagaaagcuuaccaugagcgacaacggcccccagaaccagcgcaacgccccgcggaucaccuucgggggccccuccgacagcaccggguccaaccagaacggcgagcgcagcggggcccgguccaagcagcgccggccccagggccugcccaacaacacggcgagcugguucaccgcccucacccagcacggcaaggaggaccugaaguucccgcgcgggcagggcgugcccaucaacaccaacuccagccccgacgaccagaucggguacuaccggcgcgccacgcggcgcauccggggcggggacggcaagaugaaggaccugagcccccgcugguacuucuacuaccucggcaccgggccggaggccggccugcccuacggggccaacaaggacggcaucaucugggucgcgaccgagggcgcccugaacacccccaaggaccacaucgggacgcggaaccccgccaacaacgccgcgaucgugcuccagcugccgcagggcaccacccugcccaagggguucuacgccgagggcucccgcgggggcucccaggccagcucccggagcuccagccgcucccggaacagcucccgcaacagcacccccggcagcucccgggggacgagccccgcccgcauggccggcaacgggggcgacgcggcccucgcccugcugcuccuggaccggcugaaccagcucgaguccaagaugagcgggaagggccagcagcagcagggccagaccgugaccaagaaguccgccgccgaggcgagcaagaagccgcgccagaagcgcaccgccacgaaggccuacaacgucacccaggccuucgggcggcgcggccccgagcagacccaggggaacuucggcgaccaggagcugauccggcaggggaccgacuacaagcacuggccccagaucgcccaguucgcgcccuccgccagcgccuucuucggcaugucccgcaucggcauggaggugacgccgagcgggaccuggcugaccuacaccggcgccaucaagcucgacgacaaggaccccaacuucaaggaccaggugauccugcugaacaagcacaucgacgccuacaagacguucccgcccaccgagcccaagaaggacaagaagaagaaggcggacgagacccaggcccucccccagcggcagaagaagcagcagaccgucacgcugcugcccgccguggaccucgacgacuucuccaagcagcugcagcagagcauguccagcgccgacuccacccaggcgugaggacuaguuauaagacugacuagcccgaugggccucccaacgggcccuccuccccuccuugcaccgagauuaauaaaaaaaaaaaaaaaaaaaaaaaaaaaaaaaaaaaaaaaaaaaaaaaaaaaaaaaaaaaaaaaaugcaucccccccccccccccccccccccccccccccaaaggcucuuuucagagccaccagaauu

SEQ ID NO: 21198 - RNA, 1477 nt, Artificial Sequence
  SARS-CoV-2__MT642181.1__nucleocapsid protein (N) mRNA gc
aggagaaagcuuaccaugagcgacaacggcccccagaaccagcgcaacgccccgcggaucaccuucgggggccccuccgacagcaccggguccaaccagaacggcgagcgcagcggggcccgguccaagcagcgccggccccagggccugcccaacaacacggcgagcugguucaccgcccucacccagcacggcaaggaggaccugaaguucccgcgcgggcagggcgugcccaucaacaccaacuccagccccgacgaccagaucggguacuaccggcgcgccacgcggcgcauccggggcggggacggcaagaugaaggaccugagcccccgcugguacuucuacuaccucggcaccgggccggaggccggccugcccuacggggccaacaaggacggcaucaucugggucgcgaccgagggcgcccugaacacccccaaggaccacaucgggacgcggaaccccgccaacaacgccgcgaucgugcuccagcugccgcagggcaccacccugcccaagggguucuacgccgagggcucccgcgggggcucccaggccagcucccggagcuccagccgcucccggaacagcucccgcaacagcacccccggcagcucccgggggacgagccccgcccgcauggccggcaacgggggcgacgcggcccucgcccugcugcuccuggaccggcugaaccagcucgaguccaagaugagcgggaagggccagcagcagcagggccagaccgugaccaagaaguccgccgccgaggcgagcaagaagccgcgccagaagcgcaccgccacgaaggccuacaacgucacccaggccuucgggcggcgcggccccgagcagacccaggggaacuucggcgaccaggagcugauccggcaggggaccgacuacaagcacuggccccagaucgcccaguucgcgcccuccgccagcgccuucuucggcaugucccgcaucggcauggaggugacgccgagcgggaccuggcugaccuacaccggcgccaucaagcucgacgacaaggaccccaacuucaaguaccaggugauccugcugaacaagcacaucgacgccuacaagacguucccgcccaccgagcccaagaaggacaagaagaagaaggcggacgagacccaggcccucccccagcggcagaagaagcagcagaccgucacgcugcugcccgccgccgaccucgacgacuucuccaagcagcugcagcagagcauguccagcgcggacuccacccaggccugaggacuaguuauaagacugacuagcccgaugggccucccaacgggcccuccuccccuccuugcaccgagauuaauaaaaaaaaaaaaaaaaaaaaaaaaaaaaaaaaaaaaaaaaaaaaaaaaaaaaaaaaaaaaaaaaugcaucccccccccccccccccccccccccccccccaaaggcucuuuucagagccaccagaauu

SEQ ID NO: 21199 - RNA, 1477 nt, Artificial Sequence
  SARS-CoV-2__MT642410.1__nucleocapsid protein (N) mRNA gc
aggagaaagcuuaccaugagcgacaacggcccccagaaccagcgcaacgccccgcggaucaccuucgggggccccuccgacagcaccggguccaaccagaacgccgagcgcagcggcgcgcgguccaagcagcgccggccccaggggcugcccaacaacacggccagcugguucaccgcccucacccagcacggcaaggaggaccugaaguucccgcgcggccagggggugcccaucaacaccaacuccagccccgacgaccagaucggcuacuaccggcgcgccacgcggcgcauccgcgggggcgacgggaagaugaaggaccugagcccccggugguacuucuacuaccucggcaccggcccggaggccgggcugcccuacggcgcgaacaaggacgggaucaucugggucgccaccgagggcgcccugaacacccccaaggaccacaucggcacgcggaaccccgccaacaacgcggccaucgugcuccagcugccgcaggggaccacccugcccaagggcuucuacgccgaggggucccgcggcgggucccaggccagcucccggagcuccagccgcucccggaacagcucccgcaacagcacccccggcagcucccggggcacgagccccgcccgcauggcggggaacggcggggacgccgcccucgcccugcugcuccuggaccggcugaaccagcucgaguccaagaugagcggcaaggggcagcagcagcagggccagaccgugaccaagaaguccgccgcggaggccagcaagaagccgcgccagaagcgcaccgccacgaaggccuacaacgucacccaggccuucggccggcgcgggcccgagcagacccagggcaacuucggggaccaggagcugauccggcagggcaccgacuacaagcacuggccccagaucgcgcaguucgcccccuccgccagcgccuucuucgggaugucccgcaucggcauggaggugacgccgagcggcaccuggcugaccuacaccggggccaucaagcucgacgacaaggaccccaacuucaaggaccaggugauccugcugaacaagcacaucgacgcguacaagacguucccgcccaccgagcccaagaaggacaagaagaagaaggccgacgagacccaggcccucccccagcggcagaagaagcagcagaccgucacgcugcugcccgccgcggaccucgacgacuucuccaagcagcugcagcagagcauguccagcgccgacuccacccaggccugaggacuaguuauaagacugacuagcccgaugggccucccaacgggcccuccuccccuccuugcaccgagauuaauaaaaaaaaaaaaaaaaaaaaaaaaaaaaaaaaaaaaaaaaaaaaaaaaaaaaaaaaaaaaaaaaugcaucccccccccccccccccccccccccccccccaaaggcucuuuucagagccaccagaauu

SEQ ID NO: 21200 - RNA, 1477 nt, Artificial Sequence
  SARS-CoV-2__MT635408.1__nucleocapsid protein (N) mRNA gc
aggagaaagcuuaccaugagcgacaacggcccccagaaccagcgcaacgccccgcggaucaccuucgggggccccuccgacagcaccggguccaaccagaacggcgagcgcagcggggcccgguccaagcagcgccggccccagggccugcccaacaacacggcgagcugguucaccgcccucacccagcacggcaaggaggaccugaaguucccgcgcgggcagggcgugcccaucaacaccaacuccagccccgacgaccagaucggguacuaccggcgcgccacgcggcgcauccggggcggggacggcaagaugaaggaccugagcccccgcugguacuucuacuaccucggcaccgggccggaggccggccugcccuacggggccaacaaggacggcaucaucugggucgugaccgagggcgcgcugaacacccccaaggaccacaucgggacgcggaaccccgccaacaacgccgccaucgugcuccagcugccgcagggcaccacccugcccaagggguucuacgcggagggcucccgcgggggcucccaggccagcucccggagcuccagccgcucccggaacagcucccgcaacagcacccccggcagcucccgggggacgagccccgcccgcauggccggcaacgggggcgacgccgcgcucgcccugcugcuccuggaccggcugaaccagcucgaguccaagaugagcgggaagggccagcagcagcagggccagaccgucaccaagaaguccgccgccgaggccagcaagaagccgcgccagaagcgcaccgcgacgaaggccuacaacgugacccaggccuucgggcggcgcggccccgagcagacccaggggaacuucggcgaccaggagcugauccggcaggggaccgacuacaagcacuggccccagaucgcccaguucgcccccuccgcgagcgccuucuucggcaugucccgcaucggcauggaggugacgccgagcgggaccuggcugaccuacaccggcgccaucaagcucgacgacaaggaccccaacuucaaggaccaggucauccugcugaacaagcacaucgacgccuacaagacguucccgcccaccgagcccaagaaggacaagaagaagaaggccgacgagacccaggcgcucccccagcggcagaagaagcagcagaccgugacgcugcugcccgccgccgaccucgacgacuucuccaagcagcugcagcagagcauguccagcgccgacuccacccaggcgugaggacuaguuauaagacugacuagcccgaugggccucccaacgggcccuccuccccuccuugcaccgagauuaauaaaaaaaaaaaaaaaaaaaaaaaaaaaaaaaaaaaaaaaaaaaaaaaaaaaaaaaaaaaaaaaaugcaucccccccccccccccccccccccccccccccaaaggcucuuuucagagccaccagaauu

SEQ ID NO: 21201 - RNA, 1477 nt, Artificial Sequence
  SARS-CoV-2__MT635672.1__nucleocapsid protein (N) mRNA gc
aggagaaagcuuaccaugagcgacaacggcccccagaaccagcgcaacgccccgcggaucaccuucgggggccccuccgacagcaccggguccaaccagaacggcgagcgcagcggggcccgguccaagcagcgccggccccagggccugcccaacaacacggcgagcugguucaccgcccucacccagcacggcaaggaggaccugaaguucccgcgcgggcagggcgugcccaucaacaccaacuccagccccgacgaccagaucggguacuaccggcgcgccacgcggcgcauccggggcggggacggcaagaugaaggaccugagcccccgcugguacuucuacuaccucggcaccgggccggaggccggccugcccuacggggccaacaaggacggcaucaucugggucgcgaccgagggcgcccugaacacccccaaggaccacaucgggacgcggaaccccgccaacaacgccgcgaucgugcuccagcugccgcagggcaccacccugcccaagggguucuacgccgagggcucccgcgggggcucccaggccagcucccggagcuccagccgcucccggaacagcucccgcaacagcacccccggcagcuccaagcggacgagccccgcccgcauggccgggaacggcggggacgcggcccucgcccugcugcuccuggaccggcugaaccagcucgaguccaagaugagcggcaaggggcagcagcagcagggccagaccgugaccaagaaguccgccgccgaggcgagcaagaagccgcgccagaagcgcaccgccacgaaggccuacaacgucacccaggccuucggccggcgcgggcccgagcagacccagggcaacuucggggaccaggagcugauccggcagggcaccgacuacaagcacuggccccagaucgcccaguucgcgcccuccgccagcgccuucuucgggaugucccgcaucggcauggaggugacgccgagcggcaccuggcugaccuacaccggggccaucaagcucgacgacaaggaccccaacuucaaguaccaggugauccugcugaacaagcacaucgacgccuacaagacguucccgcccaccgagcccaagaaggacaagaacaagaaggcggacgagacccaggcccucccccagcggcagaagaagcagcagaccgucacgcugcugcccgccgccgaccucgacgacuucuccaagcagcugcagcagagcauguccagcgcggacuccacccaggccugaggacuaguuauaagacugacuagcccgaugggccucccaacgggcccuccuccccuccuugcaccgagauuaauaaaaaaaaaaaaaaaaaaaaaaaaaaaaaaaaaaaaaaaaaaaaaaaaaaaaaaaaaaaaaaaaugcaucccccccccccccccccccccccccccccccaaaggcucuuuucagagccaccagaauu

SEQ ID NO: 21202 - RNA, 1477 nt, Artificial Sequence
  SARS-CoV-2__MT627240.1__nucleocapsid protein (N) mRNA gc
aggagaaagcuuaccaugagcgacaacggcccccagaaccagcgcaacgccccgcggaucaccuucgggggccccuccgacagcaccggguccaaccagaacggcgagcgcagcggggcccgguccaagcagcgccggccccagggccugcccaacaacacggcgagcugguucaccgcccucacccagcacggcaaggaggaccugaaguucccgcgcgggcagggcgugcccaucaacaccaacuccagccccgacgaccagaucggguacuaccggcgcgccacgcggcgcauccggggcggggacggcaagaugaaggaccugagcccccgcugguacuucuacuaccucggcaccgggccggaggccggccugcccuacggggccaacaaggacggcaucaucugggucgcgaccgagggcgcccugaacacccccaaggaccacuucgggacgcggaaccccgccaacaacgccgcgaucgugcuccagcugccgcagggcaccacccugcccaagggguucuacgccgagggcucccgcgggggcucccaggccagcucccggagcuccagccgcucccggaacagcucccgcaacagcacccccggcagcucccgggggacgagccccgcccgcauggccggcaacgggggcgacgcggcccucgcccugcugcuccuggaccggcugaaccagcucgaguccaagaugagcgggaagggccagcagcagcagggccagaccgugaccaagaaguccgccgccgaggcgagcaagaagccgcgccagaagcgcaccgccacgaaggccuacaacgucacccaggccuucgggcggcgcggccccgagcagacccaggggaacuucggcgaccaggagcugauccggcaggggaccgacuacaagcacuggccccagaucgcccaguucgcgcccuccgccagcgccuucuucggcaugucccgcaucggcauggaggugacgccgagcgggaccuggcugaccuacaccggcgccaucaagcucgacgacaaggaccccaacuucaaggaccaggugauccugcugaacaagcacaucgacgccuacaagacguucccgcccaccgagcccaagaaggacaagaagaagaaggcggacgagacccaggcccucccccagcggcagaagaagcagcagaccgucacgcugcugcccgccgccgaccucgacgacuucuccaagcagcugcagcagagcauguccagcgcggacuccacccaggccugaggacuaguuauaagacugacuagcccgaugggccucccaacgggcccuccuccccuccuugcaccgagauuaauaaaaaaaaaaaaaaaaaaaaaaaaaaaaaaaaaaaaaaaaaaaaaaaaaaaaaaaaaaaaaaaaugcaucccccccccccccccccccccccccccccccaaaggcucuuuucagagccaccagaauu

SEQ ID NO: 21203 - RNA, 1477 nt, Artificial Sequence
  SARS-CoV-2__MT627244.1__nucleocapsid protein (N) mRNA gc
aggagaaagcuuaccaugagcgacaacggcccccagaaccagcgcaacgccccgcggaucaccuucgggggccccuccgacagcaccggguccaaccagaacggcgagcgcagcggggcccgguccaagcagcgccggccccagggccugcccaacaacacggcgagcugguucaccgcccucacccagcacggcaaggaggaccugaaguucccgcgcgggcagggcgugcccaucaacaccaacuccagccccgacgaccagaucggguacuaccggcgcgccacgcggcgcauccggggcggggacggcaagaugaaggaccugagcccccgcugguacuucuacuaccucggcaccgggccggaggccggccugcccuacggggccaacaaggacggcaucaucugggucgcgaccgagggcgcccugaacacccccaaggaccacaucgggacgcggaaccccgccaacaacgccgcgaucgugcuccagcugccgcagggcaccacccugcccaagggguucuacgccgagggcagccgcgggggcucccaggccagcucccggagcuccagccgcucccggaacagcucccgcaacagcacccccggcagcucccgggggacgagccccgcccgcauggccggcaacgggggcgacgcggcccucgcccugcugcuccuggaccggcugaaccagcucgaguccaagaugccggggaagggccagcagcagcagggccagaccgugaccaagaaguccgccgccgaggcguccaagaagccccgccagaagcgcaccgccacgaaggccuacaacgucacccaggccuucgggcggcgcggccccgagcagacccaggggaacuucggcgaccaggagcugauccggcaggggaccgacuacaagcacuggccccagaucgcccaguucgcgccgagcgccuccgccuucuucggcaugagccgcaucggcauggaggugacgcccuccgggaccuggcugaccuacaccggcgccaucaagcucgacgacaaggaccccaacuucaaggaccaggugauccugcugaacaagcacaucgacgccuacaagacguucccgcccaccgagcccaagaaggacaagaagaagaaggcggacgagacccaggcccucccccagcggcagaagaagcagcagaccgucacgcugcugcccgccgccgaccucgacgacuucagcaagcagcugcagcaguccaugagcuccgcggacagcacccaggccugaggacuaguuauaagacugacuagcccgaugggccucccaacgggcccuccuccccuccuugcaccgagauuaauaaaaaaaaaaaaaaaaaaaaaaaaaaaaaaaaaaaaaaaaaaaaaaaaaaaaaaaaaaaaaaaaugcaucccccccccccccccccccccccccccccccaaaggcucuuuucagagccaccagaauu

SEQ ID NO: 21204 - RNA, 1477 nt, Artificial Sequence
  SARS-CoV-2__MT627415.1__nucleocapsid protein (N) mRNA gc
aggagaaagcuuaccaugagcgacaacggcccccagaaccagcgcaacgccccgcggaucaccuucgggggccccuccgacagcaccggguccaaccagaacggcgagcgcagcggggcccgguccaagcagcgccggccccagggccugcccaacaacacggcgagcugguucaccgcccucacccagcacggcaaggaggaccugaaguucccgcgcgggcagggcgugcccaucaacaccaacuccagccccgacgaccagaucggguacuaccggcgcgccacgcggcgcauccggggcggggacggcaagaugaaggaccugagcccccgcugguacuucuacuaccucggcaccgggccggaggccggccugcccuacggggccaacaaggacggcaucaucugggucgcgaccgagggcgcccugaacacccccaaggaccacaucgggacgcggaaccccgccaacaacgccgcgaucgugcuccagcugccgcagggcaccacccugcccaagggguucuacgccgagggcucccgcgggggcucccaggccagcuccugcagcuccagccggucccgcaacagcucccggaacagcacccccggcagcuccaagcgcacgagccccgcccggauggccgggaacggcggggacgcggcccucgcccugcugcuccuggaccgccugaaccagcucgaguccaagaugagcggcaaggggcagcagcagcagggccagaccgugaccaagaaguccgccgccgaggcgagcaagaagccgcggcagaagcgcaccgccacgaaggccuacaacgucacccaggccuucggccgccgggggcccgagcagacccagggcaacuucggggaccaggagcugauccgccagggcaccgacuacaagcacuggccccagaucgcccaguucgcgcccuccgccagcgccuucuucgggaugucccggaucggcauggaggugacgccgagcggcaccuggcugaccuacaccggggccaucaagcucgacgacaaggaccccaacuucaaggaccaggugauccugcugaacaagcacaucgacgccuacaagacguucccgcccaccgagcccaagaaggacaagaagaagaaggcggacgagacccaggcccucccccagcgccagaagaagcagcagaccgucacgcugcugcccgccgccgaccucgacgacuucuccaagcagcugcagcagagcauguccagcgcggacuccacccaggccugaggacuaguuauaagacugacuagcccgaugggccucccaacgggcccuccuccccuccuugcaccgagauuaauaaaaaaaaaaaaaaaaaaaaaaaaaaaaaaaaaaaaaaaaaaaaaaaaaaaaaaaaaaaaaaaaugcaucccccccccccccccccccccccccccccccaaaggcucuuuucagagccaccagaauu

SEQ ID NO: 21205 - RNA, 1477 nt, Artificial Sequence
  SARS-CoV-2__MT627424.1__nucleocapsid protein (N) mRNA gc
aggagaaagcuuaccaugagcgacaacggcccccagaaccagcgcaacgccccgcggaucaccuucgggggccccuccgacagcaccggguccaaccagaacggcgagcgcagcggggcccgguccaagcagcgccggccccagggccugcccaacaacacggcgagcugguucaccgcccucacccagcacggcaaggaggaccugaaguucccgcgcgggcagggcgugcccaucaacaccaacuccagccccgacgaccagaucggguacuaccggcgcgccacgcggcgcauccggggcggggacggcaagaugaaggaccugagcccccgcugguacuucuacuaccucggcaccgggccggaggccggccugcccuacggggccaacaaggacggcaucaucugggucgcgaccgagggcgcccugaacacccccaaggaccacaucgggacgcggaaccccgccaacaacgccgcgaucgugcuccagcugccgcagggcaccacccugcccaagggguucuacgccgagggcucccgcgggggcucccaggccagcucccggagcuccagccgcucccggaacagcucccgcaacagcacccccggcagcucccgggggacgagccccgcccgcauggccggcaacgggggcgacgcggcccucgcccugcugcuccuggaccggcugaaccagcucgaguccaagaugagcgggaagggccagcagcagcagggccagaccgugaccaagaaguccgccgccgaggcgagcaagaagccgcgccagaagcgcaccgccacgaaggccuacaacgucacccaggccuucgggcggcgcggccccgagcagacccaggggaacuucggcgaccaggagcugauccggcaggggaccgacuacaagcacuggccccagaucgcccaguucgcgcccuccgccagcgccuucuucggcaugucccgcaucggcauggaggugacgccgagcgggaccuggcugaccuacaccggcgccaucaagcucgacgacaaggaccccaacuucaaggaccaggugauccugcugaacaagcacaucgacgccuacaagacguuccuccccaccgagcccaagaaggacaagaagaagaaggcggacgagacccaggcccugccgcagcggcagaagaagcagcagaccgucacgcugcuccccgccgccgaccuggacgacuucuccaagcagcugcagcagagcauguccagcgcggacuccacccaggccugaggacuaguuauaagacugacuagcccgaugggccucccaacgggcccuccuccccuccuugcaccgagauuaauaaaaaaaaaaaaaaaaaaaaaaaaaaaaaaaaaaaaaaaaaaaaaaaaaaaaaaaaaaaaaaaaugcaucccccccccccccccccccccccccccccccaaaggcucuuuucagagccaccagaauu

SEQ ID NO: 21206 - RNA, 1477 nt, Artificial Sequence
  SARS-CoV-2__MT627607.1__nucleocapsid protein (N) mRNA gc
aggagaaagcuuaccaugagcgacaacggcccccagaaccagcgcaacgccccgcggaucaccuucgggggccccuccgacagcaccggguccaaccagaacggcgagcgcagcggggcccgguccaagcagcgccggccccagggccugcccaacaacacggcgagcugguucaccgcccucacccagcacggcaaggaggaccugaaguucccgcgcgggcagggcgugcccaucaacaccaacuccagccccgacgaccagaucggguacuaccggcgcgccacgcggcgcauccggggcggggacggcaagaugaaggaccugagcccccgcugguacuucuacuaccucggcaccgggccggaggccggccugcccuacgggaccaacaaggacggcaucaucugggucgccaccgagggcgcgcugaacacgcccaaggaccacaucgggacccggaaccccgccaacaacgccgccaucgugcuccagcugccgcagggcaccacccugcccaagggguucuacgcggagggcucccgcgggggcucccaggccagcucccggagcuccagccgcucccggaacagcucccgcaacagcacgcccggcagcucccgggggaccagccccgcccgcauggccggcaacgggggcgacgccgcgcucgcccugcugcuccuggaccggcugaaccagcucgaguccaagaugagcgggaagggccagcagcagcagggccagaccgugaccaagaaguccgccgccgaggccagcaagaagccgcgccagaagcgcacggcgaccaaggccuacaacgucacccaggccuucgggcggcgcggccccgagcagacccaggggaacuucggcgaccaggagcugauccggcaggggacggacuacaagcacuggccccagaucgcccaguucgcccccuccgcgagcgccuucuucggcaugucccgcaucggcauggaggugaccccgagcgggaccuggcugaccuacacgggcgccaucaagcucgacgacaaggaccccaacuucaaggaccaggugauccugcugaacaagcacaucgacgccuacaagaccuucccgcccaccgagcccaagaaggacaagaagaagaaggccgacgagacccaggcgcucccccagcggcagaagaagcagcagacggucacccugcugcccgccgccgaccucgacgacuucuccaagcagcugcagcagagcauguccagcgccgacuccacccaggcgugaggacuaguuauaagacugacuagcccgaugggccucccaacgggcccuccuccccuccuugcaccgagauuaauaaaaaaaaaaaaaaaaaaaaaaaaaaaaaaaaaaaaaaaaaaaaaaaaaaaaaaaaaaaaaaaaugcaucccccccccccccccccccccccccccccccaaaggcucuuuucagagccaccagaauu

SEQ ID NO: 21207 - RNA, 1477 nt, Artificial Sequence
  SARS-CoV-2__MT627920.1__nucleocapsid protein (N) mRNA gc
aggagaaagcuuaccaugagcgacaacggcccccagaaccagcgcaacgccccgcggaucaccuucgggggccccuccgacagcaccggguccaaccagaacggcgagcgcagcggggcccgguccaagcagcgccggccccagggccugcccaacaacacggcgagcugguucaccgcccucacccagcacggcaaggaggaccugaaguucccgcgcgggcagggcgugcccaucaacaccaacuccagccccgacgaccagaucggguacuaccggcgcgccacgcggcgcauccggggcggggacggcaagaugaaggaccugagcccccgcugguacuucuacuaccucggcaccgggccggaggccggccugcccuacggggccaacaaggacggcaucaucugggucgcgaccgagggcgcccugaacacccccaaggaccacaucgggacgcggaaccccgccaacaacgccgcgaucgugcuccagcugccgcagggcaccacccugcccaagggguucuacgccgagggcucccgcgggggcucccaggccagcucccggagcuccagccgcucccggaacagcucccgcaacagcacccccggcagcucccgggggacgagccccgcccgcauggccggcaacgggggcgacgcggcccucgcccugcugcuccuggaccggcugaaccagcucgaguccaagaugagcgggaagggccagcagcagcagggccagaccgugaccaagaaguucgccgccgaggcguccaagaagccgcgccagaagcgcaccgccacgaaggccuacaaccugacccaggccuucgggcggcgcggccccgagcagacccaggggaacuucggcgaccaggagcugauccggcaggggaccgacuacaagcacuggccccagaucgcccaguucgcgcccagcgccuccgccuucuucggcaugagccgcaucggcauggaggucacgccguccgggaccuggcucaccuacaccggcgccaucaagcuggacgacaaggaccccaacuucaaggaccaggugauccugcucaacaagcacaucgacgccuacaagacguucccgcccaccgagcccaagaaggacaagaagaagaaggcggacgagacccaggcccugccccagcggcagaagaagcagcagaccgugacgcugcuccccgccgccgaccuggacgacuucagcaagcagcugcagcaguccaugagcuccgcggacagcacccaggccugaggacuaguuauaagacugacuagcccgaugggccucccaacgggcccuccuccccuccuugcaccgagauuaauaaaaaaaaaaaaaaaaaaaaaaaaaaaaaaaaaaaaaaaaaaaaaaaaaaaaaaaaaaaaaaaaugcaucccccccccccccccccccccccccccccccaaaggcucuuuucagagccaccagaauu

SEQ ID NO: 21208 - RNA, 1477 nt, Artificial Sequence
  SARS-CoV-2__MT627921.1__nucleocapsid protein (N) mRNA gc
aggagaaagcuuaccaugagcgacaacggcccccagaaccagcgcaacgccccgcggaucaccuucgggggccccuccgacagcaccggguccaaccagaacggcgagcgcagcggggcccgguccaagcagcgccggccccagggccugcccaacaacacggcgagcugguucaccgcccucacccagcacggcaaggaggaccugaaguucccgcgcgggcagggcgugcccaucaacaccaacuccagccccgacgaccagaucggguacuaccggcgcgccacgcggcgcauccggggcggggacggcaagaugaaggaccugagcccccgcugguacuucuacuaccucggcaccgggccggaggccggccugcccuacggggccaacaaggacggcaucaucugggucgcgaccgagggcgcccugaacacccccaaggaccacaucgggacgcggaaccccgccaacaacgccgcgaucgugcuccagcugccgcagggcaccacccugcccaagggguucuacgccgagggcagccgcgggggcucccaggccagcucccggagccucucccgcagccggaacuccagccgcaacuccacccccggcagcagccgggggacgucccccgcccgcauggccggcaacgggggcgacgcggcccuggcccugcuccugcuggaccggcucaaccagcuggagagcaagauguccgggaagggccagcagcagcagggccagaccgugaccaagaaguccgccgccgaggcguccaagaagccgcgccagaagcgcaccgccacgaaggccuacaacgucacccaggccuucgggcggcgcggccccgagcagacccaggggaacuucggcgaccaggagcugauccggcaggggaccgacuacaagcacuggccccagaucgcccaguucgcgcccagcgccuccgccuucuucggcaugagccgcaucggcauggaggugacgccguccgggaccuggcucaccuacaccggcgccaucaagcuggacgacaaggaccccaacuucaaggaccaggugauccugcucaacaagcacaucgacgccuacaagacguucccgcccaccgagcccaagaaggacaagaagaagaaggcggacgagacccaggcccugccccagcggcagaagaagcagcagaccgucacgcugcuccccgccgccgaccuggacgacuucagcaagcagcugcagcaguccaugagcuccgcggacagcacccaggccugaggacuaguuauaagacugacuagcccgaugggccucccaacgggcccuccuccccuccuugcaccgagauuaauaaaaaaaaaaaaaaaaaaaaaaaaaaaaaaaaaaaaaaaaaaaaaaaaaaaaaaaaaaaaaaaaugcaucccccccccccccccccccccccccccccccaaaggcucuuuucagagccaccagaauu

SEQ ID NO: 21209 - RNA, 1477 nt, Artificial Sequence
  SARS-CoV-2__MT628091.1__nucleocapsid protein (N) mRNA gc
aggagaaagcuuaccaugagcgacaacggcccccagaaccagcgcaacgccccgcggaucaccuucgggggccccuccgacagcaccggguccaaccagaacggcgagcgcagcggggcccgguccaagcagcgccggccccagggccugcccaacaacacggcgagcugguucaccgcccucacccagcacggcaaggaggaccugaaguucccgcgcgggcagggcgugcccaucaacaccaacuccagccccgacgaccagaucggguacuaccggcgcgccacgcggcgcauccggggcggggacggcaagaugaaggaccugagcccccgcugguacuucuacuaccucggcaccgggccggaggccggccugcccuacggggccaacaaggacggcaucaucugggucgcgaccgagggcgcccugaacacccccaaggaccacaucgggacgcggaaccccgccaacaacgccgcgaucgugcuccagcugccgcagggcaccacccugcccaagggguucuacgccgagggcucccgcgggggcucccaggccagcucccucagcuccagccggucccgcaacagcucccggaacagcacccccggcagcucccgcgggacgagccccgcccggauggccggcaacgggggcgacgcggcccuggcccugcuccugcuggaccgccucaaccagcuggaguccaagaugagcgggaagggccagcagcagcagggccagaccgugaccaagaaguccgccgccgaggcgagcaagaagccgcggcagaagcgcaccgccacgaaggccuacaacgucacccaggccuucgggcgccggggccccgagcagacccaggggaacuucggcgaccaggagcugauccgccaggggaccgacuacaagcacuggccccagaucgcccaguucgcgcccuccgccagcgccuucuucggcaugucccggaucggcauggaggugacgccgagcgggaccuggcucaccuacaccggcgccaucaagcuggacgacaaggaccccaacuucaaggaccaggugauccugcucaacaagcacaucgacgccuacaagacguucccgcccaccgagcccaagaaggacaagaagaagaaggcggacgagacccaggcccugccccagcgccagaagaagcagcagaccgucacgcugcuccccgccgccgaccuggacgacuucuccaagcagcugcagcagagcauguccagcgcggacuccacccaggccugaggacuaguuauaagacugacuagcccgaugggccucccaacgggcccuccuccccuccuugcaccgagauuaauaaaaaaaaaaaaaaaaaaaaaaaaaaaaaaaaaaaaaaaaaaaaaaaaaaaaaaaaaaaaaaaaugcaucccccccccccccccccccccccccccccccaaaggcucuuuucagagccaccagaauu

SEQ ID NO: 21210 - RNA, 1477 nt, Artificial Sequence
  SARS-CoV-2__MT628156.1__nucleocapsid protein (N) mRNA gc
aggagaaagcuuaccaugagcgacaacggcccccagaaccagcgcaacgccccgcggaucaccuucgggcgccccuccgacagcaccggcuccaaccagaacggggagcggagcggcgcccgcuccaagcagcggcgcccccaggggcugcccaacaacacggcgagcugguucaccgcccucacccagcacggcaaggaggaccugaaguucccgcggggccagggggugcccaucaacaccaacuccagccccgacgaccagaucggcuacuaccgccgggccacgcgccggauccgcgggggcgacgggaagaugaaggaccugagcccccggugguacuucuacuaccucggcaccggcccggaggccgggcugcccuacggcgccaacaaggacgggaucaucugggucgcgaccgagggcgcccugaacacccccaaggaccacaucggcacgcgcaaccccgccaacaacgccgcgaucgugcuccagcugccgcaggggaccacccugcccaagggcuucuacgccgaggggucccggggcgggucccaggccagcucccgcagcuccagccggucccgcaacagcucccggaacagcacccccggcagcucccgcggcacgagccccgcccggauggccgggaacggcggggacgcggcccucgcccugcugcuccuggaccgccugaaccagcucgaguccaagaugagcggcaaggggcagcagcagcagggccagaccgugaccaagaaguccgccgccgaggcgagcaagaagccgcgccagaagcggaccgccacgaaggccuacaacgucacccaggccuucggccgccgggggcccgagcagacccagggcaacuucggggaccaggagcugauccgccagggcaccgacuacaagcacuggccccagaucgcccaguucgcgcccuccgccagcgccuucuucgggaugucccggaucggcauggaggugacgccgagcggcaccuggcugaccuacaccggggccaucaagcucgacgacaaggaccccaacuucaaggaccaggugauccugcugaacaagcacaucgacgccuacaagacguucccgcccaccgagcccaagaaggacaagaagaagaaggcggacgagacccaggcccucccccagcgccagaagaagcagcagaccgucacgcugcugcccgccgccgaccucgacgacuucuccaagcagcugcagcagagcauguccagcgcggacuccacccaggccugaggacuaguuauaagacugacuagcccgaugggccucccaacgggcccuccuccccuccuugcaccgagauuaauaaaaaaaaaaaaaaaaaaaaaaaaaaaaaaaaaaaaaaaaaaaaaaaaaaaaaaaaaaaaaaaaugcaucccccccccccccccccccccccccccccccaaaggcucuuuucagagccaccagaauu

SEQ ID NO: 21211 - RNA, 1477 nt, Artificial Sequence
  SARS-CoV-2__MT628169.1__nucleocapsid protein (N) mRNA gc
aggagaaagcuuaccaugagcgacaacggcccccagaaccagcgcaacgccccgcggaucaccuucgggggccccuccgacagcaccggguccaaccagaacggcgagcgcagcggggcccgguccaagcagcgccggccccagggccugcccaacaacacggcgagcugguucaccgcccucacccagcacggcaaggaggaccugaaguucccgcgcgggcagggcgugcccaucaacaccaacuccagccccgacgaccagaucggguacuaccggcgcgccacgcggcgcauccggggcggggacggcaagaugaaggaccugagcccccgcugguacuucuacuaccucggcaccgggccggaggccggccugcccuacggggccaacaaggacggcaucaucugggucgcgaccgagggcgcccugaacacccccaaggaccacaucgggacgcggaaccccgccaacaacgccgcgaucgugcuccagcugccgcagggcaccacccugcccaagggguucuacgccgagggcucccgcgggggcucccaggccagcucccggagcuccagccgcucccggaacagcucccgcaacagcacccccggcagcucccgggggacgagccccgcccgcauggccggcaacgggggcgacgcggugcucgcccugcugcuccuggaccggcugaaccagcucgaguccaagaugagcgggaagggccagcagcagcagggccagaccgucaccaagaaguccgccgccgaggccagcaagaagccgcgccagaagcgcaccgcgacgaaggccuacaacgugacccaggccuucgggcggcgcggccccgagcagacccaggggaacuucggcgaccaggagcugauccggcaggggaccgacuacaagcacuggccccagaucgcccaguucgcccccuccgcgagcgccuucuucggcaugucccgcaucggcauggaggugacgccgagcgggaccuggcugaccuacaccggcgccaucaagcucgacgacaaggaccccaacuucaaggaccaggucauccugcugaacaagcacaucgacgccuacaagacguucccgcccaccgagcccaagaaggacaagaagaagaaggccgacgagacccaggcgcucccccagcggcagaagaagcagcagaccgugacgcugcugcccgccgccgaccucgacgacuucuccaagcagcugcagcagagcauguccagcgccgacuccacccaggcgugaggacuaguuauaagacugacuagcccgaugggccucccaacgggcccuccuccccuccuugcaccgagauuaauaaaaaaaaaaaaaaaaaaaaaaaaaaaaaaaaaaaaaaaaaaaaaaaaaaaaaaaaaaaaaaaaugcaucccccccccccccccccccccccccccccccaaaggcucuuuucagagccaccagaauu

SEQ ID NO: 21212 - RNA, 1477 nt, Artificial Sequence
  SARS-CoV-2__MT628180.1__nucleocapsid protein (N) mRNA gc
aggagaaagcuuaccaugagcgacaacggcccccagaaccagcgcaacgccccgcggaucaccuucgggggccuguccgacagcaccggguccaaccagaacggcgagcgcagcggggcccgguccaagcagcgccggccccagggccuccccaacaacacggcgagcugguucaccgcccugacccagcacggcaaggaggaccugaaguucccccgcgggcagggcgugccgaucaacaccaacuccagccccgacgaccagaucggguacuaccggcgcgccacgcggcgcauccggggcggggacggcaagaugaaggaccucagcccccgcugguacuucuacuaccugggcaccgggcccgaggccggccugccguacggggccaacaaggacggcaucaucugggucgcgaccgagggcgcccucaacacccccaaggaccacaucgggacgcggaaccccgccaacaacgccgcgaucgugcugcagcugccccagggcaccacccucccgaagggguucuacgccgagggcucccgcgggggcucccaggccagcucccggagcuccagccgcucccggaacagcucccgcaacagcacccccggcagcucccgggggacgagccccgcccgcauggccggcaacgggggcgacgcggcccuggcccugcuccugcuggaccggcucaaccagcuggaguccaagaugagcgggaagggccagcagcagcagggccagaccgugaccaagaaguccgccgccgaggcgagcaagaagccccgccagaagcgcaccgccacgaaggccuacaacgucacccaggccuucgggcggcgcggcccggagcagacccaggggaacuucggcgaccaggagcugauccggcaggggaccgacuacaagcacuggccccagaucgcccaguucgcgcccuccgccagcgccuucuucggcaugucccgcaucggcauggaggugacgcccagcgggaccuggcucaccuacaccggcgccaucaagcuggacgacaaggacccgaacuucaaggaccaggugauccugcucaacaagcacaucgacgccuacaagacguucccgcccaccgagcccaagaaggacaagaagaagaaggcggacgagacccaggcccugccccagcggcagaagaagcagcagaccgucacgcugcuccccgccgccgaccuggacgacuucuccaagcagcugcagcagagcauguccagcgcggacuccacccaggccugaggacuaguuauaagacugacuagcccgaugggccucccaacgggcccuccuccccuccuugcaccgagauuaauaaaaaaaaaaaaaaaaaaaaaaaaaaaaaaaaaaaaaaaaaaaaaaaaaaaaaaaaaaaaaaaaugcaucccccccccccccccccccccccccccccccaaaggcucuuuucagagccaccagaauu

SEQ ID NO: 21213 - RNA, 1477 nt, Artificial Sequence
  SARS-CoV-2__MT628202.1__nucleocapsid protein (N) mRNA gc
aggagaaagcuuaccaugagcgacaacggcccccagaaccagcgcaacgccccgcggaucaccuucgggggccccuccgacagcaccggguccaaccagaacggcgagcgcagcggggcccgguccaagcagcgccggccccagggccugcccaacaacacggcgagcugguucaccgcccucacccagcacggcaaggaggaccugaaguucccgcgcgggcagggcgugcccaucaacaccaacuccagccccgacgaccagaucggguacuaccggcgcgccacgcggcgcauccggggcggggacggcaagaugaaggaccugagcccccgcugguacuucuacuaccucggcaccgggccggaggccggccugcccuacggggccaacaaggacggcaucaucugggucgcgaccgagggcgcccugaacacccccaaggaccacaucgggacgcggaaccccgccaacaacgccgcgaucgugcuccagcugccgcagggcaccacccugcccaagggguucuacgccgagggcagccgcgggggcucccaggccagcucccggagcuccagccgcucccggaacagccuccgcaacuccacccccggcagcagccgggggacgucccccgcccgcauggccggcaacgggggcgacgcggcccuggcccugcuccugcuggaccggcucaaccagcuggagagcaagauguccgggaagggccagcagcagcagggccagaccgugaccaagaaguccgccgccgaggcguccaagaagccgcgccagaagcgcaccgccacgaaggccuacaacgucacccaggccuucgggcggcgcggccccgagcagacccaggggaacuucggcgaccaggagcugauccggcaggggaccgacuacaagcacuggccccagaucgcccaguucgcgcccagcgccuccgccuucuucggcaugagccgcaucggcauggaggugacgccguccgggaccuggcucaccuacaccggcgccaucaagcuggacgacaaggaccccaacuucaaggaccaggugauccugcucaacaagcacaucgacgccuacaagacguucccgcccaccgagcccaagaaggacaagaagaagaaggcggacgagacccaggcccugccccagcggcagaagaagcagcagaccgucacgcugcuccccgccgccgaccuggacgacuucagcaagcagcugcagcaguccaugagcaucgcggacuccacccaggccugaggacuaguuauaagacugacuagcccgaugggccucccaacgggcccuccuccccuccuugcaccgagauuaauaaaaaaaaaaaaaaaaaaaaaaaaaaaaaaaaaaaaaaaaaaaaaaaaaaaaaaaaaaaaaaaaugcaucccccccccccccccccccccccccccccccaaaggcucuuuucagagccaccagaauu

SEQ ID NO: 21214 - RNA, 1477 nt, Artificial Sequence
  SARS-CoV-2__MT628209.1__nucleocapsid protein (N) mRNA gc
aggagaaagcuuaccaugagcgacaacggcccccagaaccagcgcaacgccccgcggaucaccuucgggggccccuccgacagcaccggguccaaccagaacggcgagcgcagcggggcccgguccaagcagcgccggccccagggccugcccaacaacacggcgagcugguucaccgcccucacccagcacggcaaggaggaccugaaguucccgcgcgggcagggcgugcccaucaacaccaacuccagccccgacgaccagaucggguacuaccggcgcgccacgcggcgcauccggggcggggacggcaagaugaaggaccugagcccccgcugguacuucuacuaccucggcaccgggccggaggccggccugcccuacggggccaacaaggacggcaucaucugggucgcgaccgagggcgcccugaacacccccaaggaccacaucgggacgcggaaccccgccaacaacgccgcgaucgugcuccagcugccgcagggcaccacccugccccgcggguucuacgccgagggcucccgcgggggcucccaggccagcucccggagcuccagccggucccgcaacagcucccggaacagcacccccggcagcuccaagcgcacgagccccgcccggauggccgggaacggcggggacgcggcccucgcccugcugcuccuggaccgccugaaccagcucgaguccaagaugagcggcaaggggcagcagcagcagggccagaccgugaccaagaaguccgccgccgaggcgagcaagaagccgcgccagaagcggaccgccacgaaggccuacaacgucacccaggccuucggccgccgggggcccgagcagacccagggcaacuucggggaccaggagcugauccgccagggcaccgacuacaagcacuggccccagaucgcccaguucgcgcccuccgccagcgccuucuucgggaugucccggaucggcauggaggugacgccgagcggcaccuggcugaccuacaccggggccaucaagcucgacgacaaggaccccaacuucaaggaccaggugauccugcugaacaagcacaucgacgccuacaagacguucccgcccaccgagcccaagaaggacaagaagaagaaggcggacgagacccaggcccucccccagcgccagaagaagcagcagaccgucacgcugcugcccgccgccgaccucgacgacuucuccaagcagcugcagcagagcauguccagcgcggacuccacccaggccugaggacuaguuauaagacugacuagcccgaugggccucccaacgggcccuccuccccuccuugcaccgagauuaauaaaaaaaaaaaaaaaaaaaaaaaaaaaaaaaaaaaaaaaaaaaaaaaaaaaaaaaaaaaaaaaaugcaucccccccccccccccccccccccccccccccaaaggcucuuuucagagccaccagaauu

SEQ ID NO: 21215 - RNA, 1477 nt, Artificial Sequence
  SARS-CoV-2__MT632624.1__nucleocapsid protein (N) mRNA gc
aggagaaagcuuaccaugagcgacaacggcccccagaaccagcgcaacgccccgcggaucaccuucgggggccccuccgacagcaccggguccaaccagaacggcgagcgcagcggggcccgguccaagcagcgccggccccagggccugcccaacaacacggcgagcugguucaccgcccucacccagcacggcaaggaggaccugaaguucccgcgcgggcagggcgugcccaucaacaccaacuccagccccgacgaccagaucggguacuaccggcgcgccacgcggcgcauccggggcggggacggcaagaugaaggaccugagcccccgcugguacuucuacuaccucggcaccgggccggaggccggccugcccuacggggccaacaaggacggcaucaucugggucgcgaccgagggcgcccugaacacccccaaggaccacaucgggacgcggaaccccgccaacaacgccgcgaucgugcuccagcugccgcagggcaccacccugcccaagggguucuacgccgagggcucccgcgggggcucccaggccagcucccggagcuccagccgcucccggaacagcucccgcaacagcacccccggcagcucccgggggacgagccccgcccgcauggccggcaacgggggcgacgcggcccucgcccugcugcuccuggaccggcugaaccagcucgaguccaagaugagcgggaagggccagcagcagcagggccagaccgugaccaagaaguccgccgccgaggcgagcaagaagccgcgccagaagcgcaccgccacgaaggccuacaacgucacccaggccuucgggcggcgcggccccgagcagacccaggggaacuucggcgaccaggagcugauccggcaggggaccgacuacaagcacuggccccagaucgcccaguucgcgcccuccgccagcgccuucuucggcaugucccgcaucggcauggaggugacgccgagcgggaccuggcugaccuacaccggcgccaucaagcucgacgacaaggaccccaacuucaaggaccaggugauccugcugaacaagcacaucgacgccuacaagacguucccgcccaccgagcccaagaaggacaagaagaagaaggcggacgagacccaggcccucccccagcggcagaagaagcagcagaccgucacgcugcugcccuccgccgaccucgacgacuucagcaagcagcugcagcaguccaugagcuccgccgacagcacccaggcgugaggacuaguuauaagacugacuagcccgaugggccucccaacgggcccuccuccccuccuugcaccgagauuaauaaaaaaaaaaaaaaaaaaaaaaaaaaaaaaaaaaaaaaaaaaaaaaaaaaaaaaaaaaaaaaaaugcaucccccccccccccccccccccccccccccccaaaggcucuuuucagagccaccagaauu

SEQ ID NO: 21216 - RNA, 1477 nt, Artificial Sequence
  SARS-CoV-2__MT632797.1__nucleocapsid protein (N) mRNA gc
aggagaaagcuuaccaugagcgacaacggcccccagaaccagcgcaacgccccgcggaucaccuucgggggccccuccgacagcaccggguccaaccagaacggcgagcgcagcggggcccgguccaagcagcgccggccccagggccugcccaacaacacggcgagcugguucaccgcccucacccagcacggcaaggaggaccugaaguucccgcgcgggcagggcgugcccaucaacaccaacuccagccccgacgaccagaucggguacuaccggcgcgccacgcggcgcauccggggcggggacggcaagaugaaggaccugagcccccgcugguacuucuacuaccucggcaccgggccggaggccggccugcccuacggggccaacaaggacggcaucaucugggucgcgaccgagggcgcccugaacacccccaaggaccacaucgggacgcggaaccccgccaacaacgccgcgaucgugcuccagcugccgcagggcaccacccugcccaagggguucuacgccgagggcucccgcgggggcucccaggccagcucccggagcuccagccgcucccggaacagcucccgcaacagcacccccggcagcucccgggggacgagccccgcccgcauggccggcaacgggggcgacgcggcccucgcccugcugcuccuggaccggcugaaccagcucgaguccaagaugagcgggaagggccagcagcagcagggccagaccgugaccaagcgcuccgccgccgaggcgagcaagaagccgcgccagaagcggaccgccacgaaggccuacaacgucacccaggccuucgggcgccggggccccgagcagacccaggggaacuucggcgaccaggagcugauccgccaggggaccgacuacaagcacuggccccagaucgcccaguucgcgcccuccgccagcgccuucuucggcaugucccggaucggcauggaggugacgccgagcgggaccuggcugaccuacaccggcgccaucaagcucgacgacaaggaccccaacuucaaggaccaggugauccugcugaacaagcacaucgacgccuacaagacguucccgcccaccgagcccaagaaggacaagaagaagaaggcggacgagacccaggcccucccccagcgccagaagaagcagcagaccgucacgcugcugcccgccgccgaccucgacgacuucuccaagcagcugcagcagagcauguccagcgcggacuccacccaggccugaggacuaguuauaagacugacuagcccgaugggccucccaacgggcccuccuccccuccuugcaccgagauuaauaaaaaaaaaaaaaaaaaaaaaaaaaaaaaaaaaaaaaaaaaaaaaaaaaaaaaaaaaaaaaaaaugcaucccccccccccccccccccccccccccccccaaaggcucuuuucagagccaccagaauu

SEQ ID NO: 21217 - RNA, 1477 nt, Artificial Sequence
  SARS-CoV-2__MT632800.1__nucleocapsid protein (N) mRNA gc
aggagaaagcuuaccaugagcgacaacggcccccagaaccagcgcaacgccccgcggaucaccuucgggggccccuccgacagcaccggguccaaccagaacggcgagcgcagcggggcccgguccaagcagcgccggccccagggccugcccaacaacacggcgagcugguucaccgcccucacccagcacggcaaggaggaccugaaguucccgcgcgggcagggcgugcccaucaacaccaacuccagccccgacgaccagaucggguacuaccggcgcgccacgcggcgcauccggggcggggacggcaagaugaaggaccugagcccccgcugguacuucuacuaccucggcaccgggccggaggccggccugcccuacggggccaacaaggacggcaucaucugggucgcgaccgagggcgcccugaacacccccaaggaccacaucgggacgcggaaccccgccaacaacgccgcgaucgugcuccagcugccgcagggcaccacccugcccaagggguucuacgccgagggcucccgcgggggcucccaggccagcucccggagcuccagccgcucccggaacagcucccgcaacagcacccccggcagcucccgggggacgagccccgcccgcauggccggcaacgggggcgacgcggcccucgcccugcugcuccuggaccggcugaaccagcucgaguccaagaugagcgggaagggccagcagcagcagggccagaccgugaccaagaaguccgccgccgaggcgagcaagaagccgcgccagaagcgcaccgccacgaaggccuacaacgucacccaggccuucgggcggcgcggccccgagcagacccaggggaacuucggcgaccaggagcugauccggcaggggaccgacuacaagcacuggccccagaucgcccaguucgcgcccuccgccagcgccuucuucggcaugucccgcaucggcauggaggugacgccgagcgggaccuggcugaccuacaccggcgccaucaagcucaacgacaaggaccccaacuucaaggaccaggugauccugcugaacaagcacaucgacgccuacaagacguucccgcccaccgagcccaagaaggacaagaagaagaaggcggacgagacccaggcccucccccagcggcagaagaagcagcagaccgucacgcugcugcccgccgccgaccucgacgacuucuccaagcagcugcagcagagcauguccagcgcggacuccacccaggccugaggacuaguuauaagacugacuagcccgaugggccucccaacgggcccuccuccccuccuugcaccgagauuaauaaaaaaaaaaaaaaaaaaaaaaaaaaaaaaaaaaaaaaaaaaaaaaaaaaaaaaaaaaaaaaaaugcaucccccccccccccccccccccccccccccccaaaggcucuuuucagagccaccagaauu

SEQ ID NO: 21218 - RNA, 1477 nt, Artificial Sequence
  SARS-CoV-2__MT632822.1__nucleocapsid protein (N) mRNA gc
aggagaaagcuuaccaugagcgacaacggcccccagaaccagcgcaacgccccgcggaucaccuucgggggccccuccgacagcaccggguccaaccagaacggcgagcgcagcggggcccgguccaagcagcgccggccccagggccugcccaacaacacggcgagcugguucaccgcccucacccagcacggcaaggaggaccugaaguucccgcgcgggcagggcgugcccaucaacaccaacuccagccccgacgaccagaucggguacuaccggcgcgccacgcggcgcauccggggcggggacggcaagaugaaggaccugagcccccgcugguacuucuacuaccucggcaccgggccggaggccggccugcccuacggggccaacaaggacggcaucaucugggucgcgaccgagggcgcccugaacacccccaaggaccacaucgggacgcggaaccccgccaacaacgccgcgaucgugcuccagcugccgcagggcaccacccugcccaagggguucuacgccgagggcucccgcgggggcucccaggccagcucccggagcuccagccgcucccggaacagcucccgcaacagcacccccggcagcucccgggggacgagccccgcccgcauggccugcaacggcggggacgcggcccucgcccugcugcuccuggaccggcugaaccagcucgaguccaagaugagcggcaaggggcagcagcagcagggccagaccgugaccaagaaguccgccgccgaggcgagcaagaagccgcgccagaagcgcaccgccacgaaggccuacaacgucacccaggccuucggccggcgcgggcccgagcagacccagggcaacuucggggaccaggagcugauccggcagggcaccgacuacaagcacuggccccagaucgcccaguucgcgcccuccgccagcgccuucuucgggaugucccgcaucggcauggaggugacgccgagcggcaccuggcugaccuacaccggggccaucaagcucgacgacaaggaccccaacuucaaggaccaggugauccugcugaacaagcacaucgacgccuacaagacguucccgcccaccgagcccaagaaggacaagaagaagaaggcggacgagacccaggcccucccccagcggcagaagaagcagcagaccgucacgcugcugcccgccgccgaccucgacgacuucuccaagcagcugcagcagagcauguccagcgcggacuccacccaggccugaggacuaguuauaagacugacuagcccgaugggccucccaacgggcccuccuccccuccuugcaccgagauuaauaaaaaaaaaaaaaaaaaaaaaaaaaaaaaaaaaaaaaaaaaaaaaaaaaaaaaaaaaaaaaaaaugcaucccccccccccccccccccccccccccccccaaaggcucuuuucagagccaccagaauu

SEQ ID NO: 21219 - RNA, 1477 nt, Artificial Sequence
  SARS-CoV-2__MT614463.1__nucleocapsid protein (N) mRNA gc
aggagaaagcuuaccaugagcgacaacggcccccagaaccagcgcaacgccccgcggaucaccuucgggggccccuccgacagcaccggguccaaccagaacggcgagcgcagcggggcccgguccaagcagcgccggccccagggccugcccaacaacacggcgagcugguucaccgcccucacccagcacggcaaggaggaccugaaguucccgcgcgggcagggcgugcccaucaacaccaacuccagccccgacgaccagaucggguacuaccggcgcgccacgcggcgcauccggggcggggacggcaagaugaaggaccugagcccccgcugguacuucuacuaccucggcaccgggccggaggccggccugcccuacggggccaacaaggacggcaucaucugggucgcgaccgagggcgcccugaacacccccaaggaccacaucgggacgcggaaccccgccaacaacgccgcgaucgugcuccagcugccgcagggcaccacccugcccaagggguucuacgccgagggcucccgcgggggcucccaggccagcucccggagcuccagccgcucccggaacagcucccgcaacagcacccccggcagcucccgggggacgagccccgcccgcauggccggcaacgggggcgacgcggcccucgcccugcugcuccuggaccggcugaaccagcucgaguccaagaugagcgggaagggccagcagcagcagggccagaccgugaccaagaaguccgccgccgaggcgagcaagaagccgcgccagaagcgcaccgccacgaaggccuacaacgucacccaggccuucgggcggcgcggccccgagcagacccaggggaacuucggcgaccaggagcugauccggcaggggaccgacuacaagcacuggccccagaucgcccaguucgcgcccuccgccagcgccuucuucggcaugucccgcaucggcauggaggugacgccgagcgggaccuggcugaccuacaccggcgccaucaagcucgacgacaaggaccccaacuucaaggaccaggugauccugcugaacaagcacaucgacgccuacaagacguucccgcccaccgagcccaagaaggacaagaagaagaaggcggacgagacccaggcccucccccagcggaagaagaagcagcagaccgucacgcugcugcccgccgccgaccucgacgacuucuccaagcagcugcagcagagcauguccagcgcggacuccacccaggccugaggacuaguuauaagacugacuagcccgaugggccucccaacgggcccuccuccccuccuugcaccgagauuaauaaaaaaaaaaaaaaaaaaaaaaaaaaaaaaaaaaaaaaaaaaaaaaaaaaaaaaaaaaaaaaaaugcaucccccccccccccccccccccccccccccccaaaggcucuuuucagagccaccagaauu

SEQ ID NO: 21220 - RNA, 1477 nt, Artificial Sequence
  SARS-CoV-2__MT614486.1__nucleocapsid protein (N) mRNA gc
aggagaaagcuuaccaugagcgacaacggcccccagaaccagcgcaacgccccgcggaucaccuucgggggccccuccgacagcaccggguccaaccagaacggcgagcgcagcggggcccgguccaagcagcgccggccccagggccugcccaacaacacggcgagcugguucaccgcccucacccagcacggcaaggaggaccugaaguucccgcgcgggcagggcgugcccaucaacaccaacuccagccccgacgaccagaucggguacuaccggcgcgccacgcggcgcauccggggcggggacggcaagaugaaggaccugagcccccgcugguacuucuacuaccucggcaccgggccggaggccggccugcccuacggggccaacaaggacggcaucaucugggucgcgaccgagggcgcccugaacacccccaaggaccacaucgggacgcggaaccccgccaacaacgccagcaucgugcuccagcugccgcagggcaccacccugcccaagggguucuacgcggagggcucccgcgggggcagccaggccuccagccgguccagcucccgcagccggaacuccagccgcaacagcacccccggcuccagccgggggacgucccccgcccgcauggccggcaacgggggcgacgccgcgcucgcccugcugcuccuggaccggcugaaccagcucgagagcaagauguccgggaagggccagcagcagcagggccagaccgugaccaagaaguccgccgccgaggccuccaagaagccgcgccagaagcgcaccgcgacgaaggccuacaacgucacccaggccuucgggcggcgcggccccgagcagacccaggggaacuucggcgaccaggagcugauccggcaggggaccgacuacaagcacuggccccagaucgcccaguucgcccccagcgcguccgccuucuucggcaugagccgcaucggcauggaggugacgccguccgggaccuggcugaccuacaccggcgccaucaagcucgacgacaaggaccccaacuucaaggaccaggugauccugcugaacaagcacaucgacgccuacaagacguucccgcccaccgagcccaagaaggacaagaagaagaaggccgacgagacccaggcgcucccccagcggcagaagaagcagcagaccgucacgcugcugcccgccgccgaccucgacgacuucagcaagcagcugcagcaguccaugagcuccgccgacagcacccaggcgugaggacuaguuauaagacugacuagcccgaugggccucccaacgggcccuccuccccuccuugcaccgagauuaauaaaaaaaaaaaaaaaaaaaaaaaaaaaaaaaaaaaaaaaaaaaaaaaaaaaaaaaaaaaaaaaaugcaucccccccccccccccccccccccccccccccaaaggcucuuuucagagccaccagaauu

SEQ ID NO: 21221 - RNA, 1477 nt, Artificial Sequence
  SARS-CoV-2__MT614508.1__nucleocapsid protein (N) mRNA gc
aggagaaagcuuaccaugagcgacaacggcccccagaaccagcgcaacgccccgcggaucaccuucgggggccccuccgacagcaccggguccaaccagaacggcgagcgcagcggggcccgguccaagcagcgccggccccagggccugcccaacaacacggcgagcugguucaccgcccucacccagcacggcaaggaggaccugaaguucccgcgcgggcagggcgugcccaucaacaccaacuccagccccgacgaccagaucggguacuaccggcgcgccacgcggcgcauccggggcggggacggcaagaugaaggaccugagcccccgcugguacuucuacuaccucggcaccgggccggaggccggccugcccuacggggccaacaaggacggcaucaucugggucgcgaccgagggcgcccugaacacccccaaggaccacaucgggacgcggaaccccgccaacaacgccgcgaucgugcuccagcugccgcagggcaccacccugcccaagggguucuacgccgagggcucccgcgggggcucccaggccagcucccggagcuccagccgcucccggaacagcucccgcaacagcacccccggcagcucccgggggacgagccccgcccgcauggccggcaacgggggcgacgcggcccucgcccugcugcuccuggaccggcugaaccagcucgaguccaagaugagcgggaagggccagcagcagcagggccagaccgugaccaagaaguccgccgccgaggcgagcaagaagccgcgccagaagcgcaccgccacgaaggccuacaacgucacccaggccuucgggcggcgcggccccgagcagacccaggggaacuucggcgaccacgagcugauccggcaggggaccgacuacaagcacuggccccagaucgcccaguucgcgcccuccgccagcgccuucuucggcaugucccgcaucggcauggaggugacgccgagcgggaccuggcugaccuacaccggcgccaucaagcucgacgacaaggaccccaacuucaaggaccaggugauccugcugaacaagcacaucgacgccuacaagacguucccgcccaccgagcccaagaaggacaagaagaagaaggcggacgagacccaggcccucccccagcggcagaagaagcagcagaccgucacgcugcugcccgccgccgaccucgacgacuucuccaagcagcugcagcagagcauguccagcgcggacuccacccaggccugaggacuaguuauaagacugacuagcccgaugggccucccaacgggcccuccuccccuccuugcaccgagauuaauaaaaaaaaaaaaaaaaaaaaaaaaaaaaaaaaaaaaaaaaaaaaaaaaaaaaaaaaaaaaaaaaugcaucccccccccccccccccccccccccccccccaaaggcucuuuucagagccaccagaauu

SEQ ID NO: 21222 - RNA, 1477 nt, Artificial Sequence
  SARS-CoV-2__MT614531.1__nucleocapsid protein (N) mRNA gc
aggagaaagcuuaccaugagcgacaacggcccccagaaccagcgcaacgccccgcggaucaccuucgggggccccuccgacagcaccggguccaaccagaacggcgagcgcagcggggcccgguccaagcagcgccggccccagggccugcccaacaacacggcgagcugguucaccgcccucacccagcacggcaaggaggaccugaaguucccgcgcgggcagggcgugcccaucaacaccaacuccagccccgacgaccagaucggguacuaccggcgcgccacgcggcgcauccggggcggggacggcaagaugaaggaccugagcccccgcugguacuucuacuaccucggcaccgggccggaggccggccugcccuacggggccaacaaggacggcaucaucugggucgcgaccgagggcgcccugaacacccccaaggaccacaucgggacgcggaaccccgccaacaacgccgcgaucgugcuccagcugccgcagggcaccacccugcccaagggguucuacgccgagggcucccgcgggggcucccaggccagcucccggagcuccagccgcucccggaacagcucccgcaacagcacccccggcagcucccgggggacgagccccgcccgcauggccggcaacgggggcgacgcggcccucgcccugcugcuccuggaccggcugaaccagcucgaguccaagaugagcgggaagggccagcagcagcagggccagaccgugaccaagaaguccgccgccgaggcgagcaagaagccgcgccagaagcgcaccgccacgaaggccuacaacgucacccaggccuucgggcggcgcggccccgagcagacccaggggaacuucggcgaccaggagcugauccggcaggggaccgacuacaagcacuggccccagaucgcccaguucgcgcccuccgccagcgccuucuucggcaugucccgcaucggcauggaggugacgccgagcgggaccuggcugaccuacaccggcgccaucaagcucgacgacaaggaccccaacuucaaggaccaggugauccugcugaacaagcacaucgacgccuacaagacguucccgcccaccgagcccaagaaggacaagaagaagaaggcggacgagacccacgcccucccccagcggcagaagaagcagcagaccgucacgcugcugcccgccgccgaccucgacgacuucuccaagcagcugcagcagagcauguccagcgcggacuccacccaggccugaggacuaguuauaagacugacuagcccgaugggccucccaacgggcccuccuccccuccuugcaccgagauuaauaaaaaaaaaaaaaaaaaaaaaaaaaaaaaaaaaaaaaaaaaaaaaaaaaaaaaaaaaaaaaaaaugcaucccccccccccccccccccccccccccccccaaaggcucuuuucagagccaccagaauu

SEQ ID NO: 21223 - RNA, 1477 nt, Artificial Sequence
  SARS-CoV-2__MT621560.1__nucleocapsid protein (N) mRNA gc
aggagaaagcuuaccaugagcgacaacggcccccagaaccagcgcaacgccccgcggaucaccuucgggggccccuccgacagcaccggguccaaccagaacggcgagcgcagcggggcccgguccaagcagcgccggccccagggccugcccaacaacacggcgagcugguucaccgcccucacccagcacggcaaggaggaccugaaguucccgcgcgggcagggcgugcccaucaacaccaacuccagccccgacgaccagaucggguacuaccggcgcgccacgcggcgcauccggggcggggacggcaagaugaaggaccugagcccccgcugguacuucuacuaccucggcaccgggccggaggccggccugcccuacggggccaacaaggacggcaucaucugggucgcgaccgagggcgcccugaacacccccaaggaccacaucgggacgcggaaccccgccaacaacgccgcgaucgugcuccagcugccgcagggcaccacccugcccaagggguucuacgccgagggcucccgcgggggcucccaggccagcucccggagcuccagccgcucccggaacagcucccgcaacagcacccccggcagcucccgggggacgagccccgcccgcauggccggcaacgggggcgacgcggcccucgcccugcugcuccuggaccggcugaaccagcucgaguccaagaugagcgggaagggccagcagcagcagggccagaccgugaccaagaaguccgccgccgaggcgagcaagaagccgcgcgagaagcgcaccgccacgaaggccuacaacgucacccaggccuucgggcggcgcggccccgagcagacccaggggaacuucggcgaccaggagcugauccggcaggggaccgacuacaagcacuggccccagaucgcccaguucgcgcccuccgccagcgccuucuucggcaugucccgcaucggcauggaggugacgccgagcgggaccuggcugaccuacaccggcgccaucaagcucgacgacaaggaccccaacuucaaggaccaggugauccugcugaacaagcacaucgacgccuacaagacguucccgcccaccgagcccaagaaggacaagaagaagaaggcggacgagacccaggcccucccccagcggcagaagaagcagcagaccgucacgcugcugcccgccgccgaccucgacgacuucuccaagcagcugcagcagagcauguccagcgcggacuccacccaggccugaggacuaguuauaagacugacuagcccgaugggccucccaacgggcccuccuccccuccuugcaccgagauuaauaaaaaaaaaaaaaaaaaaaaaaaaaaaaaaaaaaaaaaaaaaaaaaaaaaaaaaaaaaaaaaaaugcaucccccccccccccccccccccccccccccccaaaggcucuuuucagagccaccagaauu

SEQ ID NO: 21224 - RNA, 1477 nt, Artificial Sequence
  SARS-CoV-2__MT510701.1__nucleocapsid protein (N) mRNA gc
aggagaaagcuuaccaugagcgacaacggcccccagaaccagcgcaacgccccgcggaucaccuucgggggccccuccgacagcaccggguccaaccagaacggcgagcgcagcggggugcgguccaagcagcgccggccccagggccugcccaacaacacggccagcugguucaccgcgcucacccagcacggcaaggaggaccugaaguucccgcgcgggcagggcguccccaucaacaccaacuccagccccgacgaccagaucggguacuaccggcgcgccacgcggcgcauccggggcggggacggcaagaugaaggaccugagcccccgcugguacuucuacuaccucggcaccgggccggaggccggccugcccuacggggccaacaaggacggcaucaucuggguggccaccgagggcgcgcugaacacccccaaggaccacaucgggacgcggaaccccgccaacaacgccgccaucgugcuccagcugccgcagggcaccacccugcccaagggguucuacgcggagggcucccgcgggggcucccaggccagcucccggagcuccagccgcucccggaacagcucccgcaacagcacccccggcagcucccgggggacgagccccgcccgcauggccggcaacgggggcgacgccgcgcucgcccugcugcuccuggaccggcugaaccagcucgaguccaagaugagcgggaagggccagcagcagcagggccagaccgucaccaagaaguccgccgccgaggccagcaagaagccgcgccagaagcgcaccgcgacgaaggccuacaacgugacccaggccuucgggcggcgcggccccgagcagacccaggggaacuucggcgaccaggagcugauccggcaggggaccgacuacaagcacuggccccagaucgcccaguucgcccccuccgcgagcgccuucuucggcaugucccgcaucggcauggaggugcggccgagcgggacguggcugaccuacaccggcgccaucaagcucgacgacaaggaccccaacuucaaggaccaggucauccugcugaacaagcacaucgacgccuacaagaccuucccgcccacggagcccaagaaggacaagaagaagaaggccgacgagacccaggcgcucccccagcgccagaagaagcagcagaccgugacccugcugcccgccgccgaccucgacgacuucuccaagcagcugcagcagagcauguccagcgccgacuccacgcaggcgugaggacuaguuauaagacugacuagcccgaugggccucccaacgggcccuccuccccuccuugcaccgagauuaauaaaaaaaaaaaaaaaaaaaaaaaaaaaaaaaaaaaaaaaaaaaaaaaaaaaaaaaaaaaaaaaaugcaucccccccccccccccccccccccccccccccaaaggcucuuuucagagccaccagaauu

SEQ ID NO: 21225 - RNA, 1468 nt, Artificial Sequence
  SARS-CoV-2__MT605818.1__nucleocapsid protein (N) mRNA gc
aggagaaagcuuaccaugagcgacaacggcccccagaaccagcgcaacgccccgcggaucaccuucgggggccccuccgacagcaccggguccaaccagaacggcgagcgcagcggggcccgguccaagcagcgccggccccagggccugcccaacaacacggcgagcugguucaccgcccucacccagcacggcaaggaggaccugaaguucccgcgcgggcagggcgugcccaucaacaccaacuccagccccgacgaccagaucggguacuaccggcgcgccacgcggcgcauccggggcggggacggcaagaugaaggaccugagcccccgcugguacuucuacuaccucggcaccgggccggaggccggccugcccuacggggccaacaaggacggcaucaucugggucgcgaccgagggcgcccugaacacccccaaggaccacaucgggacgcggaaccccgccaacaacgccgcgaucgugcuccagcugccgcagggcaccacccugcccaagggguucuacgccgagggcagccgcgggggcucccaggccagcucccggagcuccagccgcucccggaacagcuccacccccggcagcagcaagcgcacgucccccgcccggauggccgggaacggcggggacgcggcccucgcccugcugcuccuggaccgccugaaccagcucgagagcaagauguccggcaaggggcagcagcagcagggccagaccgugaccaagaaguccgccgccgaggcguccaagaagccgcggcagaagcgcaccgccacgaaggccuacaacgucacccaggccuucggccgccgggggcccgagcagacccagggcaacuucggggaccaggagcugauccgccagggcaccgacuacaagcacuggccccagaucgcccaguucgcgcccagcgccuccgccuucuucgggaugagccggaucggcauggaggugacgccguccggcaccuggcugaccuacaccggggccaucaagcucgacgacaaggaccccaacuucaaggaccaggugauccugcugaacaagcacaucgacgccuacaagacguucccgcccaccgagcccaagaaggacaagaagaagaaggcggacgagacccaggcccucccccagcgccagaagaagcagcagaccgucacgcugcugcccgccgccgaccucgacgacuucagcaagcagcugcagcaguccaugagcuccgcggacagcacccaggccugaggacuaguuauaagacugacuagcccgaugggccucccaacgggcccuccuccccuccuugcaccgagauuaauaaaaaaaaaaaaaaaaaaaaaaaaaaaaaaaaaaaaaaaaaaaaaaaaaaaaaaaaaaaaaaaaugcaucccccccccccccccccccccccccccccccaaaggcucuuuucagagccaccagaauu

SEQ ID NO: 21226 - RNA, 1477 nt, Artificial Sequence
  SARS-CoV-2__MT607248.1__nucleocapsid protein (N) mRNA gc
aggagaaagcuuaccaugagcgacaacggcccccagaaccagcgcaacgccccgcggaucaccuucgggggccccuccgacagcaccggguccaaccagaacggcgagcgcagcggggcccgguccaagcagcgccggccccagggccugcccaacaacacggcgagcugguucaccgcccucacccagcacggcaaggaggaccugaaguucccgcgcgggcagggcgugcccaucaacaccaacuccagccccgacgaccagaucggguacuaccggcgcgccacgcggcgcauccggggcggggacggcaagaugaaggaccugagcccccgcugguacuucuacuaccucggcaccgggccggaggccggccugcccuacggggccaacaaggacggcaucaucugggucgcgaccgagggcgcccugaacacccccaaggaccacaucgggacgcggaaccccgccaacaacgccgcgaucgugcuccagcugccgcagggcaccaccuuccccaagggguucuacgccgagggcucccgcgggggcucccaggccagcucccggagcuccagccgcucccggaacagcucccgcaacagcacccccggcagcuccaagcggacgagccccgcccgcauggccgggaacggcggggacgcggcccuggcccuccugcugcucgaccggcugaaccagcuggaguccaagaugagcggcaaggggcagcagcagcagggccagaccgugaccaagaaguccgccgccgaggcgagcaagaagccgcgccagaagcgcaccgccacgaaggccuacaacgucacccaggccuucggccggcgcgggcccgagcagacccagggcaacuucggggaccaggagcucauccggcagggcaccgacuacaagcacuggccccagaucgcccaguucgcgcccuccgccagcgccuucuucgggaugucccgcaucggcauggaggugacgccgagcggcaccuggcugaccuacaccggggccaucaagcuggacgacaaggaccccaacuucaaggaccaggugauccuccugaacaagcacaucgacgccuacaagacguucccgcccaccgagcccaagaaggacaagaagaagaaggcggacgagacccaggcccugccccagcggcagaagaagcagcagaccgucacgcuccugcccgccgccgaccuggacgacuucuccaagcagcuccagcagagcauguccagcgcggacuccacccaggccugaggacuaguuauaagacugacuagcccgaugggccucccaacgggcccuccuccccuccuugcaccgagauuaauaaaaaaaaaaaaaaaaaaaaaaaaaaaaaaaaaaaaaaaaaaaaaaaaaaaaaaaaaaaaaaaaugcaucccccccccccccccccccccccccccccccaaaggcucuuuucagagccaccagaauu

SEQ ID NO: 21227 - RNA, 1477 nt, Artificial Sequence
  SARS-CoV-2__MT607611.1__nucleocapsid protein (N) mRNA gc
aggagaaagcuuaccaugagcgacaacggcccccagaaccagcgcaacgccccgcggaucaccuucgggggccccuccuacagcaccggguccaaccagaacggcgagcgcagcggggcccgguccaagcagcgccggccccagggccugcccaacaacacggcgagcugguucaccgcccucacccagcacggcaaggaggaccugaaguucccgcgcgggcagggcgugcccaucaacaccaacuccagccccgacgaccagaucggguacuaccggcgcgccacgcggcgcauccggggcggggacggcaagaugaaggaccugagcccccgcugguacuucuacuaccucggcaccgggccggaggccggccugcccuacggggccaacaaggacggcaucaucugggucgcgaccgagggcgcccugaacacccccaaggaccacaucgggacgcggaaccccgccaacaacgccgcgaucgugcuccagcugccgcagggcaccacccugcccaagggguucuacgccgagggcagccgcgggggcucccaggccagcucccggagcuccagccgcucccggaacagccuccgcaacuccacccccggcagcagccgggggacgucccccgcccgcauggccggcaacgggggcgacgcggcccuggcccugcuccugcuggaccggcucaaccagcuggagagcaagauguccgggaagggccagcagcagcagggccagaccgugaccaagaaguccgccgccgaggcguccaagaagccgcgccagaagcgcaccgccacgaaggccuacaacgucacccaggccuucgggcggcgcggccccgagcagacccaggggaacuucggcgaccaggagcugauccggcaggggaccgacuacaagcacuggccccagaucgcccaguucgcgcccagcgccuccgccuucuucggcaugagccgcaucggcauggaggugacgccguccgggaccuggcucaccuacaccggcgccaucaagcuggacgacaaggaccccaacuucaaggaccaggugauccugcucaacaagcacaucgacgccuacaagacguucccgcccaccgagcccaagaaggacaagaagaagaaggcggacgagacccaggcccugccccagcggcagaagaagcagcagaccgucacgcugcuccccgccgccgaccuggacgacuucagcaagcagcugcagcaguccaugagcuccgcggacagcacccaggccugaggacuaguuauaagacugacuagcccgaugggccucccaacgggcccuccuccccuccuugcaccgagauuaauaaaaaaaaaaaaaaaaaaaaaaaaaaaaaaaaaaaaaaaaaaaaaaaaaaaaaaaaaaaaaaaaugcaucccccccccccccccccccccccccccccccaaaggcucuuuucagagccaccagaauu

SEQ ID NO: 21228 - RNA, 1477 nt, Artificial Sequence
  SARS-CoV-2__MT609566.1__nucleocapsid protein (N) mRNA gc
aggagaaagcuuaccaugagcgacaacggcccccagaaccagcgcaacgccccgcggaucaccuucgggggccccuccgacagcaccggguccaaccagaacggcgagcgcagcggggcccgguccaagcagcgccggccccagggccugcccaacaacacggcgagcugguucaccgcccucacccagcacggcaaggaggaccugaaguucccgcgcgggcagggcgugcccaucaacaccaacuccagccccgacgaccagaucggguacuaccggcgcgccacgcggcgcauccggggcggggacggcaagaugaaggaccugagcccccgcugguacuucuacuaccucggcaccgggccggaggccggccugcccuacggggccaacaaggacggcaucaucugggucgcgaccgagggcgcccugaacacccccaaggaccacaucgggacgcggaaccccgccaacaacgccgcgaucgugcuccagcugccgcagggcaccacccugcccaagggguucuacgccgagggcucccgcgggggcucccaggccagcucccggagcuccagccgcucccggaacagcucccgcaacagcacccccggcagcucccgggggacgagccccgcccgcauggccggcaacgggggcgacgcggcccucgcccugcugcuccuggaccggcugaaccagcucgaguccaagaugagcgggaagggccagcagcagcagggccagaccgugaccaagaaguccgccgccgaggcgagcaagaagccgcgccagaagcgcaccgccacgaaggccuacaacgucacccaggccuucgggcggcgcggccccgagcagacccaggggaacuucggcgaccaggagcugauccggcaggggaccgacuacaagcacuggccccagaucgcccaguucgcgcccuccgccagcgccuucuucggcaugucccgcaucggcauggaggugacgccgagcgggaccuggcugaccuacaccggcgccaucaagcucgacgacaaggaccccaacuucaaggaccaggugauccugcugaacaagcacaucgacgccuacaagaucuucccgcccacggagcccaagaaggacaagaagaagaaggcggacgagacccaggcccucccccagcggcagaagaagcagcagaccgucacccugcugcccgccgccgaccucgacgacuucuccaagcagcugcagcagagcauguccagcgcggacuccacgcaggccugaggacuaguuauaagacugacuagcccgaugggccucccaacgggcccuccuccccuccuugcaccgagauuaauaaaaaaaaaaaaaaaaaaaaaaaaaaaaaaaaaaaaaaaaaaaaaaaaaaaaaaaaaaaaaaaaugcaucccccccccccccccccccccccccccccccaaaggcucuuuucagagccaccagaauu

SEQ ID NO: 21229 - RNA, 1477 nt, Artificial Sequence
  SARS-CoV-2__MT601281.1__nucleocapsid protein (N) mRNA gc
aggagaaagcuuaccaugagcgacaacggcccccagaaccagcgcaacgccccgcggaucaccuucgggggccccuccgacagcaccggguccaaccagaacggcgagcgcagcggggcccgguccaagcagcgccggccccagggccugcccaacaacacggcgagcugguucaccgcccucacccagcacggcaaggaggaccugaaguucccgcgcgggcagggcgugcccaucaacaccaacuccagccccgacgaccagaucggguacuaccggcgcgccacgcggcgcauccggggcggggacggcaagaugaaggaccugagcccccgcugguacuucuacuaccucggcaccgggccggaggccggccugcccuacggggccaacaaggacggcaucaucugggucgcgaccgagggcgcccugaacacccccaaggaccacaucgggacgcggaaccccgccaacaacgccgcgaucgugcuccagcugccgcagggcaccacccugcccaagggguucuacgccgagggcagccgcgggggcucccaggccagcucccggagcuccagccgcucccggaacagccuccgcaacuccacccccggcagcagccgggggacgucccccgcccgcauggccggcaacgggggcgacgcggcccuggcccugcuccugcuggaccggcucaaccagcuggagagcaagauguccgggaagggccagcagcagcagggccagaccgugaccaagaaguccgccgccgaggcguccaagaagccgcgccagaagcgcaccgccacgaaggccuacaacgucacccaggccuucgggcggcgcggccccgagcagacccaggggaacuucggcgaccaggagcugauccggcaggggaccgacuacaagcacuggccccagaucgcccaguucgcgcccagcgccuccgccuucuucggcaugagccgcaucggcauggaggugacgccguccgggaccuggcucaccuacaccggcgccaucaagcuggacgacaaggaccccaacuucaaggaccaggugauccugcucaacaagcacaucgacgccuacaagacguucccgcccaccgagcccaagaaggacaagaagaagaaggcggacgagacccaggcccugccccagcggcacaagaagcagcagaccgucacgcugcuccccgccgccgaccuggacgacuucagcaagcagcugcagcaguccaugagcuccgcggacagcacccaggccugaggacuaguuauaagacugacuagcccgaugggccucccaacgggcccuccuccccuccuugcaccgagauuaauaaaaaaaaaaaaaaaaaaaaaaaaaaaaaaaaaaaaaaaaaaaaaaaaaaaaaaaaaaaaaaaaugcaucccccccccccccccccccccccccccccccaaaggcucuuuucagagccaccagaauu

SEQ ID NO: 21230 - RNA, 1477 nt, Artificial Sequence
  SARS-CoV-2__MT601290.1__nucleocapsid protein (N) mRNA gc
aggagaaagcuuaccaugagcgacaacggcccccagaaccagcgcaacgccccgcggaucaccuucgggggccccuccgacagcaccggguccaaccagaacggcgagcgcagcggggcccgguccaagcagcgccggccccagggccugcccaacaacacggcgagcugguucaccgcccucacccagcacggcaaggaggaccugaaguucccgcgcgggcagggcgugcccaucaacaccaacuccagccccgacgaccagaucggguacuaccggcgcgccacgcggcgcauccggggcggggacggcaagaugaaggaccugagcccccgcugguacuucuacuaccucggcaccgggccggaggccggccugcccuacggggccaacaaggacggcaucaucugggucgcgaccgagggcgcccugaacacccccaaggaccacaucgggacgcggaaccccgccaacaacgccgcgaucgugcuccagcugccgcagggcaccacccugcccaagggguucuacgccgagggcagccgcgggggcacccaggccuccagccgguccagcucccgcagccggaacuccagccgcaacuccacgcccggcagcagcaagcggaccucccccgcccgcauggccgggaacggcggggacgcggcccucgcccugcugcuccuggaccggcugaaccagcucgagagcaagauguccggcaaggggcagcagcagcagggccagaccgugaccaagaaguccgccgccgaggcguccaagaagccgcgccagaagcgcacggccaccaaggccuacaacgucacccaggccuucggccggcgcgggcccgagcagauccagggcaacuucggggaccaggagcugauccggcagggcaccgacuacaagcacuggccccagaucgcccaguucgcgcccagcgccuccgccuucuucgggaugagccgcaucggcauggaggugacgccguccggcaccuggcugaccuacaccggggccaucaagcucgacgacaaggaccccaacuucaaggaccaggugauccugcugaacaagcacaucgacgccuacaagacguucccgcccaccgagcccaagaaggacaagaagaagaaggcggacgagacccaggcccucccccagcggcagaagaagcagcagaccgucacgcugcugcccgccgccgaccucgacgacuucagcaagcagcugcagcaguccaugagcuccgcggacagcacccaggccugaggacuaguuauaagacugacuagcccgaugggccucccaacgggcccuccuccccuccuugcaccgagauuaauaaaaaaaaaaaaaaaaaaaaaaaaaaaaaaaaaaaaaaaaaaaaaaaaaaaaaaaaaaaaaaaaugcaucccccccccccccccccccccccccccccccaaaggcucuuuucagagccaccagaauu

SEQ ID NO: 21231 - RNA, 1477 nt, Artificial Sequence
  SARS-CoV-2__MT585039.1__nucleocapsid protein (N) mRNA gc
aggagaaagcuuaccaugagcgacaacggcccccagaaccagcgcaacgccccgcggaucaccuucugcgggcccuccgacagcaccggcuccaaccagaacggggagcgcagcggcgcccgguccaagcagcgccggccccaggggcugcccaacaacacggcgagcugguucaccgcccucacccagcacggcaaggaggaccugaaguucccgcgcggccagggggugcccaucaacaccaacuccagccccgacgaccagaucggcuacuaccggcgcgccacgcggcgcauccgcgggggcgacgggaagaugaaggaccugagcccccggugguacuucuacuaccucggcaccggcccggaggccgggcugcccuacggcgccaacaaggacgggaucaucugggucgcgaccgagggcgcccugaacacccccaaggaccacaucggcacgcggaaccccgccaacaacgccgcgaucgugcuccagcugccgcaggggaccacccugcccaagggcuucuacgccgaggggucccgcggcgggucccaggccagcucccggagcuccagccgcucccggaacagcucccgcaacagcacccccggcagcucccggggcacgagccccgcccgcauggccgggaacggcggggacgcggcccucgcccugcugcuccuggaccggcugaaccagcucgaguccaagaugagcggcaaggggcagcagcagcagggccagaccgugaccaagaaguccgccgccgaggcgagcaagaagccgcgccagaagcgcaccgccacgaaggccuacaacgucacccaggccuucggccggcgcgggcccgagcagacccagggcaacuucggggaccaggagcugauccggcagggcaccgacuacaagcacuggccccagaucgcccaguucgcgcccuccgccagcgccuucuucgggaugucccgcaucggcauggaggugacgccgagcggcaccuggcugaccuacaccggggccaucaagcucgacgacaaggaccccaacuucaaggaccaggugauccugcugaacaagcacaucgacgccuacaagacguucccgcccaccgagcccaagaaggacaagaagaagaaggcggacgagacccaggcccucccccagcggcagaagaagcagcagaccgucacgcugcugcccgccgccgaccucgacgacuucuccaagcagcugcagcagagcauguccagcgcggacuccacccaggccugaggacuaguuauaagacugacuagcccgaugggccucccaacgggcccuccuccccuccuugcaccgagauuaauaaaaaaaaaaaaaaaaaaaaaaaaaaaaaaaaaaaaaaaaaaaaaaaaaaaaaaaaaaaaaaaaugcaucccccccccccccccccccccccccccccccaaaggcucuuuucagagccaccagaauu

SEQ ID NO: 21232 - RNA, 1477 nt, Artificial Sequence
  SARS-CoV-2__MT585089.1__nucleocapsid protein (N) mRNA gc
aggagaaagcuuaccaugagcgacaacggcccccagaaccagcgcaacgccccgcggaucaccuucgggggccccuccgacagcaccggguccaaccagaacggcgagcgcagcggggcccgguccaagcagcgccggccccagggccugcccaacaacacggcgagcugguucaccgcccucacccagcacggcaaggaggaccugaaguucccgcgcgggcagggcgugcccaucaacaccaacuccagccccgacgaccagaucggguacuaccggcgcgccacgcggcgcauccggggcggggacggcaagaugaaggaccugagcccccgcugguacuucuacuaccucggcaccgggccggaggccggccugcccuacggggccaacaaggacggcaucaucugggucgcgaccgagggcgcccugaacacccccaaggaccacaucgggacgcggaaccccgccaacaacgccgcgaucgugcuccagcugccgcagggcaccacccugcccaagggguucuacgccgagggcucccgcgggggcucccaggccagcucccggagcuccagccgcucccggaacagcucccgcaacagcacccccggcagcucccgggggacgagccccgccaagauggccggcaacgggggcgacgcggcccucgcccugcugcuccuggaccgccugaaccagcucgaguccaagaugagcgggaagggccagcagcagcagggccagaccgugaccaagaaguccgccgccgaggcgagcaagaagccgcggcagaagcgcaccgccacgaaggccuacaacgucacccaggccuucgggcgccggggccccgagcagacccaggggaacuucggcgaccaggagcugauccgccaggggaccgacuacaagcacuggccccagaucgcccaguucgcgcccuccgccagcgccuucuucggcaugucccggaucggcauggaggugacgccgagcgggaccuggcugaccuacaccggcgccaucaagcucgacgacaaggaccccaacuucaaggaccaggugauccugcugaacaagcacaucgacgccuacaagacguucccgcccaccgagcccaagaaggacaagaagaagaaggcggacgagacccaggcccucccccagcgccagaagaagcagcagaccgucacgcugcugcccgccgccgaccucgacgacuucuccaagcagcugcagcagagcauguccagcgcggacuccacccaggccugaggacuaguuauaagacugacuagcccgaugggccucccaacgggcccuccuccccuccuugcaccgagauuaauaaaaaaaaaaaaaaaaaaaaaaaaaaaaaaaaaaaaaaaaaaaaaaaaaaaaaaaaaaaaaaaaugcaucccccccccccccccccccccccccccccccaaaggcucuuuucagagccaccagaauu

SEQ ID NO: 21233 - RNA, 1477 nt, Artificial Sequence
  SARS-CoV-2__MT479224.1__nucleocapsid protein (N) mRNA gc
aggagaaagcuuaccaugagcgacaacggcccccagaaccagcgcaacgccccgcggaucaccuucgggggccccuccgacagcaccggguccaaccagaacggcgagcgcagcggggcccgguccaagcagcgccggccccagggccugcccaacaacacggcgagcugguucaccgcccucacccagcacggcaaggaggaccugaaguucccgcgcgggcagggcgugcccaucaacaccaacuccagccccgacgaccagaucggguacuaccggcgcgccacgcggcgcauccggggcggggacggcaagaugaaggaccugagcccccgcugguacuucuacuaccucggcaccgggccggaggccggccugcccuacggggccaacaaggacggcaucaucugggucgcgaccgagggcgcccugaacacccccaaggaccacaucgggacgcggaaccccgccaacaacgccgcgaucgugcuccagcugccgcagggcaccacccugcagaagggguucuacgccgagggcucccgcgggggcucccaggccagcucccggagcuccagccgcucccggaacagcucccgcaacagcacccccggcagcucccgggggacgagccccgcccgcauggccggcaacgggggcgacgcggcccucgcccugcugcuccuggaccggcugaaccagcucgaguccaagaugagcgggaagggccagcagcagcagggccagaccgugaccaagaaguccgccgccgaggcgagcaagaagccccgccagaagcgcaccgccacgaaggccuacaacgucacccaggccuucgggcggcgcggcccggagcagacccaggggaacuucggcgaccaggagcugauccggcaggggaccgacuacaagcacuggccccagaucgcccaguucgcgcccuccgccagcgccuucuucggcaugucccgcaucggcauggaggugacgcccagcgggaccuggcugaccuacaccggcgccaucaagcucgacgacaaggacccgaacuucaaggaccaggugauccugcugaacaagcacaucgacgccuacaagacguucccgcccaccgagcccaagaaggacaagaagaagaaggcggacgagacccaggcccucccccagcggcagaagaagcagcagaccgucacgcugcugcccgccgccgaccucgacgacuucuccaagcagcugcagcagagcauguccagcgcggacuccacccaggccugaggacuaguuauaagacugacuagcccgaugggccucccaacgggcccuccuccccuccuugcaccgagauuaauaaaaaaaaaaaaaaaaaaaaaaaaaaaaaaaaaaaaaaaaaaaaaaaaaaaaaaaaaaaaaaaaugcaucccccccccccccccccccccccccccccccaaaggcucuuuucagagccaccagaauu

SEQ ID NO: 21234 - RNA, 1477 nt, Artificial Sequence
  SARS-CoV-2__MT499220.1__nucleocapsid protein (N) mRNA gc
aggagaaagcuuaccaugagcgacaacggcccccagaaccagcgcaacgccccgcggaucaccuucgggggccccuccgacagcaccuucuccaaccagaacggggagcgcagcggcgcccgguccaagcagcgccggccccaggggcugcccaacaacacggcgagcugguucaccgcccucacccagcacggcaaggaggaccugaaguucccgcgcggccagggggugcccaucaacaccaacuccagccccgacgaccagaucggcuacuaccggcgcgccacgcggcgcauccgcgggggcgacgggaagaugaaggaccugagcccccggugguacuucuacuaccucggcaccggcccggaggccgggcugcccuacggcgccaacaaggacgggaucaucugggucgcgaccgagggcgcccugaacacccccaaggaccacaucggcacgcggaaccccgccaacaacgccgcgaucgugcuccagcugccgcaggggaccacccugcccaagggcuucuacgccgaggggucccgcggcgggucccaggccagcucccggagcuccagccgcucccggaacagcucccgcaacagcacccccggcagcucccggggcacgagccccgcccgcauggccgggaacggcggggacgcggcccucgcccugcugcuccuggaccggcugaaccagcucgaguccaagaugagcggcaaggggcagcagcagcagggccagaccgugaccaagaaguccgccgccgaggcgagcaagaagccgcgccagaagcgcaccgccacgaaggccuacaacgucacccaggccuucggccggcgcgggcccgagcagacccagggcaacuucggggaccaggagcugauccggcagggcaccgacuacaagcacuggccccagaucgcccaguucgcgcccuccgccagcgccuucuucgggaugucccgcaucggcauggaggugacgccgagcggcaccuggcugaccuacaccggggccaucaagcucgacgacaaggaccccaacuucaaggaccaggugauccugcugaacaagcacaucgacgccuacaagacguucccgcccaccgagcccaagaaggacaagaagaagaaggcggacgagacccaggcccucccccagcggcagaagaagcagcagaccgucacgcugcugcccgccgccgaccucgacgacuucuccaagcagcugcagcagagcauguccagcgcggacuccacccaggccugaggacuaguuauaagacugacuagcccgaugggccucccaacgggcccuccuccccuccuugcaccgagauuaauaaaaaaaaaaaaaaaaaaaaaaaaaaaaaaaaaaaaaaaaaaaaaaaaaaaaaaaaaaaaaaaaugcaucccccccccccccccccccccccccccccccaaaggcucuuuucagagccaccagaauu

SEQ ID NO: 21235 - RNA, 1477 nt, Artificial Sequence
  SARS-CoV-2__MT576048.1__nucleocapsid protein (N) mRNA gc
aggagaaagcuuaccaugagcgacaacggcccccagaaccagcgcaacgccccgcggaucaccuucgggggccccuccgacagcaccggguccaaccagaacggcgagcgcagcggggcccgguccaagcagcgccggccccagggccugcccaacaacacggcgagcugguucaccgcccucacccagcacggcaaggaggaccugaaguucccgcgcgggcagggcgugcccaucaacaccaacuccagccccgacgaccagaucggguacuaccggcgcgccacgcggcgcauccggggcggggacggcaagaugaaggaccugagcccccgcugguacuucuacuaccucggcaccgggccggaggccggccugcccuacggggccaacaaggacggcaucaucugggucgcgaccgagggcgcccugaacacccccaaguaccacaucgggacgcggaaccccgccaacaacgccgcgaucgugcuccagcugccgcagggcaccacccugcccaagggguucuacgccgagggcagccgcgggggcucccaggccagcucccggagcuccagccgcucccggaacagccuccgcaacuccacccccggcagcagccgggggacgucccccgcccgcauggccggcaacgggggcgacgcggcccuggcccugcuccugcuggaccggcucaaccagcuggagagcaagauguccgggaagggccagcagcagcagggccagaccgugaccaagaaguccgccgccgaggcguccaagaagccgcgccagaagcgcaccgccacgaaggccuacaacgucacccaggccuucgggcggcgcggccccgagcagacccaggggaacuucggcgaccaggagcugauccggcaggggaccgacuacaagcacuggccccagaucgcccaguucgcgcccagcgccuccgccuucuucggcaugagccgcaucggcauggaggugacgccguccgggaccuggcucaccuacaccggcgccaucaagcuggacgacaaggaccccaacuucaaggaccaggugauccugcucaacaagcacaucgacgccuacaagacguucccgcccaccgagcccaagaaggacaagaagaagaaggcggacgagacccaggcccugccccagcggcagaagaagcagcagaccgucacgcugcuccccgccgccgaccuggacgacuucagcaagcagcugcagcaguccaugagcuccgcggacagcacccaggccugaggacuaguuauaagacugacuagcccgaugggccucccaacgggcccuccuccccuccuugcaccgagauuaauaaaaaaaaaaaaaaaaaaaaaaaaaaaaaaaaaaaaaaaaaaaaaaaaaaaaaaaaaaaaaaaaugcaucccccccccccccccccccccccccccccccaaaggcucuuuucagagccaccagaauu

SEQ ID NO: 21236 - RNA, 1477 nt, Artificial Sequence
  SARS-CoV-2__MT576057.1__nucleocapsid protein (N) mRNA gc
aggagaaagcuuaccaugagcgacaacggcccccagaaccagcgcaacgccccgcggaucaccuucgggggccccuccgacagcaccggguccaaccagaacggcgagcgcagcggggcccgguccaagcagcgccggccccagggccugcccaacaacacggcgagcugguucaccgcccucacccagcacggcaaggaggaccugaaguucccgcgcgggcagggcgugcccaucaacaccaacuccagccccgacgaccagaucggguacuaccggcgcgccacgcggcgcauccggggcggggacggcaagaugaaggaccugagcccccgcugguacuucuacuaccucggcaccgggccggaggccggccugcccuacggggccaacaaggacggcaucaucugggucgcgaccgagggcgcccugaacacccccaaggaccacaucgggacgcggaaccccgccaacaacgccgcgaucgugcuccagcugccgcagggcaccacccugcccaagggguucuacgccgagggcagccgcgggggcucccaggccagcucccggagcuccagccgcucccggaacagccuccgcaacuccacccccggcagcagccgggggacgucccccgcccgcauggccggcaacgggggcgacgcggcccuggcccugcuccugcuggaccggcucaaccagcuggagagcaagauguccgggaagggccagcagcagcagggccagaccgugaccaagaaguccgccgccgaggcguccaagaagccgcgccagaagcgcaccgccacgaaggccuacaacgucacccaggccuucgggcggcgcggccccgagcagacccaggggaacuucggcgaccaggagcugauccggcaggggaccgacuacaaguacuggccccagaucgcccaguucgcgcccagcgccuccgccuucuucggcaugagccgcaucggcauggaggugacgccguccgggaccuggcucaccuacaccggcgccaucaagcuggacgacaaggaccccaacuucaaggaccaggugauccugcucaacaagcacaucgacgccuacaagacguucccgcccaccgagcccaagaaggacaagaagaagaaggcggacgagacccaggcccugccccagcggcagaagaagcagcagaccgucacgcugcuccccgccgccgaccuggacgacuucagcaagcagcugcagcaguccaugagcuccgcggacagcacccaggccugaggacuaguuauaagacugacuagcccgaugggccucccaacgggcccuccuccccuccuugcaccgagauuaauaaaaaaaaaaaaaaaaaaaaaaaaaaaaaaaaaaaaaaaaaaaaaaaaaaaaaaaaaaaaaaaaugcaucccccccccccccccccccccccccccccccaaaggcucuuuucagagccaccagaauu

SEQ ID NO: 21237 - RNA, 1477 nt, Artificial Sequence
  SARS-CoV-2__MT520263.1__nucleocapsid protein (N) mRNA gc
aggagaaagcuuaccaugagcgacaacggcccccagaaccagcgcaacgccccgcggaucaccuucgggggccccuccgacagcaccggguccaaccagaacggcgagcgcagcggggcccgguccaagcagcgccggccccagggccugcccaacaacacggcgagcugguucaccgcccucacccagcacggcaaggaggaccugaaguucccgcgcgggcagggcgugcccaucaacaccaacuccagccccgacgaccagaucggguacuaccggcgcgccacgcggcgcauccggggcggggacggcaagaugaaggaccugagcccccgcugguacuucuacuaccucggcaccgggccggaggccggccugcccuacggggccaacaaggacggcaucaucugggucgcgaccgagggcgcccugaacacccccaaggaccacaucgggacgcggaaccccgccaacaacgccgcgaucgugcuccagcugccgcagggcaccacccugcccaagggguucuacgccgagggcucccgcgggggcucccaggccagcucccggagcuccagccgcucccggaacagcucccgcaacagcacccccggcagcucccgggggacgagccccgcccgcauggccggcaacgggggcgacgcggcccucgcccugcugcuccuggaccggcugaaccaccucgaguccaagaugagcgggaagggccagcagcagcagggccagaccgugaccaagaaguccgccgccgaggcgagcaagaagccgcgccagaagcgcaccgccacgaaggccuacaacgucacccaggccuucgggcggcgcggccccgagcagacccaggggaacuucggcgaccaggagcugauccggcaggggaccgacuacaagcacuggccccagaucgcccaguucgcgcccuccgccagcgccuucuucggcaugucccgcaucggcauggaggugacgccgagcgggaccuggcugaccuacaccggcgccaucaagcucgacgacaaggaccccaacuucaaggaccaggugauccugcugaacaagcacaucgacgccuacaagacguucccgcccaccgagcccaagaaggacaagaagaagaaggcggacgagacccaggcccucccccagcggcagaagaagcagcagaccgucacgcugcugcccgccgccgaccucgacgacuucuccaagcagcugcagcagagcauguccagcgcggacuccacccaggccugaggacuaguuauaagacugacuagcccgaugggccucccaacgggcccuccuccccuccuugcaccgagauuaauaaaaaaaaaaaaaaaaaaaaaaaaaaaaaaaaaaaaaaaaaaaaaaaaaaaaaaaaaaaaaaaaugcaucccccccccccccccccccccccccccccccaaaggcucuuuucagagccaccagaauu

SEQ ID NO: 21238 - RNA, 1477 nt, Artificial Sequence
  SARS-CoV-2__MT520301.1__nucleocapsid protein (N) mRNA gc
aggagaaagcuuaccaugagcgacaacggcccccagaaccagcgcaacgccccgcggaucaccuucgggggccccuccgacagcaccggguccaaccagaacggcgagcgcagcggggcccgguccaagcagugccgcccccagggccugcccaacaacacggcgagcugguucaccgcccucacccagcacggcaaggaggaccugaaguucccgcgggggcagggcgugcccaucaacaccaacuccagccccgacgaccagaucggguacuaccgccgggccacgcgccggauccgcggcggggacggcaagaugaaggaccugagcccccggugguacuucuacuaccucggcaccgggccggaggccggccugcccuacggggccaacaaggacggcaucaucugggucgcgaccgagggcgcccugaacacccccaaggaccacaucgggacgcgcaaccccgccaacaacgccgcgaucgugcuccagcugccgcagggcaccacccugcccaagggguucuacgccgagggcucccgcgggggcucccaggccagcucccggagcuccagccggucccgcaacagcucccggaacagcacccccggcagcucccgcgggacgagccccgcccggauggccggcaacgggggcgacgcggcccucgcccugcugcuccuggaccgccugaaccagcucgaguccaagaugagcgggaagggccagcagcagcagggccagaccgugaccaagaaguccgccgccgaggcgagcaagaagccgcggcagaagcgcaccgccacgaaggccuacaacgucacccaggccuucgggcgccggggccccgagcagacccaggggaacuucggcgaccaggagcugauccgccaggggaccgacuacaagcacuggccccagaucgcccaguucgcgcccuccgccagcgccuucuucggcaugucccggaucggcauggaggugacgccgagcgggaccuggcugaccuacaccggcgccaucaagcucgacgacaaggaccccaacuucaaggaccaggugauccugcugaacaagcacaucgacgccuacaagacguucccgcccaccgagcccaagaaggacaagaagaagaaggcggacgagacccaggcccucccccagcgccagaagaagcagcagaccgucacgcugcugcccgccgccgaccucgacgacuucuccaagcagcugcagcagagcauguccagcgcggacuccacccaggccugaggacuaguuauaagacugacuagcccgaugggccucccaacgggcccuccuccccuccuugcaccgagauuaauaaaaaaaaaaaaaaaaaaaaaaaaaaaaaaaaaaaaaaaaaaaaaaaaaaaaaaaaaaaaaaaaugcaucccccccccccccccccccccccccccccccaaaggcucuuuucagagccaccagaauu

SEQ ID NO: 21239 - RNA, 1477 nt, Artificial Sequence
  SARS-CoV-2__MT520331.1__nucleocapsid protein (N) mRNA gc
aggagaaagcuuaccaugagcgacaacggcccccagaaccagcgcaacgccccgcggaucaccuucgggggccccuccgacagcaccggguccaaccagaacggcgagcgcagcggggcccgguccaagcagcgccggccccagggccugcccaacaacacggcgagcugguucaccgcccucacccagcacggcaaggaggaccugaaguucccgcgcgggcagggcgugcccaucaacaccaacuccagccccgacgaccagaucggguacuaccggcgcgccacgcggcgcauccggggcggggacggcaagaugaaggaccugagcccccgcugguacuucuacuaccucggcaccgggccggaggccggccugcccuacggggccaacaaggacggcaucaucugggucgcgaccgagggcgcccugaacacccccaaggaccacaucgggacgcggaaccccgccaacaacgccgcgaucgugcuccagcugccgcagggcaccacccugcccaagggguucuacgccgagggcucccgcgggggcucccaggccagcucccggagcuccagccgcucccggaacagcucccgcaacagcacccccggcagcucccgggggacgagccccgcccgcauggccggcaacgggggcgacgcggcccucgcccugcugcuccuggaccggcugaaccagcucgaguccaagaugagcgggaagggccagcagcagcagggccagaccgugaccaagaaguccgccgccgaggcggccaagaagccgcgccagaagcgcaccgccacgaaggccuacaacgucacccaggccuucgggcggcgcggccccgagcagacccaggggaacuucggcgaccaggagcugauccggcaggggaccgacuacaagcacuggccccagaucgcgcaguucgcccccagcgccuccgccuucuucggcaugagccgcaucggcauggaggugacgccguccgggaccuggcugaccuacaccggcgccaucaagcucgacgacaaggaccccaacuucaaggaccaggugauccugcugaacaagcacaucgacgcguacaagacguucccgcccaccgagcccaagaaggacaagaagaagaaggccgacgagacccaggcccucccccagcggcagaagaagcagcagaccgucacgcugcugcccgccgcggaccucgacgacuucagcaagcagcugcagcaguccaugagcuccgccgacagcacccaggccugaggacuaguuauaagacugacuagcccgaugggccucccaacgggcccuccuccccuccuugcaccgagauuaauaaaaaaaaaaaaaaaaaaaaaaaaaaaaaaaaaaaaaaaaaaaaaaaaaaaaaaaaaaaaaaaaugcaucccccccccccccccccccccccccccccccaaaggcucuuuucagagccaccagaauu

SEQ ID NO: 21240 - RNA, 1477 nt, Artificial Sequence
  SARS-CoV-2__MT520343.1__nucleocapsid protein (N) mRNA gc
aggagaaagcuuaccaugagcgacaacggcccccagaaccagcgcaacgccccgcggaucaccuucgggggccccuccuacagcaccggguccaaccagaacggcgagcgcagcggggcccgguccaagcagcgccggccccagggccugcccaacaacacggcgagcugguucaccgcccucacccagcacggcaaggaggaccugaaguucccgcgcgggcagggcgugcccaucaacaccaacuccagccccgacgaccagaucggguacuaccggcgcgccacgcggcgcauccggggcggggacggcaagaugaaggaccugagcccccgcugguacuucuacuaccucggcaccgggccggaggccggccugcccuacggggccaacaaggacggcaucaucugggucgcgaccgagggcgcccugaacacccccaaggaccacaucgggacgcggaaccccgccaacaacgccgcgaucgugcuccagcugccgcagggcaccacccugcccaagggguucuacgccgagggcucccgcgggggcucccaggccagcucccggagcuccagccgcucccggaacagcucccgcaacagcacccccggcagcucccgggggacgagccccgcccgcauggccggcaacgggggcgacgcggcccucgcccugcugcuccuggaccggcugaaccagcucgaguccaagaugagcgggaagggccagcagcagcagggccagaccgugaccaagaaguccgccgccgaggcgagcaagaagccgcgccagaagcgcaccgccacgaaggccuacaacgucacccaggccuucgggcggcgcggccccgagcagacccaggggaacuucggcgaccaggagcugauccggcaggggaccgacuacaagcacuggccccagaucgcccaguucgcgcccuccgccagcgccuucuucggcaugucccgcaucggcauggaggugacgccgagcgggaccuggcugaccuacaccggcgccaucaagcucgacgacaaggaccccaacuucaaggaccaggugauccugcugaacaagcacaucgacgccuacaagacguucccgcccaccgagcccaagaaggacaagaagaagaaggcggacgagacccaggcccucccccagcggcagaagaagcagcagaccgucacgcugcugcccgccgccgaccucgacgacuucuccaagcagcugcagcagagcauguccagcgcggacuccacccaggccugaggacuaguuauaagacugacuagcccgaugggccucccaacgggcccuccuccccuccuugcaccgagauuaauaaaaaaaaaaaaaaaaaaaaaaaaaaaaaaaaaaaaaaaaaaaaaaaaaaaaaaaaaaaaaaaaugcaucccccccccccccccccccccccccccccccaaaggcucuuuucagagccaccagaauu

SEQ ID NO: 21241 - RNA, 1477 nt, Artificial Sequence
  SARS-CoV-2__MT520498.1__nucleocapsid protein (N) mRNA gc
aggagaaagcuuaccaugagcgacaacggcccccagaaccagcgcaacgccccgcggaucaccuucgggggccccuccgacagcaccggguccaaccagaacggcgagcgcagcggggcccgguccaagcagcgccggccccagggccugcccaacaacacggcgagcugguucaccgcccucacccagcacggcaaggaggaccugaaguucccgcgcgggcagggcgugcccaucaacaccaacuccagccccgacgaccagaucggguacuaccggcgcgccacgcggcgcauccggggcggggacggcaagaugaaggaccugagcccccgcugguacuucuacuaccucggcaccgggccggaggccggccugcccuacggggccaacaaggacggcaucaucugggucgcgaccgagggcgcccugaacacccccaaggaccacaucgggacgcggaaccccgccaacaacgccgcgaucgugcuccagcugccgcagggcaccacccugcccaagggguucuacgccgagggcucccgcgggggcucccaggccagcucccggagcuccagccgcucccggaacagcucccgcaacagcacccccggcagcucccgggggacgagccccgcccgcauggccggcaacgggggcgacgcggcccucgcccugcugcuccuggaccggcugaaccagcucgaguccaagaugagcgugaaggggcagcagcagcagggccagaccgucaccaagaaguccgccgccgaggcgagcaagaagccgcgccagaagcgcaccgccacgaaggccuacaacgugacccaggccuucggccggcgcgggcccgagcagacccagggcaacuucggggaccaggagcugauccggcagggcaccgacuacaagcacuggccccagaucgcccaguucgcgcccuccgccagcgccuucuucgggaugucccgcaucggcauggaggugacgccgagcggcaccuggcugaccuacaccggggccaucaagcucgacgacaaggaccccaacuucaaggaccaggucauccugcugaacaagcacaucgacgccuacaagacguucccgcccaccgagcccaagaaggacaagaagaagaaggcggacgagacccaggcccucccccagcggcagaagaagcagcagaccgugacgcugcugcccgccgccgaccucgacgacuucuccaagcagcugcagcagagcauguccagcgcggacuccacccaggccugaggacuaguuauaagacugacuagcccgaugggccucccaacgggcccuccuccccuccuugcaccgagauuaauaaaaaaaaaaaaaaaaaaaaaaaaaaaaaaaaaaaaaaaaaaaaaaaaaaaaaaaaaaaaaaaaugcaucccccccccccccccccccccccccccccccaaaggcucuuuucagagccaccagaauu

SEQ ID NO: 21242 - RNA, 1477 nt, Artificial Sequence
  SARS-CoV-2__MT560706.1__nucleocapsid protein (N) mRNA gc
aggagaaagcuuaccaugagcgacaacggcacccagaaccagcgcaacgcgccccggaucaccuucgggggcccguccgacagcacgggguccaaccagaacggcgagcgcagcggggcccgguccaagcagcgccggccccagggccugcccaacaacaccgccagcugguucaccgcccucacccagcacggcaaggaggaccugaaguucccccgcgggcagggcgugccgaucaacacgaacuccagccccgacgaccagaucggguacuaccggcgcgccacccggcgcauccggggcggggacggcaagaugaaggaccugagcccccgcugguacuucuacuaccucggcaccgggcccgaggccggccugccguacggggccaacaaggacggcaucaucugggucgcgaccgagggcgcccugaacacgcccaaggaccacaucgggacccggaaccccgccaacaacgccgcgaucgugcuccagcugccccagggcaccacccugccgaagggguucuacgccgagggcucccgcgggggcucccaggccagcucccggagcuccagccgcucccggaacagcucccgcaacagcacgcccggcagcucccgggggaccagccccgcccgcauggccggcaacgggggcgacgcggcccucgcccugcugcuccuggaccggcugaaccagcucgaguccaagaugagcgggaagggccagcagcagcagggccagaccgugaccaagaaguccgccgccgaggcgagcaagaagccccgccagaagcgcacggccaccaaggccuacaacgucacccaggccuucgggcggcgcggcccggagcagacccaggggaacuucggcgaccaggagcugauccggcaggggacggacuacaagcacuggccccagaucgcccaguucgcgcccuccgccagcgccuucuucggcaugucccgcaucggcauggaggugacccccagcgggaccuggcugaccuacacgggcgccaucaagcucgacgacaaggacccgaacuucaaggaccaggugauccugcugaacaagcacaucgacgccuacaagaccuucccgcccaccgagcccaagaaggacaagaagaagaaggcggacgagacccaggcccucccccagcggcagaagaagcagcagacggucacccugcugcccgccgccgaccucgacgacuucuccaagcagcugcagcagagcauguccagcgcggacuccacccaggccugaggacuaguuauaagacugacuagcccgaugggccucccaacgggcccuccuccccuccuugcaccgagauuaauaaaaaaaaaaaaaaaaaaaaaaaaaaaaaaaaaaaaaaaaaaaaaaaaaaaaaaaaaaaaaaaaugcaucccccccccccccccccccccccccccccccaaaggcucuuuucagagccaccagaauu

SEQ ID NO: 21243 - RNA, 1477 nt, Artificial Sequence
  SARS-CoV-2__MT566435.1__nucleocapsid protein (N) mRNA gc
aggagaaagcuuaccaugagcgacaacggcccccagaaccagcgcaacgccccgcggaucaccuucgggggccccuccgacagcaccggguccaaccagaacggcgagcgcagcggggcccgguccaagcagcgccggccccagggccugcccaacaacacggcgagcugguucaccgcccucacccagcacggcaaggaggaccugaaguucccgcgcgggcagggcgugcccaucaacaccaacuccagccccgacgaccagaucggguacuaccggcgcgccacgcggcgcauccggggcggggacggcaagaugaaggaccugagcccccgcugguacuucuacuaccucggcaccgggccggaggccggccugcccuacggggccaacaaggacggcaucaucugggucgcgaccgagggcgcccugaacacccccaaggaccacaucgggacgcggaaccccgccaacaacgccgcgaucgugcuccagcugccgcagggcaccacccugcccaagggguucuacgccgagggcucccgcgggggcucccaggccagcucccggagcuccagccgcucccggaacagcucccgcaacagcacccccggcagcuccaagcggacgagccccgcccgcauggccgggaacggcggggacgcggcccucgcccugcugcuccuggaccggcugaaccagcucgaguccaagaugagcggcaaggggcagcagcagcagggccagaccgugaccaagaaguccgccgccgaggcgagcaagaagccgcgccagaagcgcaccgccacgaaggccuacaacgucacccaggccuucggccggcgcgggcccgagcagacccagggcaacuucggggaccaggagcugauccggcagggcaccgacuacaagcacuggccccagaucgcccaguucgcgcccuccgccagcgccuucuucgggaugucccgcaucggcauggaggugacgccgagcggcaccuggcugaccuacaccggggccaucaagcucgacgacaaggaccccaacuucaaggaccaggugauccugcugaacaagcacaucgacgccuacaagacguucccgcccaccgagcccaagaaggacaagaagaagaaggcgggcgagacccaggcccucccccagcggcagaagaagcagcagaccgucacgcugcugcccgccgccgaccucgacgacuucuccaagcagcugcagcagagcauguccagcgcggacuccacccaggccugaggacuaguuauaagacugacuagcccgaugggccucccaacgggcccuccuccccuccuugcaccgagauuaauaaaaaaaaaaaaaaaaaaaaaaaaaaaaaaaaaaaaaaaaaaaaaaaaaaaaaaaaaaaaaaaaugcaucccccccccccccccccccccccccccccccaaaggcucuuuucagagccaccagaauu

SEQ ID NO: 21244 - RNA, 1477 nt, Artificial Sequence
  SARS-CoV-2__MT557568.1__nucleocapsid protein (N) mRNA gc
aggagaaagcuuaccaugagcgacaacggcccccagaaccagcgcaacgccccgcggaucaccuucgggggccccuccgacagcaccggguccaaccagaacggcgagcgcagcggggcccuguccaagcagcggcgcccccagggccuccccaacaacacggcgagcugguucaccgcccugacccagcacggcaaggaggaccugaaguucccgcgggggcagggcgugcccaucaacaccaacuccagccccgacgaccagaucggguacuaccgccgggccacgcgccggauccgcggcggggacggcaagaugaaggaccucagcccccggugguacuucuacuaccugggcaccgggccggaggccggccugcccuacggggccaacaaggacggcaucaucugggucgcgaccgagggcgcccucaacacccccaaggaccacaucgggacgcgcaaccccgccaacaacgccgcgaucgugcugcagcugccgcagggcaccacccuccccaagggguucuacgccgagggcagccgcgggggcucccaggccagcucccggagcuccagccggucccgcaacagcucccggaacagcacccccggcagcaaccgcgggacgucccccgcccggauggccggcaacgggggcgacgcggcccuggcccugcuccugcuggaccgccucaaccagcuggagagcaagauguccgggaagggccagcagcagcagggccagaccgugaccaagaaguccgccgccgaggcguccaagaagccgcggcagaagcgcaccgccacgaaggccuacaacgucacccaggccuucgggcgccggggccccgagcagacccaggggaacuucggcgaccaggagcugauccgccaggggaccgacuacaagcacuggccccagaucgcccaguucgcgcccagcgccuccgccuucuucggcaugagccggaucggcauggaggugacgccguccgggaccuggcucaccuacaccggcgccaucaagcuggacgacaaggaccccaacuucaaggaccaggugauccugcucaacaagcacaucgacgccuacaagacguucccgcccaccgagcccaagaaggacaagaagaagaaggcggacgagacccaggcccugccccagcgccagaagaagcagcagaccgucacgcugcuccccgccgccgaccuggacgacuucagcaagcagcugcagcaguccaugagcuccgcggacagcacccaggccugaggacuaguuauaagacugacuagcccgaugggccucccaacgggcccuccuccccuccuugcaccgagauuaauaaaaaaaaaaaaaaaaaaaaaaaaaaaaaaaaaaaaaaaaaaaaaaaaaaaaaaaaaaaaaaaaugcaucccccccccccccccccccccccccccccccaaaggcucuuuucagagccaccagaauu

SEQ ID NO: 21245 - RNA, 1477 nt, Artificial Sequence
  SARS-CoV-2__MT558660.1__nucleocapsid protein (N) mRNA gc
aggagaaagcuuaccaugagcgacaacggcccccagaaccagcgcaacgccccgcggaucaccuucgggggccccuccgacagcaccggguccaaccagaacggcgagcgcagcggggcccgguccaagcagcgccggccccagggccugcccaacaacacggcgagcugguucaccgcccucacccagcacggcaaggaggaccugaaguucccgcgcgggcagggcgugcccaucaacaccaacuccagccccgacgaccagaucggguacuaccggcgcgccacgcggcgcauccggggcggggacggcaagaugaaggaccugagcccccgcugguacuucuacuaccucggcaccgggccggaggccggccugcccuacggggccaacaaguacggcaucaucugggucgcgaccgagggcgcccugaacacccccaaggaccacaucgggacgcggaaccccgccaacaacgccgcgaucgugcuccagcugccgcagggcaccacccugcccaagggguucuacgccgagggcucccgcgggggcucccaggccagcucccggagcuccagccgcucccggaacagcucccgcaacagcacccccggcagcucccgggggacgagccccgcccgcauggccggcaacgggggcgacgcggcccucgcccugcugcuccuggaccggcugaaccagcucgaguccaagaugagcgggaagggccagcagcagcagggccagaccgugaccaagaaguccgccgccgaggcgagcaagaagccgcgccagaagcgcaccgccacgaaggccuacaacgucacccaggccuucgggcggcgcggccccgagcagacccaggggaacuucggcgaccaggagcugauccggcaggggaccgacuacaagcacuggccccagaucgcccaguucgcgcccuccgccagcgccuucuucggcaugucccgcaucggcauggaggugacgccgagcgggaccuggcugaccuacaccggcgccaucaagcucgacgacaaggaccccaacuucaaggaccaggugauccugcugaacaagcacaucgacgccuacaagacguucccgcccaccgagcccaagaaggacaagaagaagaaggcggacgagacccaggcccucccccagcggcagaagaagcagcagaccgucacgcugcugcccgccgccgaccucgacgacuucuccaagcagcugcagcagagcauguccagcgcggacuccacccaggccugaggacuaguuauaagacugacuagcccgaugggccucccaacgggcccuccuccccuccuugcaccgagauuaauaaaaaaaaaaaaaaaaaaaaaaaaaaaaaaaaaaaaaaaaaaaaaaaaaaaaaaaaaaaaaaaaugcaucccccccccccccccccccccccccccccccaaaggcucuuuucagagccaccagaauu

SEQ ID NO: 21246 - RNA, 1477 nt, Artificial Sequence
  SARS-CoV-2__MT535490.1__nucleocapsid protein (N) mRNA gc
aggagaaagcuuaccaugagcgacaacggcccccagaaccagcgcaacgccccgcggaucaccuucgggggccccuccgacagcaccggguccaaccagaacggcgagcgcagcggggcccgguccaagcagcgccggccccagggccugcccaacaacacggcgagcugguucaccgcccucacccagcacggcaaggaggaccugaaguucccgcgcgggcagggcgugcccaucaacaccaacuccagccccgacgaccagaucggguacuaccggcgcgccacgcggcgcauccggggcggggacggcaagaugaaggaccugagcccccgcugguacuucuacuaccucggcaccgggccggaggccggccugcccuacggggccaacaaggacggcaucaucugggucgcgaccgagggcgcccugaacacccccaaggaccacaucgggacgcggaaccccgccaacaacgccgcgaucgugcuccagcugccgcagggcaccacccugcccaagggguucuacgccgagggcucccgcgggggcucccaggccagcucccggagcuccagccgcucccggaacagcucccgcaacagcacccccggcagcucccgggggacgagccccgcccgcauggccgugaacggcggggacgcggcccucgcccugcugcuccuggaccggcugaaccagcucgaguccaagaugagcggcaaggggcagcagcagcagggccagaccgucaccaagaaguccgccgccgaggcgagcaagaagccgcgccagaagcgcaccgccacgaaggccuacaacgugacccaggccuucggccggcgcgggcccgagcagacccagggcaacuucggggaccaggagcugauccggcagggcaccgacuacaagcacuggccccagaucgcccaguucgcgcccuccgccagcgccuucuucgggaugucccgcaucggcauggaggugacgccgagcggcaccuggcugaccuacaccggggccaucaagcucgacgacaaggaccccaacuucaaggaccaggucauccugcugaacaagcacaucgacgccuacaagacguucccgcccaccgagcccaagaaggacaagaagaagaaggcggacgagacccaggcccucccccagcggcagaagaagcagcagaccgugacgcugcugcccgccgccgaccucgacgacuucuccaagcagcugcagcagagcauguccagcgcggacuccacccaggccugaggacuaguuauaagacugacuagcccgaugggccucccaacgggcccuccuccccuccuugcaccgagauuaauaaaaaaaaaaaaaaaaaaaaaaaaaaaaaaaaaaaaaaaaaaaaaaaaaaaaaaaaaaaaaaaaugcaucccccccccccccccccccccccccccccccaaaggcucuuuucagagccaccagaauu

SEQ ID NO: 21247 - RNA, 1477 nt, Artificial Sequence
  SARS-CoV-2__MT535500.1__nucleocapsid protein (N) mRNA gc
aggagaaagcuuaccaugagcgacaacggcccccagaaccagcgcaacgccccgcggaucaccuucgggggccccuccgacagcaccggguccaaccagaacggcgaccgcagcggggcccgguccaagcagcgccggccccagggccugcccaacaacacggcgagcugguucaccgcccucacccagcacggcaaggaggaccugaaguucccgcgcgggcagggcgugcccaucaacaccaacuccagccccgacgaccagaucggguacuaccggcgcgccacgcggcgcauccggggcggggacggcaagaugaaggaccugagcccccgcugguacuucuacuaccucggcaccgggccggaggccggccugcccuacggggccaacaaggacggcaucaucugggucgcgaccgagggcgcccugaacacccccaaggaccacaucgggacgcggaaccccgccaacaacgccgcgaucgugcuccagcugccgcagggcaccacccugcccaagggguucuacgccgagggcucccgcgggggcucccaggccagcucccggagcuccagccgcucccggaacagcucccgcaacagcacccccggcagcucccgggggacgagccccgcccgcauggccggcaacgggggcgacgcggcccucgcccugcugcuccuggaccggcugaaccagcucgaguccaagaugagcgggaagggccagcagcagcagggccagaccgugaccaagaaguccgccgccgaggcgagcaagaagccgcgccagaagcgcaccgccacgaaggccuacaacgucacccaggccuucgggcggcgcggccccgagcagacccaggggaacuucggcgaccaggagcugauccggcaggggaccgacuacaagcacuggccccagaucgcccaguucgcgcccuccgccagcgccuucuucggcaugucccgcaucggcauggaggugacgccgagcgggaccuggcugaccuacaccggcgccaucaagcucgacgacaaggaccccaacuucaaggaccaggugauccugcugaacaagcacaucgacgccuacaagacguucccgcccaccgagcccaagaaggacaagaagaagaaggcggacgagacccaggcccucccccagcggcagaagaagcagcagaccgucacgcugcugcccgccgccgaccucgacgacuucuccaagcagcugcagcagagcauguccagcgcggacuccacccaggccugaggacuaguuauaagacugacuagcccgaugggccucccaacgggcccuccuccccuccuugcaccgagauuaauaaaaaaaaaaaaaaaaaaaaaaaaaaaaaaaaaaaaaaaaaaaaaaaaaaaaaaaaaaaaaaaaugcaucccccccccccccccccccccccccccccccaaaggcucuuuucagagccaccagaauu

SEQ ID NO: 21248 - RNA, 1477 nt, Artificial Sequence
  SARS-CoV-2__MT536964.1__nucleocapsid protein (N) mRNA gc
aggagaaagcuuaccaugagcgacaacggcccccagaaccagcgcaacgccccgcggaucaccuucgggggccccuccgacagcaccggguccaaccagaacggcgagcgcagcggggcccgguccaagcagcgccggccccagggccugcccaacaacacggcgagcugguucaccgcccucacccagcacggcaaggaggaccugaaguucccgcgcgggcagggcgugcccaucaacaccaacuccagccccgacgaccagaucggguacuaccggcgcgccacgcggcgcauccggggcggggacggcaagaugaaggaccugagcccccgcugguacuucuacuaccucggcaccgggccggaggccggccugcccuacggggccaacaaggacggcaucaucugggucgcgaccgagggcgcccugaccacgcccaaggaccacaucgggacccggaaccccgccaacaacgccgcgaucgugcuccagcugccgcagggcaccacccugcccaagggguucuacgccgagggcucccgcgggggcucccaggccagcucccggagcuccagccgcucccggaacagcucccgcaacagcacgcccggcagcucccgggggaccagccccgcccgcauggccggcaacgggggcgacgcggcccucgcccugcugcuccuggaccggcugaaccagcucgaguccaagaugagcgggaagggccagcagcagcagggccagaccgugaccaagaaguccgccgccgaggcgagcaagaagccgcgccagaagcgcacggccaccaaggccuacaacgucacccaggccuucgggcggcgcggccccgagcagacccaggggaacuucggcgaccaggagcugauccggcaggggacggacuacaagcacuggccccagaucgcccaguucgcgcccuccgccagcgccuucuucggcaugucccgcaucggcauggaggugaccccgagcgggaccuggcugaccuacacgggcgccaucaagcucgacgacaaggaccccaacuucaaggaccaggugauccugcugaacaagcacaucgacgccuacaagaccuucccgcccaccgagcccaagaaggacaagaagaagaaggcggacgagacccaggcccucccccagcggcagaagaagcagcagacggucacccugcugcccgccgccgaccucgacgacuucuccaagcagcugcagcagagcauguccagcgcggacuccacccaggccugaggacuaguuauaagacugacuagcccgaugggccucccaacgggcccuccuccccuccuugcaccgagauuaauaaaaaaaaaaaaaaaaaaaaaaaaaaaaaaaaaaaaaaaaaaaaaaaaaaaaaaaaaaaaaaaaugcaucccccccccccccccccccccccccccccccaaaggcucuuuucagagccaccagaauu

SEQ ID NO: 21249 - RNA, 1477 nt, Artificial Sequence
  SARS-CoV-2__MT511067.1__nucleocapsid protein (N) mRNA gc
aggagaaagcuuaccaugagcgacaacggcccccagaaccagcgcaacgccccgcggaucaccuucgggggccccuccgacagcaccggguccaaccagaacggcgagcgcagcggggcccgguccaagcagcgccggccccagggccugcccaacaacacggcgagcugguucaccgcccucacccagcacggcaaggaggaccugaaguucccgcgcgggcagggcgugcccaucaacaccaacuccagccccgacgaccagaucggguacuaccggcgcgccacgcggcgcauccggggcggggacggcaagaugaaggaccugagcccccgcugguacuucuacuaccucggcaccgggccggaggccggccugcccuacggggccaacaaggacggcaucaucugggucgcgaccgagggcgcccugaacacccccaaggaccacaucgggacgcggaaccccgccaacaacgccgcgaucgugcuccagcugccgcagggcaccacccugcccaagggguucuacgccgagggcucccgcgggggcucccaggccagcucccggagcuccagccgcucccggaacagcucccgcaacagcacccccggcagcucccgggggacgagccccgcccgcauggccggcaacgggggcgacgcggcccucgcccugcugcuccuggaccggcugaaccagcucgaguccaagaugagcgggaagggccagcagcagcagggccagaccgugaccaagaaguccgccgccgaggcgagcaagaagccgcgccagaagcgcaccgccacgaaggccuacaacgucacccaggccuucgggcggcgcggccccgagcagacccaggggaacuucggcgaccaggagcugauccggcaggggaccgacuacaagcacuggccccagaucgcccaguucgcgcccuccgccagcgccuucuucggcaugucccgcaucggcauggaggugacgccgagcgggaccuggcugaccuacaccggcgccaucaagcucgacgacaaggaccccaacuucaaggaccaggugauccugcugaacaagcacaucgacgccuacaagacguucccgcccaccgagcccaagaaggacaagaagaagaaggcggacgagacccaggcccucccccagcggcagaagaagcagcagaccgucacgcugcugcccgccgccgaccucgacuacuucuccaagcagcugcagcagagcauguccagcgcggacuccacccaggccugaggacuaguuauaagacugacuagcccgaugggccucccaacgggcccuccuccccuccuugcaccgagauuaauaaaaaaaaaaaaaaaaaaaaaaaaaaaaaaaaaaaaaaaaaaaaaaaaaaaaaaaaaaaaaaaaugcaucccccccccccccccccccccccccccccccaaaggcucuuuucagagccaccagaauu

SEQ ID NO: 21250 - RNA, 1477 nt, Artificial Sequence
  SARS-CoV-2__MT509959.1__nucleocapsid protein (N) mRNA gc
aggagaaagcuuaccaugagcgacaacggcacccagaaccagcgcaacgcccugcggaucaccuucgggggccccuccgacagcacgggguccaaccagaacggcgagcgcagcggggcccgguccaagcagcgccggccgcagggccuccccaacaacaccgcgagcugguucaccgcccugacccagcacggcaaggaggaccugaaguucccccgcgggcagggcgugcccaucaacacgaacuccagcccggacgaccagaucggguacuaccggcgcgccacccggcgcauccggggcggggacggcaagaugaaggaccucagcccccgcugguacuucuacuaccugggcaccgggcccgaggccggccugcccuacggggccaacaaggacggcaucaucugggucgcgaccgagggcgcccucaacacgccgaaggaccacaucgggacccggaaccccgccaacaacgccgcgaucgugcugcagcugccccagggcaccacccuccccaagggguucuacgccgagggcucccgcgggggcucccaggccagcucccggagcuccagccgcucccggaacagcucccgcaacagcacgccgggcagcucccgggggaccagccccgcccgcauggccggcaacgggggcgacgcggcccuggcccugcuccugcuggaccggcucaaccagcuggaguccaagaugagcgggaagggccagcagcagcagggccagaccgugaccaagaaguccgccgccgaggcgagcaagaagccccgccagaagcgcacggccaccaaggccuacaacgucacccaggccuucgggcggcgcggccccgagcagacccaggggaacuucggcgaccaggagcugauccggcaggggacggacuacaagcacuggccgcagaucgcccaguucgcgcccuccgccagcgccuucuucggcaugucccgcaucggcauggaggugacccccagcgggaccuggcucaccuacacgggcgccaucaagcuggacgacaaggaccccaacuucaaggaccaggugauccugcucaacaagcacaucgacgccuacaagaccuucccgcccaccgagcccaagaaggacaagaagaagaaggcggacgagacccaggcccugccccagcggcagaagaagcagcagacggucacccugcucccggccgccgaccuggacgacuucuccaagcagcugcagcagagcauguccagcgcggacuccacccaggccugaggacuaguuauaagacugacuagcccgaugggccucccaacgggcccuccuccccuccuugcaccgagauuaauaaaaaaaaaaaaaaaaaaaaaaaaaaaaaaaaaaaaaaaaaaaaaaaaaaaaaaaaaaaaaaaaugcaucccccccccccccccccccccccccccccccaaaggcucuuuucagagccaccagaauu

SEQ ID NO: 21251 - RNA, 1477 nt, Artificial Sequence
  SARS-CoV-2__MT509497.1__nucleocapsid protein (N) mRNA gc
aggagaaagcuuaccaugagcgacaacggcccccagaaccagcgcaacgcccugcggaucaccuucgggggcccguccgacagcaccggguccaaccagaacggcgagcgcagcggggcccgguccaagcagcgccggccccagggccuccccaacaacacggcgagcugguucaccgcccugacccagcacggcaaggaggaccugaaguucccccgcgggcagggcgugccgaucaacaccaacuccagccccgacgaccagaucggguacuaccggcgcgccacgcggcgcauccggggcggggacggcaagaugaaggaccucagcccccgcugguacuucuacuaccugggcaccgggcccgaggccggccugccguacggggccaacaaggacggcaucaucugggucgcgaccgagggcgcccucaacacccccaaggaccacaucgggacgcggaaccccagcaacaacgccgccaucgugcugcagcugccccagggcaccacccucccgaagggguucuacgcggagggcucccgcgggggcagccaggccuccagccgguccagcucccgcagccggaacuccagccgcaacagcacccccggcuccagccgggggacgucccccgcccgcauggccggcaacgggggcgacgccgcgcuggcccugcuccugcuggaccggcucaaccagcuggagagcaagauguccgggaagggccagcagcagcagggccagaccgugaccaagaaguccgccgccgaggccuccaagaagccccgccagaagcgcaccgcgacgaaggccuacaacgucacccaggccuucgggcggcgcggcccggagcagacccaggggaacuucggcgaccaggagcugauccggcaggggaccgacuacaagcacuggccccagaucgcccaguucgcccccagcgcguccgccuucuucggcaugagccgcaucggcauggaggugacgcccuccgggaccuggcucaccuacaccggcgccaucaagcuggacgacaaggacccgaacuucaaggaccaggugauccugcucaacaagcacaucgacgccuacaagacguucccgcccaccgagcccaagaaggacaagaagaagaaggccgacgagacccaggcgcugccccagcggcagaagaagcagcagaccgucacgcugcuccccgccgccgaccuggacgacuucagcaagcagcugcagcaguccaugagcuccgccgacagcacccaggcgugaggacuaguuauaagacugacuagcccgaugggccucccaacgggcccuccuccccuccuugcaccgagauuaauaaaaaaaaaaaaaaaaaaaaaaaaaaaaaaaaaaaaaaaaaaaaaaaaaaaaaaaaaaaaaaaaugcaucccccccccccccccccccccccccccccccaaaggcucuuuucagagccaccagaauu

SEQ ID NO: 21252 - RNA, 1477 nt, Artificial Sequence
  SARS-CoV-2__MT509498.1__nucleocapsid protein (N) mRNA gc
aggagaaagcuuaccaugagcgacaacggcccccagaaccagcgcaacgccccgcggaucaccuucgggggccccuccgacagcaccggguccaaccagaacggcgagcgcagcggggcccgguccaagcagcgccggccccagggccugcccaacaacacggcgagcugguucaccgcccucacccagcacggcaaggaggaccugaaguucccgcgcgggcagggcgugcccaucaacaccaacuccagccccgacgaccagaucggguacuaccggcgcgccacgcggcgcauccggggcggggacggcaagaugaaggaccugagcccccgcugguacuucuacuaccucggcaccgggccggaggccggccugcccuacggggccaacaaggacggcaucaucugggucgcgaccgagggcgcccugaacacccccaaggaccacaucgggacgcggaaccccgccaacaacgccgcgaucgugcuccagcugccgcagggcaccacccugcccaagggguucuacgccgagggcagccgcgggggcucccaggccagcucccggagcuccagccgcucccggaacagccuccgcaacuccacccccggcagcagccgggggacgucccccgcccgcauggccggcaacgggggcgacgcggcccuggcccugcuccugcuggaccggcucaaccagcuggagagcaagauguccgggaagggccagcagcagcagggccagaccgugaccaagaaguccgccgccgaggcguccaagaagccgcgccagaagcgcaccgccacgaaggccuacaacgucacccaggccuucgggcggcgcggccccgagcagacccaggggaacuucggcgaccaggagcugauccggcaggggaccgacuacaagcacuggccccagaucgcccaguucgcgcccagcgccuccgccuucuucggcaugagccgcaucggcauggaggugacgccguccgggaccuggcucaccuacaccggcgccaucaagcuggacgacaaggaccccaacuucaaguaccaggugauccugcucaacaagcacaucgacgccuacaagacguucccgcccaccgagcccaagaaggacaagaagaagaaggcggacgagacccaggcccugccccagcggcagaagaagcagcagaccgucacgcugcuccccgccgccgaccuggacgacuucagcaagcagcugcagcaguccaugagcuccgcggacagcacccaggccugaggacuaguuauaagacugacuagcccgaugggccucccaacgggcccuccuccccuccuugcaccgagauuaauaaaaaaaaaaaaaaaaaaaaaaaaaaaaaaaaaaaaaaaaaaaaaaaaaaaaaaaaaaaaaaaaugcaucccccccccccccccccccccccccccccccaaaggcucuuuucagagccaccagaauu

SEQ ID NO: 21253 - RNA, 1477 nt, Artificial Sequence
  SARS-CoV-2__MT506566.1__nucleocapsid protein (N) mRNA gc
aggagaaagcuuaccaugagcgacaacggcccccagaaccagcgcaacgccccgcacaucaccuucgggggccccuccgacagcaccggguccaaccagaacggcgagcggagcggggcccgcuccaagcagcggcgcccccagggccugcccaacaacacggcgagcugguucaccgcccucacccagcacggcaaggaggaccugaaguucccgcgggggcagggcgugcccaucaacaccaacuccagccccgacgaccagaucggguacuaccgccgggccacgcgccggauccgcggcggggacggcaagaugaaggaccugagcccccggugguacuucuacuaccucggcaccgggccggaggccggccugcccuacggggccaacaaggacggcaucaucugggucgcgaccgagggcgcccugaacacccccaaggaccacaucgggacgcgcaaccccgccaacaacgccgcgaucgugcuccagcugccgcagggcaccacccugcccaagggguucuacgccgagggcucccgcgggggcucccaggccagcucccggagcuccagccggucccgcaacagcucccggaacagcacccccggcagcucccgcgggacgagccccgcccggauggccggcaacgggggcgacgcggcccucgcccugcugcuccuggaccgccugaaccagcucgaguccaagaugagcgggaagggccagcagcagcagggccagaccgugaccaagaaguccgccgccgaggcgagcaagaagccgcggcagaagcgcaccgccacgaaggccuacaacgucacccaggccuucgggcgccggggccccgagcagacccaggggaacuucggcgaccaggagcugauccgccaggggaccgacuacaagcacuggccccagaucgcccaguucgcgcccuccgccagcgccuucuucggcaugucccggaucggcauggaggugacgccgagcgggaccuggcugaccuacaccggcgccaucaagcucgacgacaaggaccccaacuucaaggaccaggugauccugcugaacaagcacaucgacgccuacaagacguucccgcccaccgagcccaagaaggacaagaagaagaaggcggacgagacccaggcccucccccagcgccagaagaagcagcagaccgucacgcugcugcccgccgccgaccucgacgacuucuccaagcagcugcagcagagcauguccagcgcggacuccacccaggccugaggacuaguuauaagacugacuagcccgaugggccucccaacgggcccuccuccccuccuugcaccgagauuaauaaaaaaaaaaaaaaaaaaaaaaaaaaaaaaaaaaaaaaaaaaaaaaaaaaaaaaaaaaaaaaaaugcaucccccccccccccccccccccccccccccccaaaggcucuuuucagagccaccagaauu

SEQ ID NO: 21254 - RNA, 1477 nt, Artificial Sequence
  SARS-CoV-2__MT502774.1__nucleocapsid protein (N) mRNA gc
aggagaaagcuuaccaugagcgacaacggcccccagaaccagcgcaacgccccgcggaucaccuucgggggccccuccgacagcaccggguccaaccagaacggcgagcgcagcggggcccgguccaagcagcgccggccccagggccugcccaacaacacggcgagcugguucaccgcccucacccagcacggcaaggaggaccugaaguucccgcgcgggcagggcgugcccaucaacaccaacuccagccccgacgaccagaucggguacuaccggcgcgccacgcggcgcauccggggcggggacggcaagaugaaggaccugagcccccgcugguacuucuacuaccucggcaccgggccggaggccggccugcccuacggggccaacaaggacggcaucaucugggucgcgaccgagggcgcccugaacacccccaaggaccacaucgggacgcggaaccccgccaacaacgccgcgaucgugcuccagcugccgcagggcaccacccugcccaagggguucuacgccgagggcagccgcgggggcucccaggccagcucccggagcuccagccgcucccggaacagcucccgcaacagcacccccggcagcaaccgggggacgucccccgcccgcauggccggcaacgggggcgacgcggcccucgcccugcugcuccuggaccggcugaaccagcucgagagcaagauguccgggaagggccagcagcagcagggccagaccgugaccaagaaguccgccgccgaggcguccaagaagccgcgccagaagcgcaccgccacgaaggccuacaacgucacccaggccuucgggcggcgcggccccgagcagacccaggggaacuucggcgaccaggagcugauccggcaggggaccgacuacaagcacuggccccagaucgcccaguucgcgcccagcgccuccgccuucuucggcaugagccgcaucggcauggaggugacgccguccgggaccuggcugaccuacaccggcgccaucaagcucgacgacaaggaccccaacuucaaggaccaggugauccugcugaacaagcacaucgacgccuacaagacguucccgcccaccgagcccaagaaggacaagaacaagaaggcggacgagacccaggcccucccccagcggcagaagaagcagcagaccgucacgcugcugcccgccgccgaccucgacgacuucagcaagcagcugcagcaguccaugagcuccgcggacagcacccaggccugaggacuaguuauaagacugacuagcccgaugggccucccaacgggcccuccuccccuccuugcaccgagauuaauaaaaaaaaaaaaaaaaaaaaaaaaaaaaaaaaaaaaaaaaaaaaaaaaaaaaaaaaaaaaaaaaugcaucccccccccccccccccccccccccccccccaaaggcucuuuucagagccaccagaauu

SEQ ID NO: 21255 - RNA, 1477 nt, Artificial Sequence
  SARS-CoV-2__MT496974.1__nucleocapsid protein (N) mRNA gc
aggagaaagcuuaccaugagcgacaacggcccccagaaccagcgcaacgccccgcggaucaccuucgggggccccuccgacagcaccggguccaaccagaacggcgagcgcagcggggcccgguccaagcagcgccggccccagggccugcccaacaacacggcgagcugguucaccgcccucacccagcacggcaaggaggaccugaaguucccgcgcgggcagggcgugcccaucaacaccaacuccagccccgacgaccagaucggguacuaccggcgcgccacgcggcgcauccggggcggggacggcaagaugaaggaccugagcccccgcugguacuucuacuaccucggcaccgggccggaggccggccugcccuacggggccaacaaggacggcaucaucugggucgcgaccgagggcgcccugaacacccccaaggaccacaucgggacgcggaaccccgccaacaacgccgcgaucgugcuccagcugccgcagggcaccacccugcccaagggguucuacgccgagggcagccgcgggggcucccaggccagcucccggagcuccagccgcucccggaacagccuccgcaacuccacccccggcagcagccgggggacgucccccgcccgcauggccggcaacgggggcgacgcggcccuggcccugcuccugcuggaccggcucaaccagcuggagagcaagauguccgggaagggccagcagcagcagggccagaccgugaccaagaaguccgccgccgaggcguccaagaagccgcgccagaagcgcaccgccacgaaggccuacaacgucacccaggccuucgggcggcgcggccccgagcagacccaggggaacuucggcgaccaggagcugauccggcaggggaccgacuacaagcacuggccccagaucgcccaguucgcgcccagcgccuccgccuucuucggcaugagccgcaucggcauggaggugacgccguccgggaccuggcucaccuacaccggcgccaucaagcuggacgacaaggaccccaacuucaaggaccaggugauccugcucaacaagcacaucgacgccuacaagaucuucccgcccacggagcccaagaaggacaagaagaagaaggcggacgagacccaggcccugccccagcggcagaagaagcagcagaccgucacccugcuccccgccgccgaccuggacgacuucagcaagcagcugcagcaguccaugagcuccgcggacagcacgcaggccugaggacuaguuauaagacugacuagcccgaugggccucccaacgggcccuccuccccuccuugcaccgagauuaauaaaaaaaaaaaaaaaaaaaaaaaaaaaaaaaaaaaaaaaaaaaaaaaaaaaaaaaaaaaaaaaaugcaucccccccccccccccccccccccccccccccaaaggcucuuuucagagccaccagaauu

SEQ ID NO: 21256 - RNA, 1477 nt, Artificial Sequence
  SARS-CoV-2__MT496976.1__nucleocapsid protein (N) mRNA gc
aggagaaagcuuaccaugagcgacaacggcccccagaaccagcgcaacgccccgcggaucaccuucgggggccccuccgacagcaccggguccaaccagaacggcgagcgcagcggggcccgguccaagcagcgccggccccagggccugcccaacaacacggcgagcugguucaccgcccucacccagcacggcaaggaggaccugaaguucccgcgcgggcagggcgugcccaucaacaccaacuccagccccgacgaccagaucggguacuaccggcgcgccacgcggcgcauccggggcggggacggcaagaugaaggaccugagcccccgcugguacuucuacuaccucggcaccgggccggaggccggccugcccuacggggccaacaaggacggcaucaucugggucgcgaccgagggcgcccugaacacccccaaggaccacaucgggacgcggaaccccgccaacaacgccgcgaucgugcuccagcugccgcagggcaccacccugcccaagggguucuacgccgagggcucccgcgggggcucccaggccagcucccggagcuccagccgcucccucaacagcucccggaacagcacccccggcagcucccgcgggacgagccccgcccggauggccggcaacgggggcgacgcggcccuggcccugcuccugcuggaccgccucaaccagcuggaguccaagaugagcgggaagggccagcagcagcagggccagaccgugaccaagaaguccgccgccgaggcgagcaagaagccgcggcagaagcgcaccgccacgaaggccuacaacgucacccaggccuucgggcgccggggccccgagcagacccaggggaacuucggcgaccaggagcugauccgccaggggaccgacuacaagcacuggccccagaucgcccaguucgcgcccuccgccagcgccuucuucggcaugucccggaucggcauggaggugacgccgagcgggaccuggcucaccuacaccggcgccaucaagcuggacgacaaggaccccaacuucaaggaccaggugauccugcucaacaagcacaucgacgccuacaagacguucccgcccaccgagcccaagaaggacaagaagaagaaggcggacgagacccaggcccugccccagcgccagaagaagcagcagaccgucacgcugcuccccgccgccgaccuggacgacuucuccaagcagcugcagcagagcauguccagcgcggacuccacccaggccugaggacuaguuauaagacugacuagcccgaugggccucccaacgggcccuccuccccuccuugcaccgagauuaauaaaaaaaaaaaaaaaaaaaaaaaaaaaaaaaaaaaaaaaaaaaaaaaaaaaaaaaaaaaaaaaaugcaucccccccccccccccccccccccccccccccaaaggcucuuuucagagccaccagaauu

SEQ ID NO: 21257 - RNA, 1477 nt, Artificial Sequence
  SARS-CoV-2__MT496984.1__nucleocapsid protein (N) mRNA gc
aggagaaagcuuaccaugagcgacaacggcccccagaaccagcgcaacgccccgcggaucaccuucgggggccccuccgacagcaccggguccaaccagaacggcgagcgcagcggggcccgguccaagcagcgccggccccagggccugcccaacaacacggcgagcugguucaccgcccucacccagcacggcaaggaggaccugaaguucccgcgcgggcagggcgugcccaucaacaccaacuccagccccgacgaccagaucggguacuaccggcgcgccacgcggcgcauccggggcggggacggcaagaugaaggaccugagcccccgcugguacuucuacuaccucggcaccgggccggaggccggccugcccuacggggccaacaaggacggcaucaucugggucgcgaccgagggcgcccugaacacccccaaggaccacaucgggacgcggaaccccgccaacaacgccgcgaucgugcuccagcugccgcagggcaccacccugcccaagggguucuacgccgagggcucccgcgggggcucccaggccagcucccggagcuccagccgcucccggaacagcucccgcaacagcacccccggcagcucccgggggacgagccccgcccgcauggccggcaacgggggcgacgcggcccucgcccugcugcuccuggaccggcugaaccagcucgaguccaagaugagcgggaagggccagcagcagcagggccagaccgugaccaagaaguccgccgccgaggcgagcaagaagccgcgccagaagcgcaccgccacgaaggccuacaacgucacccaggccuucgggcggcgcggccccgagcagacccaggggaacuucggcgaccaggagcugauccggcaggggaccgacuacaagcacuggucccagaucgcccaguucgcgcccagcgccuccgccuucuucggcaugagccgcaucggcauggaggugacgcccuccgggaccuggcugaccuacaccggcgccaucaagcucgacgacaaggacccgaacuucaaggaccaggugauccugcugaacaagcacaucgacgccuacaagacguucccgcccaccgagcccaagaaggacaagaagaagaaggcggacgagacccaggcccucccccagcggcagaagaagcagcagaccgucacgcugcugcccgccgccgaccucgacgacuucagcaagcagcugcagcaguccaugagcuccgcggacagcacccaggccugaggacuaguuauaagacugacuagcccgaugggccucccaacgggcccuccuccccuccuugcaccgagauuaauaaaaaaaaaaaaaaaaaaaaaaaaaaaaaaaaaaaaaaaaaaaaaaaaaaaaaaaaaaaaaaaaugcaucccccccccccccccccccccccccccccccaaaggcucuuuucagagccaccagaauu

SEQ ID NO: 21258 - RNA, 1477 nt, Artificial Sequence
  SARS-CoV-2__MT496986.1__nucleocapsid protein (N) mRNA gc
aggagaaagcuuaccaugagcgacaacggcccccagaaccagcgcaacgccccgcggaucaccuucgggggccccuccgacagcaccggguccaaccagaacggcgagcgcagcggggcccgguccaagcagcgccggccccagggccugcccaacaacacggcgagcugguucaccgcccucacccagcacggcaaggaggaccugaaguucccgcgcgggcagggcgugcccaucaacaccaacuccagccccgacgaccagaucggguacuaccggcgcgccacgcggcgcauccggggcggggacggcaagaugaaggaccugagcccccgcugguacuucuacuaccucggcaccgggccggaggcccggcugcccuacggcgccaacaaggacgggaucaucugggucgcgaccgagggcgcccugaacacccccaaggaccacaucggcacgcgcaaccccgccaacaacgccgcgaucgugcuccagcugccgcaggggaccacccugcccaagggcuucuacgccgaggggagccggggcgggucccaggccagcucccgcagcuccagccggucccgcaacagccuccggaacuccacccccggcagcagccgcggcacgucccccgcccggauggccgggaacggcggggacgcggcccuggcccugcuccugcuggaccgccucaaccagcuggagagcaagauguccggcaaggggcagcagcagcagggccagaccgugaccaagaaguccgccgccgaggcguccaagaagccgcgccagaagcggaccgccacgaaggccuacaacgucacccaggccuucggccgccgggggcccgagcagacccagggcaacuucggggaccaggagcugauccgccagggcaccgacuacaagcacuggccccagaucgcccaguucgcgcccagcgccuccgccuucuucgggaugagccggaucggcauggaggugacgccguccggcaccuggcucaccuacaccggggccaucaagcuggacgacaaggaccccaacuucaaggaccaggugauccugcucaacaagcacaucgacgccuacaagacguucccgcccaccgagcccaagaaggacaagaagaagaaggcggacgagacccaggcccugccccagcgccagaagaagcagcagaccgucacgcugcuccccgccgccgaccuggacgacuucagcaagcagcugcagcaguccaugagcuccgcggacagcacccaggccugaggacuaguuauaagacugacuagcccgaugggccucccaacgggcccuccuccccuccuugcaccgagauuaauaaaaaaaaaaaaaaaaaaaaaaaaaaaaaaaaaaaaaaaaaaaaaaaaaaaaaaaaaaaaaaaaugcaucccccccccccccccccccccccccccccccaaaggcucuuuucagagccaccagaauu

SEQ ID NO: 21259 - RNA, 1477 nt, Artificial Sequence
  SARS-CoV-2__MT477845.1__nucleocapsid protein (N) mRNA gc
aggagaaagcuuaccaugagcgacaacggcccccagaaccagcgcaacgccccgcggaucaccuucgggggccccuccgacagcaccggguccaaccagaacggcgagcgcagcggggcccgguccaagcagcgccggccccagggccugcccaacaacacggcgagcugguucaccgcccucacccagcacggcaaggaggaccugaaguucccgcgcgggcagggcgugcccaucaacaccaacuccagccccgacgaccagaucggguacuaccggcgcgccacgcggcgcauccggggcggggacggcaagaugaaggaccugagcccccgcugguacuucuacuaccucggcaccgggccggaggccggccugcccuacggggccaacaaggacggcaucaucugggucgcgaccgagggcgcccugaacacccccaaggaccacaucgggacgcggaaccccgccaacaacgccgcgaucgugcuccagcugccgcagggcaccacccugcccaagggguucuacgccgagggcucccgcgggggcucccaggccagcucccggagcuccagccgcucccucaacagcucccggaacagcacccccggcagcuccaagcgcacgagccccgcccggauggccgggaacggcggggacgcggcccuggcccugcuccugcuggaccgccucaaccagcuggaguccaagaugagcggcaaggggcagcagcagcagggccagaccgugaccaagaaguccgccgccgaggcgagcaagaagccgcggcagaagcgcaccgccacgaaggccuacaacgucacccaggccuucggccgccgggggcccgagcagacccagggcaacuucggggaccaggagcugauccgccagggcaccgacuacaagcacuggccccagaucgcccaguucgcgcccuccgccagcgccuucuucgggaugucccggaucggcauggaggugacgccgagcggcaccuggcucaccuacaccggggccaucaagcuggacgacaaggaccccaacuucaaggaccaggugauccugcucaacaagcacaucgacgccuacaagacguucccgcccaccgagcccaagaaggacaagaagaagaaggcggacgagacccaggcccugccccagcgccagaagaagcagcagaccgucacgcugcuccccgccgccgaccuggacgacuucuccaagcagcugcagcagagcauguccagcgcggacuccacccaggccugaggacuaguuauaagacugacuagcccgaugggccucccaacgggcccuccuccccuccuugcaccgagauuaauaaaaaaaaaaaaaaaaaaaaaaaaaaaaaaaaaaaaaaaaaaaaaaaaaaaaaaaaaaaaaaaaugcaucccccccccccccccccccccccccccccccaaaggcucuuuucagagccaccagaauu

SEQ ID NO: 21260 - RNA, 1477 nt, Artificial Sequence
  SARS-CoV-2__MT472625.1__nucleocapsid protein (N) mRNA gc
aggagaaagcuuaccaugagcgacaacggcccccagaaccagcgcaacgccccgcggaucaccuucgggggccccuccgacagcaccggguccaaccagaacggcgagcgcagcggggcccgguccaagcagcgccggccccagggccugcccaacaacacggcgagcugguucaccgcccucacccagcacggcaaggaggaccugaaguucccgcgcgggcagggcgugcccaucaacaccaacuccagccccgacgaccagaucggguacuaccggcgcgccacgcggcgcauccggggcggggacggcaagaugaaggaccugagcccccgcugguacuucuacuaccucggcaccgggccggaggccggccugcccuacggggccaacaaggacggcaucaucugggucgcgaccgagggcgcccugaacacccccaaggaccacaucgggacgcggaaccccgccaacaacgccgcgaucgugcuccagcugccgcagggcaccacccugcccaagggguucuacgccgagggcucccgcgggggcucccaggccagcucccggagcuccagccgcucccggaacagcucccgcaacagcacccccggcagcucccgggggacgagccccgcccgcauggccggcaacgggggcgacgcggcccucgcccugcugcuccuggaccggcugaaccagcucgaguccaagaugagcgggaagggccagcagcagcagggccagaccgugaccaagaaguccgccgccgaggcgagcaagaagccgcgccagaagcgcaccgccacgaaggccuacaacgucacccaggccuucgggcggcgcggccccgagcagacccaggggaacuucggcgaccaggagcugauccggcaggggaccgacuacaagcacuggccccagaucgcccaguucgcgcccuccgccagcgccuucuucggcaugucccgcaucggcauggaggugacgccgagcgggaccuggcugaccuacaccggcgccaucaagcucgacgacaaggaccccaacuucaaggaccaggugauccugcugaacaagcacaucgacgccuacaagacguucccgcccaccgagcccaagaaggacaagaagaagaaggcggacgagacccaggcccucccccagcggcagaagaagcagcagaccgucacgcugcugcccgccgccgagcucgacgacuucuccaagcagcugcagcagagcauguccagcgcggacuccacccaggccugaggacuaguuauaagacugacuagcccgaugggccucccaacgggcccuccuccccuccuugcaccgagauuaauaaaaaaaaaaaaaaaaaaaaaaaaaaaaaaaaaaaaaaaaaaaaaaaaaaaaaaaaaaaaaaaaugcaucccccccccccccccccccccccccccccccaaaggcucuuuucagagccaccagaauu

SEQ ID NO: 21261 - RNA, 1477 nt, Artificial Sequence
  SARS-CoV-2__MT358640.1__nucleocapsid protein (N) mRNA gc
aggagaaagcuuaccaugagcgacaacggcccccagaaccagcgcaacgccccgcggaucaccuucgggggccccuccgacagcaccggguccaaccagaacggcgagcgcagcggggcccgguccaagcagcgccggccccagggccugcccaacaacacggcgagcugguucaccgcccucacccagcacggcaaggaggaccugaaguucccgcgcgggcagggcgugcccaucaacaccaacuccagccccgacgaccagaucggguacuaccggcgcgccacgcggcgcauccggggcggggacggcaagaugaaggaccugagcccccgcugguacuucuacuaccucggcaccgggccggaggccggccugcccuacggggccaacaaggacggcaucaucugggucgcgaccgagggcgcccugaacacccccaaggaccacaucgggacgcggaaccccgccaacaacgccgcgaucgugcuccagcugccgcagggcaccacccugcccaagggguucuacgccgagggcucccgcgggggcucccaggccagcucccggagcuccagccgcucccggaacagcucccgcaacagcacccccggcagcuccaagcggacgagccccgcccgcauggccgggaacggcggggacgcggcccucgcccugcugcuccuggaccggcugaaccaguucgaguccaagaugagcggcaaggggcagcagcagcagggccagaccgugaccaagaaguccgccgccgaggcgagcaagaagccgcgccagaagcgcaccgccacgaaggccuacaacgucacccaggccuucggccggcgcgggcccgagcagacccagggcaacuucggggaccaggagcucauccggcagggcaccgacuacaagcacuggccccagaucgcccaguucgcgcccuccgccagcgccuucuucgggaugucccgcaucggcauggaggugacgccgagcggcaccuggcugaccuacaccggggccaucaagcuggacgacaaggaccccaacuucaaggaccaggugauccuccugaacaagcacaucgacgccuacaagacguucccgcccaccgagcccaagaaggacaagaagaagaaggcggacgagacccaggcccugccccagcggcagaagaagcagcagaccgucacgcuccugcccgccgccgaccuggacgacuucuccaagcagcuccagcagagcauguccagcgcggacuccacccaggccugaggacuaguuauaagacugacuagcccgaugggccucccaacgggcccuccuccccuccuugcaccgagauuaauaaaaaaaaaaaaaaaaaaaaaaaaaaaaaaaaaaaaaaaaaaaaaaaaaaaaaaaaaaaaaaaaugcaucccccccccccccccccccccccccccccccaaaggcucuuuucagagccaccagaauu

SEQ ID NO: 21262 - RNA, 1477 nt, Artificial Sequence
  SARS-CoV-2__MT459857.1__nucleocapsid protein (N) mRNA gc
aggagaaagcuuaccaugagcgacaacggcccccagaaccagcgcaacgccccgcggaucaccuucgggggccccuccgacagcaccggguccaaccagaacggcgagcgcagcggggcccgguccaagcagcgccggccccagggccugcccaacaacacggcgagcugguucaccgcccucacccagcacggcaaggaggaccugaaguucccgcgcgggcagggcgugcccaucaacaccaacuccagccccgacgaccagaucggguacuaccggcgcgccacgcggcgcauccggggcggggacggcaagaugaaggaccugagcccccgcugguacuucuacuaccucggcaccgggccggaggccggccugcccuacggggccaacaaggacggcaucaucugggucgcgaccgagggcgcccugaacacccccaaggaccacaucgggacgcggaaccccgccaacaacgccgcgaucgugcuccagcugccgcagggcaccacccugcccaagggguucuacgccgagggcucccgcgggggcucccaggccagcucccggagcuccagccgcucccggaacagcucccgcaacagcacccccggcagcuccaagcggaucagccccgcccgcauggccgggaacggcggggacgcggcccucgcccugcugcuccuggaccggcugaaccagcucgaguccaagaugagcggcaaggggcagcagcagcagggccagacggugaccaagaaguccgccgccgaggcgagcaagaagccgcgccagaagcgcaccgccaccaaggccuacaacgucacgcaggccuucggccggcgcgggcccgagcagacccagggcaacuucggggaccaggagcugauccggcagggcaccgacuacaagcacuggccccagaucgcccaguucgcgcccuccgccagcgccuucuucgggaugucccgcaucggcauggaggugaccccgagcggcacguggcugaccuacaccggggccaucaagcucgacgacaaggaccccaacuucaaggaccaggugauccugcugaacaagcacaucgacgccuacaagaccuucccgcccacggagcccaagaaggacaagaagaagaaggcggacgagacccaggcccucccccagcggcagaagaagcagcagaccgucacccugcugcccgccgccgaccucgacgacuucuccaagcagcugcagcagagcauguccagcgcggacuccacgcaggccugaggacuaguuauaagacugacuagcccgaugggccucccaacgggcccuccuccccuccuugcaccgagauuaauaaaaaaaaaaaaaaaaaaaaaaaaaaaaaaaaaaaaaaaaaaaaaaaaaaaaaaaaaaaaaaaaugcaucccccccccccccccccccccccccccccccaaaggcucuuuucagagccaccagaauu

SEQ ID NO: 21263 - RNA, 1477 nt, Artificial Sequence
  SARS-CoV-2__MT459903.1__nucleocapsid protein (N) mRNA gc
aggagaaagcuuaccaugagcgacaacggcccccagaaccagcgcaacgccccgcggaucaccuucgggggccccuccgacagcaccggguccaaccagaacggcgagcgcagcggggcccgguccaagcagcgccggccccagggccugcccaacaacacggcgagcugguucaccgcccucacccagcacggcaaggaggaccugaaguucccgcgcgggcagggcgugcccaucaacaccaacuccagccccgacgaccagaucggguacuaccggcgcgccacgcggcgcauccggggcggggacggcaagaugaaggaccugagcccccgcugguacuucuacuaccucggcaccgggccggaggccggccugcccuacggggccaacaaggacggcaucaucugggucgcgaccgagggcgcccugaacacccccaaggaccacaucgggacgcggaaccccgccaacaacgccgcgaucgugcuccagcugccgcagggcaccacccugcccaagggguucuacgccgagggcucccgcgggggcucccaggccagcucccggagcuccagccgcucccggaacagcucccgcaacagcacccccggcagcuccaagcggacgagccccgcccgcauggccgggaacggcggggacgcggcccucgcccugcugcuccuggaccggcugaaccagcucgaguccaagaugagcggcaaggggcagcagcagcagggccagaccgugaccaagaaguccgccgccgaggcgagcaagaagccgcgccagaagcgcaccgccacgaaggccuacaacgucacccaggccuucggccggcgcgggcccgagcagacccagggcaacuucggggaccaggagcugauccggcagggcaccgacuacaagcacuggccccagaucgcccaguucgcgcccuccgccagcgccuucuucgggaugucccgcaucggcauggaggugacgccgagcggcaccuggcugaccuacaccggggccaucaagcucgacgacaaggaccccaacuucaaggaccaggugauccugcugaacaagcacaucgacgccuacaagacguuccggcccaccgagcccaagaaggacaagaagaagaaggcggacgagacccaggcccucccgcagcgccagaagaagcagcagaccgucacgcugcugcccgccgccgaccucgacgacuucuccaagcagcugcagcagagcauguccagcgcggacuccacccaggccugaggacuaguuauaagacugacuagcccgaugggccucccaacgggcccuccuccccuccuugcaccgagauuaauaaaaaaaaaaaaaaaaaaaaaaaaaaaaaaaaaaaaaaaaaaaaaaaaaaaaaaaaaaaaaaaaugcaucccccccccccccccccccccccccccccccaaaggcucuuuucagagccaccagaauu

SEQ ID NO: 21264 - RNA, 1477 nt, Artificial Sequence
  SARS-CoV-2__MT459987.1__nucleocapsid protein (N) mRNA gc
aggagaaagcuuaccaugagcgacaacggcccccagaaccagcgcaacgcccugcggaucaccuucgggggcccguccgacagcaccggguccaaccagaacggcgagcgcagcggggcccgguccaagcagcgccggccccagggccuccccaacaacacggcgagcugguucaccgcccugacccagcacggcaaggaggaccugaaguucccccgcgggcagggcgugccgaucaacaccaacuccagccccgacgaccagaucggguacuaccggcgcgccacgcggcgcauccggggcggggacggcaagaugaaggaccucagcccccgcugguacuucuacuaccugggcaccgggcccgaggccggccugccguacggggccaacaaggacggcaucaucugggucgcgaccgagggcgcccucaacacccccaaggaccacaucgggacgcggaaccccgccaacaacgccgcgaucgugcugcagcugccccagggcaccacccucccgaagggguucuacgccgagggcucccgcgggggcucccaggccagcucccggagcuccagccgcucccggaacagcucccgcaacagcacccccggcagcucccgggggacgagccccgcccgcauggccggcaacgggggcgacgcggcccuggcccugcuccugcuggaccggcucaaccagcuggaguccaagaugagcgggaagggccagcagcagcagggccagaccgugaccaagaaguccgccgccgaggcgagcaagaagccccgccagaagcgcaccgccacgaaggccuacaacgucacccaggccuucgggcggcgcggcccggagcagacccaggggaacuucggcgaccaggagcugauccggcaggggaccuacuacaagcacuggccccagaucgcccaguucgcgcccuccgccagcgccuucuucggcaugucccgcaucggcauggaggugacgcccagcgggaccuggcucaccuacaccggcgccaucaagcuggacgacaaggacccgaacuucaaggaccaggugauccugcucaacaagcacaucgacgccuacaagacguucccgcccaccgagcccaagaaggacaagaagaagaaggcggacgagacccaggcccugccccagcggcagaagaagcagcagaccgucacgcugcuccccgccgccgaccuggacgacuucuccaagcagcugcagcagagcauguccagcgcggacuccacccaggccugaggacuaguuauaagacugacuagcccgaugggccucccaacgggcccuccuccccuccuugcaccgagauuaauaaaaaaaaaaaaaaaaaaaaaaaaaaaaaaaaaaaaaaaaaaaaaaaaaaaaaaaaaaaaaaaaugcaucccccccccccccccccccccccccccccccaaaggcucuuuucagagccaccagaauu

SEQ ID NO: 21265 - RNA, 1477 nt, Artificial Sequence
  SARS-CoV-2__MT461610.1__nucleocapsid protein (N) mRNA gc
aggagaaagcuuaccaugagcgacaacggcccccagaaccagcgcaacgccccgcggaucaccuucgggggccccuccgacagcaccggguccaaccagaacggcgagcgcagcggggcccgguccaagcagcgccggccccagggccugcccaacaacacggcgagcugguucaccgcccucacccagcacggcaaggaggaccugaaguucccgcgcgggcagggcgugcccaucaacaccaacuccagccccuacgaccagaucggguacuaccggcgcgccacgcggcgcauccggggcggggacggcaagaugaaggaccugagcccccgcugguacuucuacuaccucggcaccgggccggaggccggccugcccuacggggccaacaaggacggcaucaucugggucgcgaccgagggcgcccugaacacccccaaggaccacaucgggacgcggaaccccgccaacaacgccgcgaucgugcuccagcugccgcagggcaccacccugcccaagggguucuacgccgagggcucccgcgggggcucccaggccagcucccggagcuccagccgcucccggaacagcucccgcaacagcacccccggcagcucccgggggacgagccccgcccgcauggccggcaacgggggcgacgcggcccucgcccugcugcuccuggaccggcugaaccagcucgaguccaagaugagcgggaagggccagcagcagcagggccagaccgugaccaagaaguccgccgccgaggcgagcaagaagccgcgccagaagcgcaccgccacgaaggccuacaacgucacccaggccuucgggcggcgcggccccgagcagacccaggggaacuucggcgaccaggagcugauccggcaggggaccgacuacaagcacuggccccagaucgcccaguucgcgcccuccgccagcgccuucuucggcaugucccgcaucggcauggaggugacgccgagcgggaccuggcugaccuacaccggcgccaucaagcucgacgacaaggaccccaacuucaaggaccaggugauccugcugaacaagcacaucgacgccuacaagacguucccgcccaccgagcccaagaaggacaagaagaagaaggcggacgagacccaggcccucccccagcggcagaagaagcagcagaccgucacgcugcugcccgccgccgaccucgacgacuucuccaagcagcugcagcagagcauguccagcgcggacuccacccaggccugaggacuaguuauaagacugacuagcccgaugggccucccaacgggcccuccuccccuccuugcaccgagauuaauaaaaaaaaaaaaaaaaaaaaaaaaaaaaaaaaaaaaaaaaaaaaaaaaaaaaaaaaaaaaaaaaugcaucccccccccccccccccccccccccccccccaaaggcucuuuucagagccaccagaauu

SEQ ID NO: 21266 - RNA, 1477 nt, Artificial Sequence
  SARS-CoV-2__MT461663.1__nucleocapsid protein (N) mRNA gc
aggagaaagcuuaccaugagcgacaacggcccccagaaccagcgcaacgccccgcggaucaccuucgggggccccuccgacagcaccggguccaaccagaacggcgagcgcagcggggcccgguccaagcagcgccggccccagggccugcccaacaacacggcgagcugguucaccgcccucacccagcacggcaaggaggaccugaaguucccgcgcgggcagggcgugcccaucaacaccaacuccagccccgacgaccagaucggguacuaccggcgcgccacgcggcgcauccggggcggggacggcaagaugaaggaccugagcccccgcugguacuucuacuaccucggcaccgggccggaggccggccugcccuacggggccaacaaggacggcaucaucugggucgcgaccgagggcgcccugaacacccccaaggaccacaucgggacgcggaaccccgccaacaacgccgcgaucgugcuccagcugccgcagggcaccacccugcccaagggguucuacgccgagggcagccgcgggggcucccaggccagcucccggagcuccagccgcucccggaacaucagccgcaacuccacccccggcagcagcaagcggacgucccccgcccgcauggccgggaacggcggggacgcggcccucgcccugcugcuccuggaccggcugaaccagcucgagagcaagauguccggcaaggggcagcagcagcagggccagaccgugaccaagaaguccgccgccgaggcguccaagaagccgcgccagaagcgcaccgccacgaaggccuacaacgucacccaggccuucggccggcgcgggcccgagcagacccagggcaacuucggggaccaggagcugauccggcagggcaccgacuacaagcacuggccccagaucgcccaguucgcgcccagcgccuccgccuucuucgggaugagccgcaucggcauggaggugacgccguccggcaccuggcugaccuacaccggggccaucaagcucgacgacaaggaccccaacuucaaggaccaggugauccugcugaacaagcacaucgacgccuacaagacguucccgcccaccgagcccaagaaggacaagaagaagaaggcggacgagacccaggcccucccccagcggcagaagaagcagcagaccgucacgcugcugcccgccgccgaccucgacgacuucagcaagcagcugcagcaguccaugagcuccgcggacagcacccaggccugaggacuaguuauaagacugacuagcccgaugggccucccaacgggcccuccuccccuccuugcaccgagauuaauaaaaaaaaaaaaaaaaaaaaaaaaaaaaaaaaaaaaaaaaaaaaaaaaaaaaaaaaaaaaaaaaugcaucccccccccccccccccccccccccccccccaaaggcucuuuucagagccaccagaauu

SEQ ID NO: 21267 - RNA, 1477 nt, Artificial Sequence
  SARS-CoV-2__MT450889.1__nucleocapsid protein (N) mRNA gc
aggagaaagcuuaccaugagcgacaacggcccccagaaccagcgcaacgccccgcggaucaccuucgggggccccuccgacagcaccggguccaaccagaacggcgagcgcagcggggcccgguccaagcagcgccggccccagggccugcccaacaacacggcgagcugguucaccgcccucacccagcacggcaaggaggaccugaaguucccgcgcgggcagggcgugcccaucaacaccaacuccagccccgacgaccagaucggguacuaccggcgcgccacgcggcgcauccggggcggggacggcaagaugaaggaccugagcccccgcugguacuucuacuaccucggcaccgggccggaggccggccugcccuacggggccaacaaggacggcaucaucugggucgcgaccgagggcgcccugaacacccccaaggaccacaucgggacgcggaaccccgccaacaacgccgcgaucgugcuccagcugccgcagggcaccacccugcccaagggguucuacgccgagggcucccgcgggggcucccaggccagcucccggagcuccagccgcucccggaacagcucccgcaacagcacccccggcagcucccgggggacgagccccgcccgcauggccggcaacgggggcgacgcggcccucgcccugcugcuccuggaccggcugaaccagcucgaguccaagaugagcgggaagggccagcagcagcagggccagaccgugaccaagaaguccgccgccgaggcgagcaagaagccgcgccagaagcgcaccgccacgaaggccuacaacgucacccaggccuucgggcggcgcggccccgagcagacccaggggaacuucggcgaccaggagcugauccggcaggggaccgacuacaagcacuggccccagaucgcccaguucgcgcccuccgccagcgccuucuucggcaugucccgcaucggcauggaggugacgccgagcgggaccuggcugaccuacaccggcgccaucaagcucgacgacaaggaccccaacuucaaggaccaggugauccugcugaacaagcacaucgacgccuacaagacguucccgcccaccgagcccaagaaggacaagaagaagaaggcggacgagacccaggcccucccccagcggcacaagaagcagcagaccgucacgcugcugcccgccgccgaccucgacgacuucuccaagcagcugcagcagagcauguccagcgcggacuccacccaggccugaggacuaguuauaagacugacuagcccgaugggccucccaacgggcccuccuccccuccuugcaccgagauuaauaaaaaaaaaaaaaaaaaaaaaaaaaaaaaaaaaaaaaaaaaaaaaaaaaaaaaaaaaaaaaaaaugcaucccccccccccccccccccccccccccccccaaaggcucuuuucagagccaccagaauu

SEQ ID NO: 21268 - RNA, 1477 nt, Artificial Sequence
  SARS-CoV-2__MT451874.1__nucleocapsid protein (N) mRNA gc
aggagaaagcuuaccaugagcgacaacggcccccagaaccagcgcaacgcccugcggaucaccuucgggggcccguccgacagcaccggguccaaccagaacggcgagcgcagcggggcccgguccaagcagcgccggccccagggccuccccaacaacacggcgagcugguucaccgcccugacccagcacggcaaggaggaccugaaguucccccgcgggcagggcgugccgaucaacaccaacuccagccccgacgaccagaucggguacuaccggcgcgccacgucccggauccgcggcggggacggcaagaugaaggaccucagcccccggugguacuucuacuaccugggcaccgggcccgaggccggccugccguacggggccaacaaggacggcaucaucugggucgcgaccgagggcgcccucaacacccccaaggaccacaucgggacgcgcaaccccgccaacaacgccgcgaucgugcugcagcugccccagggcaccacccucccgaagggguucuacgccgagggcucccgcgggggcagccaggccuccagccgguccagcucccggagccgcaacuccagccggaacagcacccccggcuccagccgcgggacgucccccgcccggauggccggcaacgggggcgacgcggcccuggcccugcuccugcuggaccgccucaaccagcuggagagcaagauguccgggaagggccagcagcagcagggccagaccgugaccaagaaguccgccgccgaggcgagcaagaagccccggcagaagcgcaccgccacgaaggccuacaacgucacccaggccuucgggcgccggggcccggagcagacccaggggaacuucggcgaccaggagcugauccgccaggggaccgacuacaagcacuggccccagaucgcccaguucgcgcccagcgccuccgccuucuucggcaugagccggaucggcauggaggugacgcccuccgggaccuggcucaccuacaccggcgccaucaagcuggacgacaaggacccgaacuucaaggaccaggugauccugcucaacaagcacaucgacgccuacaagacguucccgcccaccgagcccaagaaggacaagaagaagaaggcggacgagacccaggcccugccccagcgccagaagaagcagcagaccgucacgcugcuccccgccgccgaccuggacgacuucagcaagcagcugcagcaguccaugagcuccgcggacagcacccaggccugaggacuaguuauaagacugacuagcccgaugggccucccaacgggcccuccuccccuccuugcaccgagauuaauaaaaaaaaaaaaaaaaaaaaaaaaaaaaaaaaaaaaaaaaaaaaaaaaaaaaaaaaaaaaaaaaugcaucccccccccccccccccccccccccccccccaaaggcucuuuucagagccaccagaauu

SEQ ID NO: 21269 - RNA, 1477 nt, Artificial Sequence
  SARS-CoV-2__MT451887.1__nucleocapsid protein (N) mRNA gc
aggagaaagcuuaccaugagcgacaacggcccccagaaccagcgcaacgccccgcggaucaccuucgggggccccuccgacagcaccggguccaaccagaacggcgagcgcagcggggcccgguccaagcagcgccggccccagggccugcccaacaacacggcgagcugguucaccgcccucacccagcacggcaaggaggaccugaaguucccgcgcgggcagggcgugcccaucaacaccaacuccagccccgacgaccagaucggguacuaccggcgcgccacgcggcgcauccggggcggggacggcaagaugaaggaccugagcccccgcugguacuucuacuaccucggcaccgggccggaggccggccugcccuacggggccaacaaggacggcaucaucugggucgcgaccgagggcgcccugaacacccccaaggaccacaucgggacgcggaaccccgccaacaacgccgcgaucgugcuccagcugccgcagggcaccacccugcccaagggguucuacgccgagggcucccgcgggggcucccaggccagcucccggagcuccagccgcucccggaacagcucccgcaacagcacccccggcagcucccgggggacgagccccgcccgcauggccggcaacgggggcgacgcggcccucgcccugcugcuccuggaccggcugaaccagcucgaguccaagaugagcugcaaggggcagcagcagcagggccagaccgugaccaagaaguccgccgccgaggcgagcaagaagccgcgccagaagcgcaccgccacgaaggccuacaacgucacccaggccuucggccggcgcgggcccgagcagacccagggcaacuucggggaccaggagcugauccggcagggcaccgacuacaagcacuggccccagaucgcccaguucgcgcccuccgccagcgccuucuucgggaugucccgcaucggcauggaggugacgccgagcggcaccuggcugaccuacaccggggccaucaagcucgacgacaaggaccccaacuucaaggaccaggugauccugcugaacaagcacaucgacgccuacaagacguucccgcccaccgagcccaagaaggacaagaagaagaaggcggacgagacccaggcccucccccagcggcagaagaagcagcagaccgucacgcugcugcccgccgccgaccucgacgacuucuccaagcagcugcagcagagcauguccagcgcggacuccacccaggccugaggacuaguuauaagacugacuagcccgaugggccucccaacgggcccuccuccccuccuugcaccgagauuaauaaaaaaaaaaaaaaaaaaaaaaaaaaaaaaaaaaaaaaaaaaaaaaaaaaaaaaaaaaaaaaaaugcaucccccccccccccccccccccccccccccccaaaggcucuuuucagagccaccagaauu

SEQ ID NO: 21270 - RNA, 1477 nt, Artificial Sequence
  SARS-CoV-2__MT450966.1__nucleocapsid protein (N) mRNA gc
aggagaaagcuuaccaugagcgacaacggcccccagaaccagcgcaacgccccgcggaucaccuucgggggccccuccgacagcaccggguccaaccagaacggcgagcgcagcggggcccgguccaagcagcgccggccccagggccugcccaacaacacggcgagcugguucaccgcccucacccagcacggcaaggaggaccugaaguucccgcgcgggcagggcgugcccaucaacaccaacuccagccccgacgaccagaucggguacuaccggcgcgccacgcggcgcauccggggcggggacggcaagaugaaggaccugagcccccgcugguacuucuacuaccucggcaccgggccggaggccggccugcccuacggggccaacaaggacggcaucaucugggucgcgaccgagggcgcccugaacacccccaaggaccacaucgggacgcggaaccccgccaacaacgccgcgaucgugcuccagcugccgcagggcaccacccugcccaagggguucuacgccgagggcucccgcgggggcucccaggccagcucccggagcuccagccgcucccggaacagcucccgcaacagcacccccggcagcucccgggggacgagccccgcccgcauggccggcaacgggggcgacgcggcccucgcccugcugcuccuggaccggcugaaccagcucgaguccaagaugagcgggaagggccagcagcagcagggccagaccgugaccaagaaguccgccgccgaggcgagcaagaagccgcgccagaagcgcaccgccacgaaggccuacaacgucauccaggccuucgggcggcgcggccccgagcagacccaggggaacuucggcgaccaggagcugauccggcaggggaccgacuacaagcacuggccccagaucgcccaguucgcgcccuccgccagcgccuucuucggcaugucccgcaucggcauggaggugaccccgagcgggacguggcugaccuacaccggcgccaucaagcucgacgacaaggaccccaacuucaaggaccaggugauccugcugaacaagcacaucgacgccuacaagaccuucccgcccacggagcccaagaaggacaagaagaagaaggcggacgagacccaggcccucccccagcggcagaagaagcagcagaccgucacccugcugcccgccgccgaccucgacgacuucuccaagcagcugcagcagagcauguccagcgcggacuccacgcaggccugaggacuaguuauaagacugacuagcccgaugggccucccaacgggcccuccuccccuccuugcaccgagauuaauaaaaaaaaaaaaaaaaaaaaaaaaaaaaaaaaaaaaaaaaaaaaaaaaaaaaaaaaaaaaaaaaugcaucccccccccccccccccccccccccccccccaaaggcucuuuucagagccaccagaauu

SEQ ID NO: 21271 - RNA, 1477 nt, Artificial Sequence
  SARS-CoV-2__MT451143.1__nucleocapsid protein (N) mRNA gc
aggagaaagcuuaccaugagcgacaacggcccccagaaccagcgcaacgccccgcggaucaccuucgggggccccuccgacagcaccggguccaaccagaacggcgagcgcagcggggcccgguccaagcagcgccggccccagggccugcccaacaacacggcgagcugguucaccgcccucacccagcaccgcaaggaggaccugaaguucccgcggggccagggggugcccaucaacaccaacuccagccccgacgaccagaucggcuacuaccgccgggccacgcgccggauccgcgggggcgacgggaagaugaaggaccugagcccccggugguacuucuacuaccucggcaccggcccggaggccgggcugcccuacggcgccaacaaggacgggaucaucugggucgcgaccgagggcgcccugaacacccccaaggaccacaucggcacgcgcaaccccgccaacaacgccgcgaucgugcuccagcugccgcaggggaccacccugcccaagggcuucuacgccgaggggucccggggcgggucccaggccagcucccgcagcuccagccggucccgcaacagcucccggaacagcacccccggcagcucccgcggcacgagccccgcccggauggccgggaacggcggggacgcggcccucgcccugcugcuccuggaccgccugaaccagcucgaguccaagaugagcggcaaggggcagcagcagcagggccagaccgugaccaagaaguccgccgccgaggcgagcaagaagccgcgccagaagcggaccgccacgaaggccuacaacgucacccaggccuucggccgccgggggcccgagcagacccagggcaacuucggggaccaggagcugauccgccagggcaccgacuacaagcacuggccccagaucgcccaguucgcgcccuccgccagcgccuucuucgggaugucccggaucggcauggaggugacgccgagcggcaccuggcugaccuacaccggggccaucaagcucgacgacaaggaccccaacuucaaggaccaggugauccugcugaacaagcacaucgacgccuacaagacguucccgcccaccgagcccaagaaggacaagaagaagaaggcggacgagacccaggcccucccccagcgccagaagaagcagcagaccgucacgcugcugcccgccgccgaccucgacgacuucuccaagcagcugcagcagagcauguccagcgcggacuccacccaggccugaggacuaguuauaagacugacuagcccgaugggccucccaacgggcccuccuccccuccuugcaccgagauuaauaaaaaaaaaaaaaaaaaaaaaaaaaaaaaaaaaaaaaaaaaaaaaaaaaaaaaaaaaaaaaaaaugcaucccccccccccccccccccccccccccccccaaaggcucuuuucagagccaccagaauu

SEQ ID NO: 21272 - RNA, 1477 nt, Artificial Sequence
  SARS-CoV-2__MT451189.1__nucleocapsid protein (N) mRNA gc
aggagaaagcuuaccaugagcgacaacggcccccagaaccagcgcaacgccccgcggaucaccuucgggggccccuccgacagcaccggguccaaccagaacggcgagcgcagcggggcccgguccaagcagcgccggccccagggccugcccaacaacacggcgagcugguucaccgcccucacccagcacggcaaggaggaccugaaguucccgcgcgggcagggcgugcccaucaacaccaacuccagccccgacgaccagaucggguacuaccggcgcgccacgcggcgcauccggggcggggacggcaagaugaaggaccugagcccccgcugguacuucuacuaccucggcaccgggccggaggccggccugcccuacggggccaacaaggacggcaucaucugggucgcgaccgagggcgcccugaacacccccaaggaccacaucgggacgcggaaccccgccaacaacgccgcgaucgugcuccagcugccgcagggcaccacccugcccaagggguucuacgccgagggcucccgcgggggcucccaggccagcucccggagcuccagccgcucccggaacagcucccgcaacagcauccccggcagcuccaagcggaccagccccgcccgcauggccgggaacggcggggacgcggcccucgcccugcugcuccuggaccggcugaaccagcucgaguccaagaugagcggcaaggggcagcagcagcagggccagacggugaccaagaaguccgccgccgaggcgagcaagaagccgcgccagaagcgcaccgccaccaaggccuacaacgucacgcaggccuucggccggcgcgggcccgagcagacccagggcaacuucggggaccaggagcugauccggcagggcaccgacuacaagcacuggccccagaucgcccaguucgcgcccuccgccagcgccuucuucgggaugucccgcaucggcauggaggugaccccgagcggcacguggcugaccuacaccggggccaucaagcucgacgacaaggaccccaacuucaaggaccaggugauccugcugaacaagcacaucgacgccuacaagaccuucccgcccacggagcccaagaaggacaagaagaagaaggcggacgagacccaggcccucccccagcggcagaagaagcagcagaccgucacccugcugcccgccgccgaccucgacgacuucuccaagcagcugcagcagagcauguccagcgcggacuccacgcaggccugaggacuaguuauaagacugacuagcccgaugggccucccaacgggcccuccuccccuccuugcaccgagauuaauaaaaaaaaaaaaaaaaaaaaaaaaaaaaaaaaaaaaaaaaaaaaaaaaaaaaaaaaaaaaaaaaugcaucccccccccccccccccccccccccccccccaaaggcucuuuucagagccaccagaauu

SEQ ID NO: 21273 - RNA, 1477 nt, Artificial Sequence
  SARS-CoV-2__MT451245.1__nucleocapsid protein (N) mRNA gc
aggagaaagcuuaccaugagcgacaacggcccccagaaccagcgcaacgccccgcggaucaccuucgggggccccuccgacagcaccggguccaaccagaacggcgagcgcagcggggcccgguccaagcagcgccggccccagggccugcccaacaacacggcgagcugguucaccgcccucacccagcacggcaaggaggaccugaaguucccgcgcgggcagggcgugcccaucaacaccaacuccagccccgacgaccagaucggguacuaccggcgcgccacgcggcgcauccggggcggggacggcaagaugaaggaccugagcccccgcugguacuucuacuaccucggcaccgggccggaggccggccugcccuacggggccaacaaggacggcaucaucugggucgcgaccgagggcgcccugaacacccccaaggaccacaucgggacgcggaaccccgccaacaacgccgcgaucgugcuccagcugccgcagggcaccacccugcccaagggguucuacgccgagggcagccgcgggggcggccaggccuccagccgguccagcucccgcagccggaacuccagccgcaacuccacccccgggagcagcaagcggacgucccccgcccgcauggccggcaacgggggcgacgcggcccucgcccugcugcuccuggaccggcugaaccagcucgagagcaagauguccgggaagggccagcagcagcagggccagaccgugaccaagaaguccgccgccgaggcguccaagaagccgcgccagaagcgcaccgccacgaaggccuacaacgucacccaggccuucgggcggcgcggccccgagcagacccaggggaacuucggcgaccaggagcugauccggcaggggaccgacuacaagcacuggccccagaucgcccaguucgcgcccagcgccuccgccuucuucggcaugagccgcaucggcauggaggugacgccguccgggaccuggcugaccuacaccggcgccaucaagcucgacgacaaggaccccaacuucaaggaccaggugauccugcugaacaagcacaucgacgccuacaagacguucccgcccaccgagcccaagaaggacaagaagaagaaggcggacgagacccaggcccucccccagcggcagaagaagcagcagaccgucacgcugcugcccgccgccgaccucgacgacuucagcaagcagcugcagcaguccaugagcuccgcggacagcacccaggccugaggacuaguuauaagacugacuagcccgaugggccucccaacgggcccuccuccccuccuugcaccgagauuaauaaaaaaaaaaaaaaaaaaaaaaaaaaaaaaaaaaaaaaaaaaaaaaaaaaaaaaaaaaaaaaaaugcaucccccccccccccccccccccccccccccccaaaggcucuuuucagagccaccagaauu

SEQ ID NO: 21274 - RNA, 1477 nt, Artificial Sequence
  SARS-CoV-2__MT451258.1__nucleocapsid protein (N) mRNA gc
aggagaaagcuuaccaugagcgacaacggcccccagaaccagcgcaacgccccgcggaucaccuucgggggccccuccgacagcaccggguccaaccagaacggcgagcgcagcggggcccgguccaagcagcgccggccccagggccugcccaacaacacggcgagcugguucaccgcccucacccagcacggcaaggaggaccugaaguucccgcgcgggcagggcgugcccaucaacaccaacuccagccccgacgaccagaucggguacuaccggcgcgccacgcggcgcauccggggcggggacggcaagaugaaggaccugagcccccgcugguacuucuacuaccucggcaccgggccggaggccggccugcccuacggggccaacaaggacggcaucaucugggucgcgaccgagggcgcccugaacacccccaaggaccacaucgggacgcggaaccccgccaacaacgccgcgaucgugcuccagcugccgaagggcaccacccugcccaagggguucuacgccgagggcagccgcgggggcucccaggccagcucccggagcuccagccgcucccggaacagcucccgcaaccucacccccggcagcagccgggggacgucccccgcccgcauggccggcaacgggggcgacgcggcccuggcccugcuccugcuggaccggcucaaccagcuggagagcaagauguccgggaagggccagcagcagcagggccagaccgugaccaagaaguccgccgccgaggcguccaagaagccgcgccagaagcgcaccgccacgaaggccuacaacgucacccaggccuucgggcggcgcggccccgagcagacccaggggaacuucggcgaccaggagcugauccggcaggggaccgacuacaagcacuggccccagaucgcccaguucgcgcccagcgccuccgccuucuucggcaugagccgcaucggcauggaggugacgccguccgggaccuggcucaccuacaccggcgccaucaagcuggacgacaaggaccccaacuucaaggaccaggugauccugcucaacaagcacaucgacgccuacaagacguucccgcccaccgagcccaagaaggacaagaagaagaaggcggacgagacccaggcccugccccagcggcagaagaagcagcagaccgucacgcugcuccccgccgccgaccuggacgacuucagcaagcagcugcagcaguccaugagcuccgcggacagcacccaggccugaggacuaguuauaagacugacuagcccgaugggccucccaacgggcccuccuccccuccuugcaccgagauuaauaaaaaaaaaaaaaaaaaaaaaaaaaaaaaaaaaaaaaaaaaaaaaaaaaaaaaaaaaaaaaaaaugcaucccccccccccccccccccccccccccccccaaaggcucuuuucagagccaccagaauu

SEQ ID NO: 21275 - RNA, 1477 nt, Artificial Sequence
  SARS-CoV-2__MT451476.1__nucleocapsid protein (N) mRNA gc
aggagaaagcuuaccaugagcgacaacggcccccagaaccagcgcaacgccccgcggaucaccuucgggggccccuccgacagcaccggguccaaccagaacggcgagcgcagcggggcccgguccaagcagcgccggccccagggccugcccaacaacacggcgagcugguucaccgcccucacccagcacggcaaggaggaccugaaguucccgcgcgggcagggcgugcccaucaacaccaacuccagccccgacgaccagaucggguacuaccggcgcgccacgcggcgcauccggggcggggacggcaagaugaaggaccugagcccccgcugguacuucuacuaccucggcaccgggccggaggccggccugcccuacggggccaacaaggacggcaucaucugggucgcgaccgagggcgcccugaacacccccaaggaccacaucgggacgcggaaccccgccaacaacgccgcgaucgugcuccagcugccgcagggcaccacccugcccaagggguucuacgccgagggcucccgcgggggcucccaggccagcucccggagcuccagccgcucccggaacagcucccgcaacagcacccccggcagcucccgggggacgagccccgcccgcauggccggcaacgggggcgacgcggcccucgcccugcugcuccuggaccggcuguaccagcucgaguccaagaugagcgggaagggccagcagcagcagggccagaccgugaccaagaaguccgccgccgaggcgagcaagaagccgcgccagaagcgcaccgccacgaaggccuacaacgucacccaggccuucgggcggcgcggccccgagcagacccaggggaacuucggcgaccaggagcugauccggcaggggaccgacuacaagcacuggccccagaucgcccaguucgcgcccuccgccagcgccuucuucggcaugucccgcaucggcauggaggugacgccgagcgggaccuggcugaccuacaccggcgccaucaagcucgacgacaaggaccccaacuucaaggaccaggugauccugcugaacaagcacaucgacgccuacaagacguucccgcccaccgagcccaagaaggacaagaagaagaaggcggacgagacccaggcccucccccagcggcagaagaagcagcagaccgucacgcugcugcccgccgccgaccucgacgacuucuccaagcagcugcagcagagcauguccagcgcggacuccacccaggccugaggacuaguuauaagacugacuagcccgaugggccucccaacgggcccuccuccccuccuugcaccgagauuaauaaaaaaaaaaaaaaaaaaaaaaaaaaaaaaaaaaaaaaaaaaaaaaaaaaaaaaaaaaaaaaaaugcaucccccccccccccccccccccccccccccccaaaggcucuuuucagagccaccagaauu

SEQ ID NO: 21276 - RNA, 1477 nt, Artificial Sequence
  SARS-CoV-2__MT444626.1__nucleocapsid protein (N) mRNA gc
aggagaaagcuuaccaugagcgacaacggcccccagaaccagcgcaacgccccgcggaucaccuucgggggccccuccgacagcaccggguccaaccagaacggcgagcgcagccuggcccgguccaagcagcgccggccccaggggcuccccaacaacacggcgagcugguucaccgcccugacccagcacggcaaggaggaccugaaguucccgcgcggccagggggugcccaucaacaccaacuccagccccgacgaccagaucggcuacuaccggcgcgccacgcggcgcauccgcgggggcgacgggaagaugaaggaccucagcccccggugguacuucuacuaccugggcaccggcccggaggccgggcugcccuacggcgccaacaaggacgggaucaucugggucgcgaccgagggcgcccucaacacccccaaggaccacaucggcacgcggaaccccgccaacaacgccgcgaucgugcugcagcugccgcaggggaccacccuccccaagggcuucuacgccgaggggucccgcggcgggucccaggccagcucccggagcuccagccgcucccggaacagcucccgcaacagcacccccggcagcucccggggcacgagccccgcccgcauggccgggaacggcggggacgcggcccuggcccugcuccugcuggaccggcucaaccagcuggaguccaagaugagcggcaaggggcagcagcagcagggccagaccgugaccaagaaguccgccgccgaggcgagcaagaagccgcgccagaagcgcaccgccacgaaggccuacaacgucacccaggccuucggccggcgcgggcccgagcagacccagggcaacuucggggaccaggagcugauccggcagggcaccgacuacaagcacuggccccagaucgcccaguucgcgcccuccgccagcgccuucuucgggaugucccgcaucggcauggaggugacgccgagcggcaccuggcucaccuacaccggggccaucaagcuggacgacaaggaccccaacuucaaggaccaggugauccugcucaacaagcacaucgacgccuacaagacguucccgcccaccgagcccaagaaggacaagaagaagaaggcggacgagacccaggcccugccccagcggcagaagaagcagcagaccgucacgcugcuccccgccgccgaccuggacgacuucuccaagcagcugcagcagagcauguccagcgcggacuccacccaggccugaggacuaguuauaagacugacuagcccgaugggccucccaacgggcccuccuccccuccuugcaccgagauuaauaaaaaaaaaaaaaaaaaaaaaaaaaaaaaaaaaaaaaaaaaaaaaaaaaaaaaaaaaaaaaaaaugcaucccccccccccccccccccccccccccccccaaaggcucuuuucagagccaccagaauu

SEQ ID NO: 21277 - RNA, 1477 nt, Artificial Sequence
  SARS-CoV-2__MT447172.1__nucleocapsid protein (N) mRNA gc
aggagaaagcuuaccaugagcgacaacggcccccagaaccagcgcaacgccccgcggaucaccuucgggggccccuccgacagcaccggguccaaccagaacggcgagcgcagcggggcccgguccaagcagcgccggccccagggccugcccaacaacacggcgagcugguucaccgcccucacccagcacggcaaggaggaccugaaguucccgcgcgggcagggcgugcccaucaacaccaacuccagccccgacgaccagaucggguacuaccggcgcgccacgcggcgcauccggggcggggacggcaagaugaaggaccugagcccccgcugguacuucuacuaccucggcaccgggccggaggucggccugcccuacggggccaacaaggacggcaucaucuggguggccaccgagggcgcgcugaacacccccaaggaccacaucgggacgcggaaccccgccaacaacgccgccaucgugcuccagcugccgcagggcaccacccugcccaagggguucuacgcggagggcucccgcgggggcucccaggccagcucccggagcuccagccgcucccggaacagcucccgcaacagcacccccggcagcucccgggggacgagccccgcccgcauggccggcaacgggggcgacgccgcgcucgcccugcugcuccuggaccggcugaaccagcucgaguccaagaugagcgggaagggccagcagcagcagggccagaccgucaccaagaaguccgccgccgaggccagcaagaagccgcgccagaagcgcaccgcgacgaaggccuacaacgugacccaggccuucgggcggcgcggccccgagcagacccaggggaacuucggcgaccaggagcugauccggcaggggaccgacuacaagcacuggccccagaucgcccaguucgcccccuccgcgagcgccuucuucggcaugucccgcaucggcauggaggugacgccgcuggggaccuggcucaccuacaccggcgccaucaagcuggacgacaaggaccccaacuucaaggaccaggucauccugcucaacaagcacaucgacgccuacaagacguucccgcccaccgagcccaagaaggacaagaagaagaaggccgacgagacccaggcgcugccccagcggcagaagaagcagcagaccgugacgcugcuccccgccgccgaccuggacgacuucagcaagcagcugcagcaguccaugagcuccgccgacagcacccaggcgugaggacuaguuauaagacugacuagcccgaugggccucccaacgggcccuccuccccuccuugcaccgagauuaauaaaaaaaaaaaaaaaaaaaaaaaaaaaaaaaaaaaaaaaaaaaaaaaaaaaaaaaaaaaaaaaaugcaucccccccccccccccccccccccccccccccaaaggcucuuuucagagccaccagaauu

SEQ ID NO: 21278 - RNA, 1468 nt, Artificial Sequence
  SARS-CoV-2__MT434815.1__nucleocapsid protein (N) mRNA gc
aggagaaagcuuaccaugagcgacaacggcccccagaaccagcgcaacgccccgcggaucaccuucgggggccccuccgacagcaccggguccaaccagaacggcgagcgcagcggggcccgguccaagcagcgccggccccagggccugcccaacaacacggcgagcugguucaccgcccucacccagcacggcaaggaggaccugaaguucccgcgcgggcagggcgugcccaucaacaccaacuccagccccgacgaccagaucggguacuaccggcgcgccacgcggcgcauccggggcggggacggcaagaugaaggaccugagcccccgcugguacuucuacuaccucggcaccgggccggaggccggccugcccuacggggccaacaaggacggcaucaucugggucgcgaccgagggcgcccugaacacccccaaggaccacaucgggacgcggaaccccgccaacaacgccgcgaucgugcuccagcugccgcagggcaccacccugcccaagggguucuacgccgagggcucccgcgggggcucccaggccagcucccggagcuccagccgcucccggaacagcucccgcaacagcacccccggcagcucccgggggacgagccccgcccgcauggccggcaacgggggcgacgcggcccucgcccugcugcuccuggaccggcugaaccagcucgaguccaagaugagcgggaagggccagcagcagcagggccagaccgugaccaagaaguccgccgccgaggcgagcaagaagccgcgccagaagcgcaccgccacgaaggccuacaacgucacccaggccuucgggcggcgcggccccgagcagacccaggggaacuucggcgaccaggagcugauccggcaggggaccgacuacaagcacuggccccagaucgcccaguucgcgcccuccgccagcgccuucuucggcaugucccgcaucggcauggaggugacgccgagcgggaccuggcugaccuacaccggcgccaucaagcucgacgacaaggaccccaacuucaaggaccaggugauccugcugaacaagcacaucgacgccuacaagacguucccgcccaccgagcccaagaaggacaagaagaagaaggcggacgagacccaggcccucccccagcggcagaagaagcagacccugcugcccgccgccgaccucgacgacuucuccaagcagcugcagcagagcauguccagcgcggacuccacgcaggccugaggacuaguuauaagacugacuagcccgaugggccucccaacgggcccuccuccccuccuugcaccgagauuaauaaaaaaaaaaaaaaaaaaaaaaaaaaaaaaaaaaaaaaaaaaaaaaaaaaaaaaaaaaaaaaaaugcaucccccccccccccccccccccccccccccccaaaggcucuuuucagagccaccagaauu

SEQ ID NO: 21279 - RNA, 1477 nt, Artificial Sequence
  SARS-CoV-2__MT412280.1__nucleocapsid protein (N) mRNA gc
aggagaaagcuuaccaugagcgacaacggcccccagaaccagcgcaacgccccgcggaucaccuucgggggccccuccgacagcaccggguccaaccagaacggcgagcgcagcggggcccgguccaagcagcgccggccccagggccugcccaacaacacggcgagcugguucaccgcccucacccagcacggcaaggaggaccugaaguucccgcgcgggcagggcgugcccaucaacaccaacuccagccccgacgaccagaucggguacuaccggcgcgccacgcggcgcauccggggcggggacggcaagaugaaggaccugagcccccgcugguacuucuacuaccucggcaccgggccggaggccggccugcccuacggggccaacaaggacggcaucaucugggucgcgaccgagggcgcccugaacacccccaaggaccacaucgggacgcggaaccccgccaacaacgccgcgaucgugcuccagcugccgcagggcaccacccugcccaagggguucuacgccgagggcucccgcgggggcucccaggccagcucccggagcuccagccgcucccggaacagcucccgcaacagcacccccggcagcucccgggggacgagccccgcccgcauggccggcaacgggggcgacgcggcccucgcccugcugcuccuggaccggcugaaccagcucgaguccaagaugagcgggaagggccagcagcagcagggccagaccgugaccaagaaguccgccgccgaggcgagcaagaagccgcgccagaagcgcaccgccacgaaggccuacaacgucacccaggccuucgggcggcgcggccccgagcagacccaggggaacuucggcgaccaggagcugauccggcuggggaccgacuacaagcacuggccccagaucgcccaguucgcgcccuccgccagcgccuucuucggcaugucccgcaucggcauggaggugacgccgagcgggaccuggcucaccuacaccggcgccaucaagcuggacgacaaggaccccaacuucaaggaccaggugauccugcucaacaagcacaucgacgccuacaagacguucccgcccaccgagcccaagaaggacaagaagaagaaggcggacgagacccaggcccugccccagcggcagaagaagcagcagaccgucacgcugcuccccgccgccgaccuggacgacuucuccaagcagcugcagcagagcauguccagcgcggacuccacccaggccugaggacuaguuauaagacugacuagcccgaugggccucccaacgggcccuccuccccuccuugcaccgagauuaauaaaaaaaaaaaaaaaaaaaaaaaaaaaaaaaaaaaaaaaaaaaaaaaaaaaaaaaaaaaaaaaaugcaucccccccccccccccccccccccccccccccaaaggcucuuuucagagccaccagaauu

SEQ ID NO: 21280 - RNA, 1477 nt, Artificial Sequence
  SARS-CoV-2__MT412284.1__nucleocapsid protein (N) mRNA gc
aggagaaagcuuaccaugagcgacaacggcccccagaaccagcgcaacgccccgcggaucaccuucgggggccccuccgacagcaccggguccaaccagaacggcgagcgcagcggggcccgguccaagcagcgccggccccagggccugcccaacaacacggcgagcugguucaccgcccucacccagcacggcaaggaggaccugaaguucccgcgcgggcagggcgugcccaucaacaccaacuccagccccgacgaccagaucggguacuaccggcgcgccacgcggcgcauccggggcggggacggcaagaugaaggaccugagcccccgcugguacuucuacuaccucggcaccgggccggaggccggccugcccuacggggccaacaaggacggcaucaucugggucgcgaccgagggcgcccugaacacccccaaggaccacaucgggacgcggaaccccgccaacaacgccgcgaucgugcuccagcugccgcagggcaccacccugcccaagggguucuacgccgagggcucccgcgggggcucccaggccagcucccggagcuccagccgcucccggaacagcucccgcaacagcacccccggcagcucccgggggacgagccccgcccgcauggccggcaacgggggcgacgcggcccucgcccugcugcuccuggaccggcugaaccagcucgaguccaagaugagcgggaagggccagcagcagcagggccagaccgugaccaagaaguccgccgccgaggcgagcaagaagccgcgccagaagcgcaccgccacgaaggccuacaacgucacccaggccuucgggcggcgcggccccgagcagacccaggggaacuucggcgaccaggagcugauccggcaggggaccgacuacaagcacuggccccagaucgcccaguucgcgcuguccgccagcgccuucuucggcaugucccgcaucggcauggaggugacgcccagcgggaccuggcucaccuacaccggcgccaucaagcuggacgacaaggacccgaacuucaaggaccaggugauccugcucaacaagcacaucgacgccuacaagacguucccgcccaccgagcccaagaaggacaagaagaagaaggcggacgagacccaggcccugccccagcggcagaagaagcagcagaccgucacgcugcuccccgccgccgaccuggacgacuucuccaagcagcugcagcagagcauguccagcgcggacuccacccaggccugaggacuaguuauaagacugacuagcccgaugggccucccaacgggcccuccuccccuccuugcaccgagauuaauaaaaaaaaaaaaaaaaaaaaaaaaaaaaaaaaaaaaaaaaaaaaaaaaaaaaaaaaaaaaaaaaugcaucccccccccccccccccccccccccccccccaaaggcucuuuucagagccaccagaauu

SEQ ID NO: 21281 - RNA, 1477 nt, Artificial Sequence
  SARS-CoV-2__MT412294.1__nucleocapsid protein (N) mRNA gc
aggagaaagcuuaccaugagcgacaacggcccccagaaccagcgcaacgccccgcggaucaccuucgggggccccuccgacagcaccggguccaaccagaacggcgagcgcagcggggcccgguccaagcagcgccggccccagggccugcccaacaacacggcgagcugguucaccgcccucacccagcacggcaaggaggaccugaaguucccgcgcgggcagggcgugcccaucaacaccaacuccagccccgacgaccagaucggguacuaccggcgcgccacgcggcgcauccggggcggggacggcaagaugaaggaccugagcccccgcugguacuucuacuaccucggcaccgggccggaggccggccugcccuacggggccaacaaggacggcaucaucugggucgcgaccgagggcgcccugaacacccccaaggaccacaucgggacgcggaaccccgccaacaacgccgcgaucgugcuccagcugccgcagggcaccacccugcccaagggguucuacgccgagggcucccgcgggggcucccaggccagcucccggagcuccagccgcucccggaacagcucccgcaacagcacccccggcagcucccgggggacgagccccgccaccauggccggcaacgggggcgacgcggcccucgcccugcugcuccuggaccgccugaaccagcucgaguccaagaugagcgggaagugccagcagcagcagggccagaccgugaccaagaaguccgccgccgaggcgagcaagaagccgcggcagaagcgcacggccaccaaggccuacaacgucacccaggccuucggccgccgggggcccgagcagacccagggcaacuucggggaccaggagcugauccgccagggcacggacuacaagcacuggccccagaucgcccaguucgcgcccuccgccagcgccuucuucgggaugucccggaucggcauggaggugaccccgagcggcaccuggcugaccuacacgggggccaucaagcucgacgacaaggaccccaacuucaaggaccaggugauccugcugaacaagcacaucgacgccuacaagaccuucccgcccaccgagcccaagaaggacaagaagaagaaggcggacgagacccaggcccucccccagcgccagaagaagcagcagacggucacccugcugcccgccgccgaccucgacgacuucuccaagcagcugcagcagagcauguccagcgcggacuccacccaggccugaggacuaguuauaagacugacuagcccgaugggccucccaacgggcccuccuccccuccuugcaccgagauuaauaaaaaaaaaaaaaaaaaaaaaaaaaaaaaaaaaaaaaaaaaaaaaaaaaaaaaaaaaaaaaaaaugcaucccccccccccccccccccccccccccccccaaaggcucuuuucagagccaccagaauu

SEQ ID NO: 21282 - RNA, 1477 nt, Artificial Sequence
  SARS-CoV-2__MT415320.1__nucleocapsid protein (N) mRNA gc
aggagaaagcuuaccaugagcgacaacggcccccagaaccagcgcaacgccccgcggaucaccuucgggggccccuccgacagcaccggguccaaccagaacggcgagcgcagcggggcccgguccaagcagcgccggccccagggccugcccaacaacacggcgagcugguucaccgcccucacccagcacggcaaggaggaccugaaguucccgcgcgggcagggcgugcccaucaacaccaacuccagccccgacgaccagaucggguacuaccggcgcgccacgcggcgcauccggggcggggacggcaagaugaaggaccugagcccccgcugguacuucuacuaccucggcaccgggccggaggccggccugcccuacggggccaacaaggacggcaucaucugggucgcgaccgagggcgcccugaacacccccaaggaccacaucgggacgcggaaccccgccaacaacgccgcgaucgugcuccagcugccgcagggcaccacccugcccaagggguucuacgccgagggcucccgcgggggcucccaggccagcucccggagcuccagccgcucccggaacagcucccgcaacagcacccccggcagcucccgggggacgagccccgcccgcauggccggcaacgggggcgacgcggcccucgcccugcugcuccuggaccggcugaaccagcucgaguccaagaugagcgggaagggccagcagcagcagggccagaccgugaccaagaaguccgccgccgaggcgagcaagaagccgcgccagaagcgcaccgccacgaaggccuacaacgucacccaggccuucgggcggcgcggccccgagcagacccaggggaacuucggcgaccaggagcugauccggcaggggaccgacuacaagcacuggccccagaucgcccaguucgcgcccuccgccagcgccuucuucggcaugucccgcaucggcauggaggugacgccgagcgggaccuggcugaccuacaccggcgccaucaagcucgacgacaaggacuccaacuucaaggaccaggugauccugcugaacaagcacaucgacgccuacaagacguucccgcccaccgagcccaagaaggacaagaagaagaaggcggacgagacccaggcccucccccagcggcagaagaagcagcagaccgucacgcugcugcccgccgccgaccucgacgacuucagcaagcagcugcagcaguccaugagcuccgcggacagcacccaggccugaggacuaguuauaagacugacuagcccgaugggccucccaacgggcccuccuccccuccuugcaccgagauuaauaaaaaaaaaaaaaaaaaaaaaaaaaaaaaaaaaaaaaaaaaaaaaaaaaaaaaaaaaaaaaaaaugcaucccccccccccccccccccccccccccccccaaaggcucuuuucagagccaccagaauu

SEQ ID NO: 21283 - RNA, 1477 nt, Artificial Sequence
  SARS-CoV-2__MT385444.1__nucleocapsid protein (N) mRNA gc
aggagaaagcuuaccaugagcgacaacggcccccagaaccagcgcaacgccccgcggaucaccuucgggggccccuccgacagcaccggguccaaccagaacggcgagcgcagcggggcccgguccaagcagcugcgcccccagggccuccccaacaacacggcgagcugguucaccgcccugacccagcacggcaaggaggaccugaaguucccgcgggggcagggcgugcccaucaacaccaacuccagccccgacgaccagaucggguacuaccgccgggccacgcgccggauccgcggcggggacggcaagaugaaggaccucagcccccggugguacuucuacuaccugggcaccgggccggaggccggccugcccuacggggccaacaaggacggcaucaucugggucgcgaccgagggcgcccucaacacccccaaggaccacaucgggacgcgcaaccccgccaacaacgccgcgaucgugcugcagcugccgcagggcaccacccuccccaagggguucuacgccgagggcucccgcgggggcucccaggccagcucccggagcuccagccggucccgcaacagcucccggaacagcacccccggcagcucccgcgggacgagccccgcccggauggccggcaacgggggcgacgcggcccuggcccugcuccugcuggaccgccucaaccagcuggaguccaagaugagcgggaagggccagcagcagcagggccagaccgugaccaagaaguccgccgccgaggcgagcaagaagccgcggcagaagcgcaccgccacgaaggccuacaacgucacccaggccuucgggcgccggggccccgagcagacccaggggaacuucggcgaccaggagcugauccgccaggggaccgacuacaagcacuggccccagaucgcccaguucgcgcccuccgccagcgccuucuucggcaugucccggaucggcauggaggugacgccgagcgggaccuggcucaccuacaccggcgccaucaagcuggacgacaaggaccccaacuucaaggaccaggugauccugcucaacaagcacaucgacgccuacaagacguucccgcccaccgagcccaagaaggacaagaagaagaaggcggacgagacccaggcccugccccagcgccagaagaagcagcagaccgucacgcugcuccccgccgccgaccuggacgacuucuccaagcagcugcagcagagcauguccagcgcggacuccacccaggccugaggacuaguuauaagacugacuagcccgaugggccucccaacgggcccuccuccccuccuugcaccgagauuaauaaaaaaaaaaaaaaaaaaaaaaaaaaaaaaaaaaaaaaaaaaaaaaaaaaaaaaaaaaaaaaaaugcaucccccccccccccccccccccccccccccccaaaggcucuuuucagagccaccagaauu

SEQ ID NO: 21284 - RNA, 1477 nt, Artificial Sequence
  SARS-CoV-2__MT375432.1__nucleocapsid protein (N) mRNA gc
aggagaaagcuuaccaugagcgacaacggcccccagaaccagcgcaacgccccgcggaucaccuucgggggccccuccgacagcaccggguccaaccagaacggcgagcgcagcggggcccgguccaagcagcgccggccccagggccugcccaacaacacggcgagcugguucaccgcccucacccagcacggcaaggaggaccugaaguucccgcgcgggcagggcgugcccaucaacaccaacuccagccccgacgaccagaucggguacuaccggcgcuccacgcggcgcauccggggcggggacggcaagaugaaggaccugagcccccgcugguacuucuacuaccucggcaccgggccggaggccggccugcccuacggggccaacaaggacggcaucaucugggucgccaccgagggcgcgcugaacacccccaaggaccacaucgggacgcggaaccccgccaacaacgccgccaucgugcuccagcugccgcagggcaccacccugcccaagggguucuacgcggagggcucccgcgggggcagccaggccuccagccgguccagcucccgcagccggaacuccagccgcaacagcacccccggcuccagccgggggacgucccccgcccgcauggccggcaacgggggcgacgccgcgcucgcccugcugcuccuggaccggcugaaccagcucgagagcaagauguccgggaagggccagcagcagcagggccagaccgugaccaagaaguccgccgccgaggccagcaagaagccgcgccagaagcgcaccgcgacgaaggccuacaacgucacccaggccuucgggcggcgcggccccgagcagacccaggggaacuucggcgaccaggagcugauccggcaggggaccgacuacaagcacuggccccagaucgcccaguucgcccccagcgcguccgccuucuucggcaugagccgcaucggcauggaggugacgccguccgggaccuggcugaccuacaccggcgccaucaagcucgacgacaaggaccccaacuucaaggaccaggugauccugcugaacaagcacaucgacgccuacaagacguucccgcccaccgagcccaagaaggacaagaagaagaaggccgacgagacccaggcgcucccccagcggcagaagaagcagcagaccgucacgcugcugcccgccgccgaccucgacgacuucagcaagcagcugcagcaguccaugagcuccgccgacagcacccaggcgugaggacuaguuauaagacugacuagcccgaugggccucccaacgggcccuccuccccuccuugcaccgagauuaauaaaaaaaaaaaaaaaaaaaaaaaaaaaaaaaaaaaaaaaaaaaaaaaaaaaaaaaaaaaaaaaaugcaucccccccccccccccccccccccccccccccaaaggcucuuuucagagccaccagaauu

SEQ ID NO: 21285 - RNA, 1477 nt, Artificial Sequence
  SARS-CoV-2__MT374106.1__nucleocapsid protein (N) mRNA gc
aggagaaagcuuaccaugagcgacaacggcccccagaaccagcgcaacgccccgcggaucaccuucgggggccccuccgacagcaccggguccaaccagaacggcgagcgcagcggggcccgguccaagcagcgccggccccagggccugcccaacaacacggcgagcugguucaccgcccucacccagcacggcaaggaggaccugaaguucccgcgcgggcagggcgugcccaucaacaccaacuccagccccgacgaccagaucggguacuaccggcgcgccacgcggcgcauccggggcggggacggcaagaugaaggaccugagcccccgcugguacuucuacuaccucggcaccgggccggaggccggccugcccuacggggccaacaaggacggcaucaucugggucgcgaccgagggcgcccugaacacccccaaggaccacaucgggacgcggaaccccgccaacaacgccgcgaucgugcuccagcugccgcagggcaccacccugcccaagggguucuacgccgagggcagccgcgggggcucccaggccagcucccggagcagcccccgcucccggaacuccagccgcaacuccacccccggcagcagccgggggacguccccggcccgcauggccggcaacgggggcgacgcggcccucgcccugcugcuccuggaccggcugaaccagcucgagagcaagauguccgggaagggccagcagcagcagggccagaccgugaccaagaaguccgccgccgaggcguccaagaagccccgccagaagcgcaccgccacgaaggccuacaacgucacccaggccuucgggcggcgcggccccgagcagacccaggggaacuucggcgaccaggagcugauccggcaggggaccgacuacaagcacuggccccagaucgcccaguucgcgccgagcgccuccgccuucuucggcaugagccgcaucggcauggaggugacgcccuccgggaccuggcugaccuacaccggcgccaucaagcucgacgacaaggaccccaacuucaaggaccaggugauccugcugaacaagcacaucgacgccuacaagacguucccgcccaccgagcccaagaaggacaagaagaagaaggcggacgagacccaggcccucccccagcggcagaagaagcagcagaccgucacgcugcugcccgccgccgaccucgacgacuucagcaagcagcugcagcaguccaugagcuccgcggacagcacccaggccugaggacuaguuauaagacugacuagcccgaugggccucccaacgggcccuccuccccuccuugcaccgagauuaauaaaaaaaaaaaaaaaaaaaaaaaaaaaaaaaaaaaaaaaaaaaaaaaaaaaaaaaaaaaaaaaaugcaucccccccccccccccccccccccccccccccaaaggcucuuuucagagccaccagaauu

SEQ ID NO: 21286 - RNA, 1477 nt, Artificial Sequence
  SARS-CoV-2__MT252737.1__nucleocapsid protein (N) mRNA gc
aggagaaagcuuaccaugagcgacaacggcccccagaaccagcgcaacgccccgcggaucaccuucgggggccccuccgacagcaccggguccaaccagaacggcgagcgcagcggggcccgguccaagcagcgccggccccagggccugcccaacaacacggcgagcugguucaccgcccucacccagcacggcaaggaggaccugaaguucccgcgcgggcagggcgugcccaucaacaccaacuccagccccgacgaccagaucggguacuaccggcgcgccacgcggcgcauccggggcggggacggcaagaugaaggaccugagcccccgcugguacuucuacuaccucggcaccgggccggaggccggccugcccuacggggccaacaaggacggcaucaucugggucgcgaccgagggcgcccugaacacccccaaggaccacaucgggacgcggaaccccgccaacaacgccgcgaucgugcuccagcugccgcagggcaccacccugcccaagggguucuacgccgagggcucccgcgggggcucccaggccagcucccggagcuccagccgcucccggaacagcucccgcaacagcacccccggcagcucccgggggacgagccccgcccgcauggccggcaacgggggcgacgcggcccucgcccugcugcuccuggaccggcugaaccagcucgaguccaagaugagcgggaagggccagcagcagcagggccagaccgugaccaagaaguccgccgccgaggcgagcaagaagccgcgccagaagcgcaccgccacgaaggccuacaacgucacccaggccuucgggcggcgcggccccgagcagacccaggggaacuucggcgaccaggagcugauccggcaggggaccgacuacaagcacuggccccagaucgcccaguucgcgcccuccgccagcgccuucuucggcaugucccgcaucggcauggaggugacgccgagcgggaccuggcugaccuacaccggcgccaucaagcucgacgacaaggaccccaacuucaaggaccaggugauccugcugaacaagcacaucgacgccuacaagacguucccgcccaccgagcccaagaaggacaagaagaagaaggcggacgagacccaggcccucccccagcggcagaagaagcagcagaucgucacccugcugcccgccgccgaccucgacgacuucuccaagcagcugcagcagagcauguccagcgcggacuccacgcaggccugaggacuaguuauaagacugacuagcccgaugggccucccaacgggcccuccuccccuccuugcaccgagauuaauaaaaaaaaaaaaaaaaaaaaaaaaaaaaaaaaaaaaaaaaaaaaaaaaaaaaaaaaaaaaaaaaugcaucccccccccccccccccccccccccccccccaaaggcucuuuucagagccaccagaauu

SEQ ID NO: 21287 - RNA, 1477 nt, Artificial Sequence
  SARS-CoV-2__MT371047.1__nucleocapsid protein (N) mRNA gc
aggagaaagcuuaccaugagcgacaacggcccccagaaccagcgcaacgccccgcggaucaccuucgggggccccuccgacagcaccggguccaaccagaacggcgagcgcagcggggcccgguccaagcagcgccggccccagggccugcccaacaacacggcgagcugguucaccgcccucacccagcacggcaaggaggaccugaaguucccgcgcgggcagggcgugcccaucaacaccaacuccagccccgacgaccagaucggguacuaccggcgcgccacgcggcgcauccggggcggggacggcaagaugaaggaccugagcccccgcugguacuucuacuaccucggcaccgggccggaggccggccugcccuacggggccaacaaggacggcaucaucugggucgcgaccgagggcgcccugaacacccccaaggaccacaucgggacgcggaaccccgccaacaacgccgcgaucgugcuccagcugccgcagggcaccacccugcccaagggguucuacgccgagggcucccgcgggggcucccaggccagcucccggagcuccagccgcucccggaacagcucccgcaacagcacccccggcagcucccgggggacgagccccgcccgcauggccggcaacgggggcgacgcggcccucgcccugcugcuccuggaccggcugaaccagcucgaguccaagaugagcgggaagggccagcagcagcagggccagaccgugaccaagaaguccgccgccgaggcgagcaagaagccgcgccagaagcgcaccgccacgaaggccuacaacgucacccaggccuucgggcggcgcggccccgagcagacccaggggaacuucggcgaccaggagcugauccggcaggggaccgacuacaagcacuggccccagaucgcccaguucgcgcccuccgccagcgccuucuucggcaugucccgcaucggcauggaggugacgccgagcgggaccuggcugaccuacaccggcgccaucaagcucgacgacaaggaccccaacuucaaggaccaggugauccugcugaacaagcacaucgacgccuacaagacguucccgcccaccgagcccaagaaggacaagaagaagaaggcggacgagacccaggcccucccccagcggcagaagaagcagcagaccgucacgcugcugcccgccuccgaccucgacgacuucagcaagcagcugcagcaguccaugagcuccgccgacagcacccaggcgugaggacuaguuauaagacugacuagcccgaugggccucccaacgggcccuccuccccuccuugcaccgagauuaauaaaaaaaaaaaaaaaaaaaaaaaaaaaaaaaaaaaaaaaaaaaaaaaaaaaaaaaaaaaaaaaaugcaucccccccccccccccccccccccccccccccaaaggcucuuuucagagccaccagaauu

SEQ ID NO: 21288 - RNA, 1477 nt, Artificial Sequence
  SARS-CoV-2__MT370850.1__nucleocapsid protein (N) mRNA gc
aggagaaagcuuaccaugagcgacaacggcccccagaaccagcgcaacgccccgcggaucaccuucgggggccccuccgacagcaccggguccaaccagaacggcgagcgcagcggggcccgguccaagcagcgccggccccagggccugcccaacaacacggcgagcugguucaccgcccucacccagcacggcaaggaggaccugaaguucucccgcgggcagggcgugccgaucaacaccaacagcucccccgacgaccagaucggguacuaccggcgcgccacgcggcgcauccggggcggggacggcaagaugaaggaccugagcccccgcugguacuucuacuaccucggcaccgggcccgaggccggccugccguacggggccaacaaggacggcaucaucugggucgcgaccgagggcgcccugaacacccccaaggaccacaucgggacgcggaaccccgccaacaacgccgcgaucgugcuccagcugccccagggcaccacccugccgaagggguucuacgccgagggcucccgcgggggcagccaggccuccagccgguccagcucccgcagccggaacuccagccgcaacagcacccccggcuccagccgggggacgucccccgcccgcauggccggcaacgggggcgacgcggcccucgcccugcugcuccuggaccggcugaaccagcucgagagcaagauguccgggaagggccagcagcagcagggccagaccgugaccaagaaguccgccgccgaggcgagcaagaagccccgccagaagcgcaccgccacgaaggccuacaacgucacccaggccuucgggcggcgcggcccggagcagacccaggggaacuucggcgaccaggagcugauccggcaggggaccgacuacaagcacuggccccagaucgcccaguucgcgcccagcgccuccgccuucuucggcaugagccgcaucggcauggaggugacgcccuccgggaccuggcugaccuacaccggcgccaucaagcucgacgacaaggacccgaacuucaaggaccaggugauccugcugaacaagcacaucgacgccuacaagacguucccgcccaccgagcccaagaaggacaagaagaagaaggcggacgagacccaggcccucccccagcggcagaagaagcagcagaccgucacgcugcugcccgccgccgaccucgacgacuucagcaagcagcugcagcaguccaugagcuccgcggacagcacccaggccugaggacuaguuauaagacugacuagcccgaugggccucccaacgggcccuccuccccuccuugcaccgagauuaauaaaaaaaaaaaaaaaaaaaaaaaaaaaaaaaaaaaaaaaaaaaaaaaaaaaaaaaaaaaaaaaaugcaucccccccccccccccccccccccccccccccaaaggcucuuuucagagccaccagaauu

SEQ ID NO: 21289 - RNA, 1477 nt, Artificial Sequence
  SARS-CoV-2__MT370876.1__nucleocapsid protein (N) mRNA gc
aggagaaagcuuaccaugagcgacaacggcccccagaaccagcgcaacgccccgcggaucaccuucgggggccccuccgacagcaccggguccaaccagaacggcgagcgcagcggggcccgguccaagcagcgccggccccagggccugcccaacaacacggcgagcugguucaccgcccucacccagcacggcaaggaggaccugaaguucccgcgcgggcagggcgugcccaucaacaccaacuccagccccgacgaccagaucggguacuaccggcgcgccacgcggcgcauccggggcggggacggcaagaugaaggaccugagcccccgcugguacuucuacuaccucggcaccgggccggaggccggccugcccuacggggccaacaaggacggcaucaucugggucgcgaccgagggcgcccugaacacccccaaggaccacaucgggacgcggaaccccgccaacaacgccgcgaucgugcuccagcugccgcagggcaccacccugcccaagggguucuacgccgagggcucccgcgggggcucccaggccagcucccggagcuccagccgcucccggaacagcucccgcaacagcacccccggcagcucccgggggacgagccccgcccgcauggccggcaacgggggcgacgcggcccucgcccugcugcuccuggaccggcugaaccagcucgaguccaagaugagcgggaagggccagcagcagcagggccagaccgugaccaagaaguccgccgccgaggcgagcaagaagccgcgccagaagcgcaccgccacgaaggccuacaacgucacccaggccuucgggcggcgcggccccgagcagacccaggggaacuucggcgaccaggagcugauccggcaggggaccgacuacaagcacuggccccagaucgcccaguucgcgcccuccgccagcgccuucuucggcaugucccgcaucggcauggaggugacgccgagcgggaccuggcugaccuacaucggcgccaucaagcucgacgacaaggaccccaacuucaaggaccaggugauccugcugaacaagcacaucgacgccuacaagaccuucccgcccacggagcccaagaaggacaagaagaagaaggcggacgagacccaggcccucccccagcggcagaagaagcagcagaccgucacccugcugcccgccgccgaccucgacgacuucuccaagcagcugcagcagagcauguccagcgcggacuccacgcaggccugaggacuaguuauaagacugacuagcccgaugggccucccaacgggcccuccuccccuccuugcaccgagauuaauaaaaaaaaaaaaaaaaaaaaaaaaaaaaaaaaaaaaaaaaaaaaaaaaaaaaaaaaaaaaaaaaugcaucccccccccccccccccccccccccccccccaaaggcucuuuucagagccaccagaauu

SEQ ID NO: 21290 - RNA, 1477 nt, Artificial Sequence
  SARS-CoV-2__MT370904.1__nucleocapsid protein (N) mRNA gc
aggagaaagcuuaccaugagcgacaacggcccccagaaccagcgcaacgccccgcggaucaccuucgggggccccuccgacagcaccggguccaaccagaacggcgagcgcagcggggcccgguccaagcagcgccggccccagggccugcccaacaacacggcgagcugguucaccgcccucacccagcacggcaaggaggaccugaaguucccgcgcgggcagggcgugcccaucaacaccaacuccagccccgacgaccagaucggguacuaccggcgcgccacgcggcgcauccggggcggggacggcaagaugaaggaccugagcccccgcugguacuucuacuaccucggcaccgggccggaggccggccugcccuacggggccaacaaggacggcaucaucugggucgcgaccgagggcgcccugaacacccccaaggaccacaucgggacgcggaaccccgccaacaacgccgcgaucgugcuccagcugccgcagggcaccacccugcccaagggguucuacgccgagggcucccgcgggggcucccaggccagcucccggagcuccagccgcucccggaacagcucccgcaacagcacccccggcagcucccgggggacgagccccgcccgcauggccggcaacgggggcgacgcggcccucgcccugcugcuccuggaccggcugaaccagcucgaguccaagaugagcgggaagggccagcagcagcagggccagaccgugaccaagaaguccgccagcgaggccuccaagaagccgcgccagaagcgcaccgcgacgaaggccuacaacgucacccaggccuucgggcggcgcggccccgagcagacccaggggaacuucggcgaccaggagcugauccggcaggggaccgacuacaagcacuggccccagaucgcccaguucgcccccagcgcguccgccuucuucggcaugagccgcaucggcauggaggugacgccguccgggaccuggcugaccuacaccggcgccaucaagcucgacgacaaggaccccaacuucaaggaccaggugauccugcugaacaagcacaucgacgccuacaagacguucccgcccaccgagcccaagaaggacaagaagaagaaggccgacgagacccaggcgcucccccagcggcagaagaagcagcagaccgucacgcugcugcccgccgccgaccucgacgacuucagcaagcagcugcagcaguccaugagcuccgccgacagcacccaggcgugaggacuaguuauaagacugacuagcccgaugggccucccaacgggcccuccuccccuccuugcaccgagauuaauaaaaaaaaaaaaaaaaaaaaaaaaaaaaaaaaaaaaaaaaaaaaaaaaaaaaaaaaaaaaaaaaugcaucccccccccccccccccccccccccccccccaaaggcucuuuucagagccaccagaauu

SEQ ID NO: 21291 - RNA, 1477 nt, Artificial Sequence
  SARS-CoV-2__MT370948.1__nucleocapsid protein (N) mRNA gc
aggagaaagcuuaccaugagcgacaacggcccccagaaccagcgcaacgccccgcggaucaccuucgggggccccuccgacagcaccggguccaaccagaacggcgagcgcagcggggcccgguccaagcagcgccggccccagggccugcccaacaacacggcgagcugguucaccgcccucacccagcacggcaaggaggaccugaaguucccgcgcgggcagggcgugcccaucaacaccaacuccagccccgacgaccagaucggguacuaccggcgcgccacgcggcgcauccggggcggggacggcaagaugaaggaccugagcccccgcugguacuucuacuaccucggcaccgggccggaggccggccugcccuacggggccaacaaggacggcaucaucugggucgcgaccgagggcgcccugaacacccccaaggaccacaucgggacgcggaaccccgccaacaacgccgcgaucgugcuccagcugccgcagggcaccacccugcccaagggguucuacgccgagggcucccgcgggggcucccaggccagcucccggagcuccagccgcucccggaacagcucccgcaacagcacccccggcagcucccgggggacgagccccgcccgcauggccggcaacgggggcgacgcggcccucgcccugcugcuccuggaccggcugaaccagcucgaguccaagaugagcgggaagggccagcagcagcagggccagaccgugaccaagaaguccgccgccgaggcgagcaagaagccgcgccagaagcgcaccgccacgaaggccuacaacgucacccaggccuucgggcggcgcggccccgagcagacccaggggaacuucggcgaccaggagcugauccggcaggggaccgacuacaagcacuggccccagaucgcccaguucgcgcccuccgccagcgccuucuucggcaugucccgcaucggcauggaggugacgccgagcgggaccuggcugaccuacaccggcgccaucaagcucgacgacaaggaccccaacuucaaggaccaggugauccugcugaacaagcacaucgacgccuacaagacguucccgcccaccgagcccaagaaggacaagaagaagaaggcggacgagacccaggcccucccccagcggcagaagaagcagcagaccgucacgcugcugcccgccgccgaccucgacgacuucuccaagcagcugcagcagagcauguccaucgcggacagcacccaggccugaggacuaguuauaagacugacuagcccgaugggccucccaacgggcccuccuccccuccuugcaccgagauuaauaaaaaaaaaaaaaaaaaaaaaaaaaaaaaaaaaaaaaaaaaaaaaaaaaaaaaaaaaaaaaaaaugcaucccccccccccccccccccccccccccccccaaaggcucuuuucagagccaccagaauu

SEQ ID NO: 21292 - RNA, 1477 nt, Artificial Sequence
  SARS-CoV-2__MT370961.1__nucleocapsid protein (N) mRNA gc
aggagaaagcuuaccaugagcgacaacggcccccagaaccagcgcaacgccccgcggaucaccuucgggggccccuccgacagcaccggguccaaccagaacggcgagcgcagcggggcccgguccaagcagcgccggccccagggccugcccaacaacacggcgagcugguucaccgcccucacccagcacggcaaggaggaccugaaguucccgcgcgggcagggcgugcccaucaacaccaacuccagccccgacgaccagaucggguacuaccggcgcgccacgcggcgcauccggggcggggacggcaagaugaaggaccugagcccccgcugguacuucuacuaccucggcaccgggccggaggccggccugcccuacggggccaacaaggacggcaucaucugggucgcgaccgagggcgcccugaacacccccaaggaccacaucgggacgcggaaccccgccaacaacgccgcgaucgugcuccagcugccgcagggcaccacccugcccaagggguucuacgccgagggcagccgcgggggcucccaggccagcucccggagcuccagccgcucccggaacagcucccgcaacagcacccccggcagcucccgggggacgagccccgcccgcauggccggcaacgggggcgacgcggcccucgcccugcugcuccuggaccggcugaaccagcucgagcgcaagauguccgggaagggccagcagcagcagggccagaccgugaccaagaaguccgccgccgaggcguccaagaagccgcgccagaagcggaccgccacgaaggccuacaacgucacccaggccuucgggcgccggggccccgagcagacccaggggaacuucggcgaccaggagcugauccgccaggggaccgacuacaagcacuggccccagaucgcccaguucgcgcccagcgccuccgccuucuucggcaugagccggaucggcauggaggugacgccguccgggaccuggcugaccuacaccggcgccaucaagcucgacgacaaggaccccaacuucaaggaccaggugauccugcugaacaagcacaucgacgccuacaagacguucccgcccaccgagcccaagaaggacaagaagaagaaggcggacgagacccaggcccucccccagcgccagaagaagcagcagaccgucacgcugcugcccgccgccgaccucgacgacuucagcaagcagcugcagcaguccaugagcuccgcggacagcacccaggccugaggacuaguuauaagacugacuagcccgaugggccucccaacgggcccuccuccccuccuugcaccgagauuaauaaaaaaaaaaaaaaaaaaaaaaaaaaaaaaaaaaaaaaaaaaaaaaaaaaaaaaaaaaaaaaaaugcaucccccccccccccccccccccccccccccccaaaggcucuuuucagagccaccagaauu

SEQ ID NO: 21293 - RNA, 1477 nt, Artificial Sequence
  SARS-CoV-2__MT371035.1__nucleocapsid protein (N) mRNA gc
aggagaaagcuuaccaugagcgacaacggcccccagaaccagcgcaacgccccgcggaucaccuucgggggccccuccgacagcaccggguccaaccagaacggcgagcgcagcggggcccgguccaagcagcgccggccccagggccugcccaacaacacggcgagcugguucaccgcccucacccagcacggcaaggaggaccugaaguucccgcgcgggcagggcgugcccaucaacaccaacuccagccccgacgaccagaucggguacuaccggcgcgccacgcggcgcauccggggcggggacggcaagaugaaggaccugagcccccgcugguacuucuacuaccucggcaccgggccggaggccggccugcccuacggggccaacaaggacggcaucaucugggucgcgaccgagggcgcccugaacacccccaaggaccacaucgggacgcggaaccccgccaacaacgccgcgaucgugcuccagcugccgcagggcaccacccugcccaagggguucuacgccgagggcucccgcgggggcucccaggccagcucccggagcuccagccgcucccggaacagcucccgcaacagcacccccggcagcucccgggggacgagccccgcccgcauggccggcaacgggggcgacgcggcccucgcccugcugcuccuggaccggcugaaccagcucgaguccaagaugagcgggaagggccagcagcagcagggccagaccgugaccaagaaguccgccgccgaggcgagcaagaagccgcgccagaagcgcaccgccacgaaggccuacaacgucacccaggccuucgggcggcgcggccccgagcagacccaggggaacuucggcgaccaggagcugauccggcaggggaccgacuacaagcacuggccccagaucgcccaguucgcgcccuccgccagcgccuucuucggcaugucccgcaucggcaucgaggugacgccgagcgggaccuggcugaccuacaccggcgccaucaagcucgacgacaaggaccccaacuucaaggaccaggugauccugcugaacaagcacaucgacgccuacaagacguucccgcccaccgagcccaagaaggacaagaagaagaaggcggacgagacccaggcccucccccagcggcagaagaagcagcagaccgucacgcugcugcccgccgccgaccucgacgacuucuccaagcagcugcagcagagcauguccagcgcggacuccacccaggccugaggacuaguuauaagacugacuagcccgaugggccucccaacgggcccuccuccccuccuugcaccgagauuaauaaaaaaaaaaaaaaaaaaaaaaaaaaaaaaaaaaaaaaaaaaaaaaaaaaaaaaaaaaaaaaaaugcaucccccccccccccccccccccccccccccccaaaggcucuuuucagagccaccagaauu

SEQ ID NO: 21294 - RNA, 1477 nt, Artificial Sequence
  SARS-CoV-2__MT371038.1__nucleocapsid protein (N) mRNA gc
aggagaaagcuuaccaugagcgacaacggcccccagaaccagcgcaacgccccgcggaucaccuucgggggccuguccgacagcaccggguccaaccagaacggcgagcgcagcggggcccgguccaagcagcgccggccccagggccuccccaacaacacggcgagcugguucaccgcccugacccagcacggcaaggaggaccugaaguucccccgcgggcagggcgugccgaucaacaccaacuccagccccgacgaccagaucggguacuaccggcgcgccacgcggcgcauccggggcggggacggcaagaugaaggaccucagcccccgcugguacuucuacuaccugggcaccgggcccgaggccggccugccguacggggccaacaaggacggcaucaucugggucgcgaccgagggcgcccucaacacccccaaggaccacaucgggacgcggaaccccgccaacaacgccgcgaucgugcugcagcugccccagggcaccacccucccgaagggguucuacgccgagggcagccgcgggggcucccaggccagcucccggagcuccagccgcucccggagcuccagccgcaacagcacccccggcuccagccgggggacgucccccgcccgcauggccggcaacgggggcgacgcggcccuggcccugcuccugcuggaccggcucaaccagcuggagagcaagauguccgggaagggccagcagcagcagggccagaccgugaccaagaaguccgccgccgaggcguccaagaagccccgccagaagcgcaccgccacgaaggccuacaacgucacccaggccuucgggcggcgcggcccggagcagacccaggggaacuucggcgaccaggagcugauccggcaggggaccgacuacaagcacuggccccagaucgcccaguucgcgcccagcgccuccgccuucuucggcaugagccgcaucggcauggaggugacgcccuccgggaccuggcucaccuacaccggcgccaucaagcuggacgacaaggacccgaacuucaaggaccaggugauccugcucaacaagcacaucgacgccuacaagacguucccgcccaccgagcccaagaaggacaagaagaagaaggcggacgagacccaggcccugccccagcggcagaagaagcagcagaccgucacgcugcuccccgccgccgaccuggacgacuucagcaagcagcugcagcaguccaugagcuccgcggacagcacccaggccugaggacuaguuauaagacugacuagcccgaugggccucccaacgggcccuccuccccuccuugcaccgagauuaauaaaaaaaaaaaaaaaaaaaaaaaaaaaaaaaaaaaaaaaaaaaaaaaaaaaaaaaaaaaaaaaaugcaucccccccccccccccccccccccccccccccaaaggcucuuuucagagccaccagaauu

SEQ ID NO: 21295 - RNA, 1477 nt, Artificial Sequence
  SARS-CoV-2__MT358690.1__nucleocapsid protein (N) mRNA gc
aggagaaagcuuaccaugagcgacaacggcccccagaaccagcgcaacgccccgcggaucaccuucgggggccccuccgacagcaccggguccaaccagaacggcgagcgcagcggggcccgguccaagcagcgccggccccagggccugcccaacaacacggcgagcugguucaccgcccucacccagcacggcaaggaggaccugaaguucccgcgcgggcagggcgugcccaucaacaccaacuccagccccgacgaccagaucggguacuaccggcgcgccacgcggcgcauccggggcggggacggcaagaugaaggaccugagcccccgcugguacuucuacuaccucggcaccgggccggaggccggccugcccuacggggccaacaaggacggcaucaucugggucgcgaccgagggcgcccugaacacccccaaggaccacaucgggacgcggaaccccgccaacaacgccgcgaucgugcuccagcugccgcagggcaccacccugcccaagggguucuacgccgagggcucccgcgggggcucccaggccagcucccggagcuccagccgcucccggaacagcucccgcaacagcacccccggcagcucccgggggacgagccccggccgcauggccgggaacggcggggacgccgcgcucgcccugcugcuccuggaccggcugaaccagcucgaguccaagaugagcggcaagugccagcagcagcagggccagaccguggccaagaaguccgccgccgaggcgagcaagaagccgcgccagaagcgcaccgccaccaaggccuacaacgucacgcaggccuucgggcggcgcggccccgagcagacccaggggaacuucggcgaccaggagcugauccggcaggggaccgacuacaagcacuggccccagaucgcccaguucgcgcccuccgccagcgccuucuucggcaugucccgcaucggcauggaggugaccccgagcgggacguggcugaccuacaccggcgccaucaagcucgacgacaaggaccccaacuucaaggaccaggugauccugcugaacaagcacaucgacgccuacaagaccuucccgcccacggagcccaagaaggacaagaagaagaaggcggacgagacccaggcccucccccagcggcagaagaagcagcagaccgucacccugcugcccgccgccgaccucgacgacuucuccaagcagcugcagcagagcauguccagcgcggacuccacgcaggccugaggacuaguuauaagacugacuagcccgaugggccucccaacgggcccuccuccccuccuugcaccgagauuaauaaaaaaaaaaaaaaaaaaaaaaaaaaaaaaaaaaaaaaaaaaaaaaaaaaaaaaaaaaaaaaaaugcaucccccccccccccccccccccccccccccccaaaggcucuuuucagagccaccagaauu

SEQ ID NO: 21296 - RNA, 1477 nt, Artificial Sequence
  SARS-CoV-2__MT358737.1__nucleocapsid protein (N) mRNA gc
aggagaaagcuuaccaugagcgacaacggcccccagaaccagcgcaacgccccgcggaucaccuucgggggccccuccgacagcaccggguccaaccagaacggcgagcgcagcggggcccgguccaagcagcgccggccccagggccugcccaacaacacggcgagcugguucaccgcccucacccagcacggcaaggaggaccugaaguucccgcgcgggcagggcgugcccaucaacaccaacuccagccccgacgaccagaucggguacuaccggcgcgccacgcggcgcauccggggcggggacggcaagaugaaggaccugagcccccgcugguacuucuacuaccucggcaccgggccggaggccggccugcccuacggggccaacaaggacggcaucaucugggucgcgaccgagggcgcccugaacacccccaaggaccacaucgggacgcggaaccccgccaacaacgccgcgaucgugcuccagcugccgcagggcaccacccugcccaagggguucuacgccgagggcucccgcgggggcucccaggccagcucccggagcuccagccgcucccggaacagcucccgcaacagcacccccggcagcucccgggggacgagccccgcccgcauggccggcaacgggggcgacgcggcccucgcccugcugcuccuggaccggcugaaccagcucgaguccaagaugagcgggaagggccagcagcagcagggccagaccgugaccaagaaguccgccgccgaggcgagcaagaagccgcgccagaagcgcaccgccacgaaggccuacaacgucacccaggccuucgggcggcgcggccccgagcagacccaggggaacuucggcgaccaggagcugauccggcaggggaccgacuacaagcacuggccccagaucgcccaguucgcgcccuccgccagcgccuucuucggcaugucccgcaucggcauggaggugacgccgagcgggaccuggcugaccuacaccggcgccaucaagcucggggacaaggaccccaacuucaaggaccaggugauccugcugaacaagcacaucgacgccuacaagacguucccgcccaccgagcccaagaaggacaagaagaagaaggcggacgagacccaggcccucccccagcggcagaagaagcagcagaccgucacgcugcugcccgccgccgaccucgacgacuucuccaagcagcugcagcagagcauguccagcgcggacuccacccaggccugaggacuaguuauaagacugacuagcccgaugggccucccaacgggcccuccuccccuccuugcaccgagauuaauaaaaaaaaaaaaaaaaaaaaaaaaaaaaaaaaaaaaaaaaaaaaaaaaaaaaaaaaaaaaaaaaugcaucccccccccccccccccccccccccccccccaaaggcucuuuucagagccaccagaauu

SEQ ID NO: 21297 - RNA, 1477 nt, Artificial Sequence
  SARS-CoV-2__MT334533.1__nucleocapsid protein (N) mRNA gc
aggagaaagcuuaccaugagcgacaacggcccccagaaccagcgcaacgccccgcggaucaccuucgggggccccuccgacagcaccggguccaaccagaacggcgagcgcagcggggcccgguccaagcagcgccggccccagggccugcccaacaacacggcgagcugguucaccgcccucacccagcacggcaaggaggaccugaaguucccgcgcgggcagggcgugcccaucaacaccaacuccagccccgacgaccagaucggguacuaccggcgcgccacgcggcgcauccggggcggggacggcaagaugaaggaccugagcccccgcugguacuucuacuaccucggcaccgggccggaggccggccugcccuacggggccaacaaggacggcaucaucugggucgcgaccgagggcgcccugaacacccccaaggaccacaucgggacgcggaaccccagcaacaacgccgccaucgugcuccagcugccgcagggcaccacccugcccaagggguucuacgcggagggcucccgcgggggcagccaggccuccagccgguccagcucccgcagccggaacuccagccgcaacagcacccccggcuccagccgggggacgucccccgcccgcauggccggcaacgggggcgacgccgcgcucgcccugcugcuccuggaccggcugaaccagcucgagagcaagauguccgggaagggccagcagcagcagggccagaccgugaccaagaaguccgccgccgaggccuccaagaagccgcgccagaagcgcaccgcgacgaaggccuacaacgucacccaggccuucgggcggcgcggccccgagcagacccaggggaacuucggcgaccaggagcugauccggcaggggaccgacuacaagcacuggccccagaucgcccaguucgcccccagcgcguccgccuucuucggcaugagccgcaucggcauggaggugacgccguccgggaccuggcugaccuacaccggcgccaucaagcucgacgacaaggaccccaacuucaaggaccaggugauccugcugaacaagcacaucgacgccuacaagacguucccgcccaccgagcccaagaaggacaagaagaagaaggccgacgagacccaggcgcucccccagcggcagaagaagcagcagaccgucacgcugcugcccgccgccgaccucgacgacuucagcaagcagcugcagcaguccaugagcuccgccgacagcacccaggcgugaggacuaguuauaagacugacuagcccgaugggccucccaacgggcccuccuccccuccuugcaccgagauuaauaaaaaaaaaaaaaaaaaaaaaaaaaaaaaaaaaaaaaaaaaaaaaaaaaaaaaaaaaaaaaaaaugcaucccccccccccccccccccccccccccccccaaaggcucuuuucagagccaccagaauu

SEQ ID NO: 21298 - RNA, 1477 nt, Artificial Sequence
  SARS-CoV-2__MT293159.1__nucleocapsid protein (N) mRNA gc
aggagaaagcuuaccaugagcgacaacggcccccagaaccagcgcaacgccccgcggaucaccuucgggggccccuccgacagcaccggguccaaccagaacggcgagcgcagcggggcccgguccaagcagcgccggccccagggccugcccaacaacacggcgagcugguucaccgcccucacccagcacggcaaggaggaccugaaguucccgcgcgggcagggcgugcccaucaacaccaacuccagccccgacgaccagaucggguacuaccggcgcgccacgcggcgcauccggggcggggacggcaagaugaaggaccugagcccccgcugguacuucuacuaccucggcaccgggccggaggccggccugcccuacggggccaacaaggacggcaucaucugggucgcgaccgagggcgcccugaacacccccaaggaccacaucgggacgcggaaccccgccaacaacgccgcgaucgugcuccagcugccgcagggcaccacccugcccaagggguucuacgccgagggcucccgcgggggcucccaggccagcucccggagcuccagccgcucccggaacagcucccgcaacagcacccccggcagcucccgggggacgagccccgccaccauggccggcaacgggggcgacgcggcccucgcccugcugcuccuggaccgccugaaccagcucgaguccaagaugagcgggaagggccagcagcagcagggccagaccgugaccaagaaguccgccgccgaggcgagcaagaagccgcggcagaagcgcacggccaccaaggccuacaacgucacccaggccuucgggcgccggggccccgagcagacccaggggaacuucggcgaccaggagcugauccgccaggggacggacuacaagcacuggccccagaucgcccaguucgcgcccuccgccagcgccuucuucggcaugucccggaucggcauggaggugaccccgagcgggaccuggcugaccuacacgggcgccaucaagcucgacgacaaggaccccaacuucaaggaccaggugauccugcugaacaagcacaucgacgccuacaagaccuucccgcccaccgagcccaagaaggacaagaagaagaaggcggacgagacccaggcccucccccagcgccagaagaagcagcagacggucacccugcugcccgccgccgaccucgacgacuucuccaagcagcugcagcagagcauguccagcgcggacuccacccaggccugaggacuaguuauaagacugacuagcccgaugggccucccaacgggcccuccuccccuccuugcaccgagauuaauaaaaaaaaaaaaaaaaaaaaaaaaaaaaaaaaaaaaaaaaaaaaaaaaaaaaaaaaaaaaaaaaugcaucccccccccccccccccccccccccccccccaaaggcucuuuucagagccaccagaauu

SEQ ID NO: 21299 - RNA, 1477 nt, Artificial Sequence
  SARS-CoV-2__MT293178.1__nucleocapsid protein (N) mRNA gc
aggagaaagcuuaccaugagcgacaacggcacccagaaccagcgcaacgcgccccggaucaccuucgggggcccguccgacacgaccgggagcaaccagaacggcgagcgcuccggggcccggagcaagcagcgccggccccagggccugcccaacaacaccgccuccugguucaccgcccucacgcagcacggcaaggaggaccugaaguucccccgcgggcagggcgugccgaucaacaccaacagcucccccgacgaccagaucggguacuaccggcgcgccacccggcgcauccggggcggggacggcaagaugaaggaccugagcccccgcugguacuucuacuaccucggcaccgggcccgaggccggccugccguacggggccaacaaggacggcaucaucugggucgcgacggagggcgcccugaacacccccaaggaccacaucgggacccggaaccccgccaacaacgccgcgaucgugcuccagcugccccagggcaccacgcugccgaagggguucuacgccgagggcucccgcgggggcagccaggccuccagccgguccagcucccgcagccggaacuccagccgcaacuccacccccggcagcagccgggggaccucccccgcccgcauggccggcaacgggggcgacgcggcccucgcccugcugcuccuggaccggcugaaccagcucgagagcaagauguccgggaagggccagcagcagcagggccagaccgugacgaagaaguccgccgccgaggcgagcaagaagccccgccagaagcgcaccgccaccaaggccuacaacgucacccaggccuucgggcggcgcggcccggagcagacgcaggggaacuucggcgaccaggagcugauccggcaggggaccgacuacaagcacuggccccagaucgcccaguucgcgcccagcgccuccgccuucuucggcaugagccgcaucggcauggaggugacccccuccgggaccuggcugacguacaccggcgccaucaagcucgacgacaaggacccgaacuucaaggaccaggugauccugcugaacaagcacaucgacgccuacaagaccuucccgcccaccgagcccaagaaggacaagaagaagaaggcggacgagacgcaggcccucccccagcggcagaagaagcagcagaccgucacccugcugcccgccgccgaccucgacgacuucagcaagcagcugcagcaguccaugagcuccgcggacagcacccaggccugaggacuaguuauaagacugacuagcccgaugggccucccaacgggcccuccuccccuccuugcaccgagauuaauaaaaaaaaaaaaaaaaaaaaaaaaaaaaaaaaaaaaaaaaaaaaaaaaaaaaaaaaaaaaaaaaugcaucccccccccccccccccccccccccccccccaaaggcucuuuucagagccaccagaauu

SEQ ID NO: 21300 - RNA, 1477 nt, Artificial Sequence
  SARS-CoV-2__MT263411.1__nucleocapsid protein (N) mRNA gc
aggagaaagcuuaccaugagcgacaacggcccccagaaccagcgcaacgccccgcggaucaccuucgggggccccuccgacagcaccggguccaaccagaacggcgagcgcagcggggcccgguccaagcagcgccggccccagggccugcccaacaacacggcgagcugguucaccgcccucacccagcacggcaaggaggaccugaaguucccgcgcgggcagggcgugcccaucaacaccaacuccagccccgacgaccagaucggguacuaccggcgcgccacgcggcgcauccggggcggggacggcaagaugaaggaccugagcccccgcugguacuucuacuaccucggcaccgggccggaggccggccugcccuacggggccaacaaggacggcaucaucugggucgcgaccgagggcgcccugaacacccccaaggaccacaucgggacgcggaaccccgccaacaacgccgcgaucgugcuccagcugccgcagggcaccacccugcccaagggguucuacgccgagggcagccgcgggggcucccaggccagcucccggagcuccagccgcucccggaacagcucccgcaacagcacccccggcagcucccgggggacgagccccgcccgcauggccggcaacgggggcgacgcggcccucgcccugcugcuccuggaccggcugaaccagcucgagaccaagauguccgggaagggccagcagcagcagggccagaccgugaccaagaaguccgccgccgaggcguccaagaagccgcgccagaagcgcacggccaccaaggccuacaacgucacccaggccuucgggcggcgcggccccgagcagacccaggggaacuucggcgaccaggagcugauccggcaggggacggacuacaagcacuggccccagaucgcccaguucgcgcccagcgccuccgccuucuucggcaugagccgcaucggcauggaggugaccccguccgggaccuggcugaccuacacgggcgccaucaagcucgacgacaaggaccccaacuucaaggaccaggugauccugcugaacaagcacaucgacgccuacaagaccuucccgcccaccgagcccaagaaggacaagaagaagaaggcggacgagacccaggcccucccccagcggcagaagaagcagcagacggucacccugcugcccgccgccgaccucgacgacuucagcaagcagcugcagcaguccaugagcuccgcggacagcacccaggccugaggacuaguuauaagacugacuagcccgaugggccucccaacgggcccuccuccccuccuugcaccgagauuaauaaaaaaaaaaaaaaaaaaaaaaaaaaaaaaaaaaaaaaaaaaaaaaaaaaaaaaaaaaaaaaaaugcaucccccccccccccccccccccccccccccccaaaggcucuuuucagagccaccagaauu

SEQ ID NO: 21301 - RNA, 1477 nt, Artificial Sequence
  SARS-CoV-2__MT259237.1__nucleocapsid protein (N) mRNA gc
aggagaaagcuuaccaugagcuacaacggcccccagaaccagcgcaacgccccgcggaucaccuucgggggccccuccgacagcaccggguccaaccagaacggcgagcgcagcggggcccgguccaagcagcgccggccccagggccugcccaacaacacggcgagcugguucaccgcccucacccagcacggcaaggaggaccugaaguucccgcgcgggcagggcgugcccaucaacaccaacuccagccccgacgaccagaucggguacuaccggcgcgccacgcggcgcauccggggcggggacggcaagaugaaggaccugagcccccgcugguacuucuacuaccucggcaccgggccggaggccggccugcccuacggggccaacaaggacggcaucaucugggucgcgaccgagggcgcccugaacacccccaaggaccacaucgggacgcggaaccccgccaacaacgccgcgaucgugcuccagcugccgcagggcaccacccugcccaagggguucuacgccgagggcucccgcgggggcucccaggccagcucccggagcuccagccgcucccggaacagcucccgcaacagcacccccggcagcucccgggggacgagccccgcccgcauggccggcaacgggggcgacgcggcccucgcccugcugcuccuggaccggcugaaccagcucgaguccaagaugagcgggaagggccagcagcagcagggccagaccgugaccaagaaguccgccgccgaggcgagcaagaagccgcgccagaagcgcaccgccacgaaggccuacaacgucacccaggccuucgggcggcgcggccccgagcagacccaggggaacuucggcgaccaggagcugauccggcaggggaccgacuacaagcacuggccccagaucgcccaguucgcgcccuccgccagcgccuucuucggcaugucccgcaucggcauggaggugacgccgagcgggaccuggcugaccuacaccggcgccaucaagcucgacgacaaggaccccaacuucaaggaccaggugauccugcugaacaagcacaucgacgccuacaagacguucccgcccaccgagcccaagaaggacaagaagaagaaggcggacgagacccaggcccucccccagcggcagaagaagcagcagaccgucacgcugcugcccgccgccgaccucgacgacuucuccaagcagcugcagcagagcauguccagcgcggacuccacccaggccugaggacuaguuauaagacugacuagcccgaugggccucccaacgggcccuccuccccuccuugcaccgagauuaauaaaaaaaaaaaaaaaaaaaaaaaaaaaaaaaaaaaaaaaaaaaaaaaaaaaaaaaaaaaaaaaaugcaucccccccccccccccccccccccccccccccaaaggcucuuuucagagccaccagaauu

SEQ ID NO: 21302 - RNA, 1477 nt, Artificial Sequence
  SARS-CoV-2__MT259269.1__nucleocapsid protein (N) mRNA gc
aggagaaagcuuaccaugagcgacgacggcccccagaaccagcgcaacgccccgcggaucaccuucgggggccccuccgacagcaccggguccaaccagaacggcgagcgcagcggggcccgguccaagcagcgccggccccagggccugcccaacaacacggcgagcugguucaccgcccucacccagcacggcaaggaggaccugaaguucccgcgcgggcagggcgugcccaucaacaccaacuccagccccgacgaccagaucggguacuaccggcgcgccacgcggcgcauccggggcggggacggcaagaugaaggaccugagcccccgcugguacuucuacuaccucggcaccgggccggaggccggccugcccuacggggccaacaaggacggcaucaucugggucgcgaccgagggcgcccugaacacccccaaggaccacaucgggacgcggaaccccgccaacaacgccgcgaucgugcuccagcugccgcagggcaccacccugcccaagggguucuacgccgagggcucccgcgggggcucccaggccagcucccggagcuccagccgcucccggaacagcucccgcaacagcacccccggcagcucccgggggacgagccccgcccgcauggccggcaacgggggcgacgcggcccucgcccugcugcuccuggaccggcugaaccagcucgaguccaagaugagcgggaagggccagcagcagcagggccagaccgugaccaagaaguccgccgccgaggcgagcaagaagccgcgccagaagcgcaccgccacgaaggccuacaacgucacccaggccuucgggcggcgcggccccgagcagacccaggggaacuucggcgaccaggagcugauccggcaggggaccgacuacaagcacuggccccagaucgcccaguucgcgcccuccgccagcgccuucuucggcaugucccgcaucggcauggaggugacgccgagcgggaccuggcugaccuacaccggcgccaucaagcucgacgacaaggaccccaacuucaaggaccaggugauccugcugaacaagcacaucgacgccuacaagacguucccgcccaccgagcccaagaaggacaagaagaagaaggcggacgagacccaggcccucccccagcggcagaagaagcagcagaccgucacgcugcugcccgccgccgaccucgacgacuucuccaagcagcugcagcagagcauguccagcgcggacuccacccaggccugaggacuaguuauaagacugacuagcccgaugggccucccaacgggcccuccuccccuccuugcaccgagauuaauaaaaaaaaaaaaaaaaaaaaaaaaaaaaaaaaaaaaaaaaaaaaaaaaaaaaaaaaaaaaaaaaugcaucccccccccccccccccccccccccccccccaaaggcucuuuucagagccaccagaauu

SEQ ID NO: 21303 - RNA, 1477 nt, Artificial Sequence
  SARS-CoV-2__MT259274.1__nucleocapsid protein (N) mRNA gc
aggagaaagcuuaccaugagcgacaacggcccccagaaccagcgcaacgccccgcggaucaccuucgggggccccuccgacagcaccggguccaaccagaacggcgagcgcagcgggacgcgguccaagcagcgccggccccagggccugcccaacaacaccgccagcugguucaccgcgcucacccagcacggcaaggaggaccugaaguucccgcgcgggcagggcgugcccaucaacacgaacuccagccccgacgaccagaucggguacuaccggcgcgccacccggcgcauccggggcggggacggcaagaugaaggaccugagcccccgcugguacuucuacuaccucggcaccgggccggaggccggccugcccuacggggccaacaaggacggcaucaucugggucgccaccgagggcgcgcugaacacgcccaaggaccacaucgggacccggaaccccgccaacaacgccgccaucgugcuccagcugccgcagggcaccacccugcccaagggguucuacgcggagggcucccgcgggggcucccaggccagcucccggagcuccagccgcucccggaacagcucccgcaacagcacgcccggcagcucccgggggaccagccccgcccgcauggccggcaacgggggcgacgccgcgcucgcccugcugcuccuggaccggcugaaccagcucgaguccaagaugagcgggaagggccagcagcagcagggccagaccgugaccaagaaguccgccgccgaggccagcaagaagccgcgccagaagcgcacggcgaccaaggccuacaacgucacccaggccuucgggcggcgcggccccgagcagacccaggggaacuucggcgaccaggagcugauccggcaggggacggacuacaagcacuggccccagaucgcccaguucgcccccuccgcgagcgccuucuucggcaugucccgcaucggcauggaggugaccccgagcgggaccuggcugaccuacacgggcgccaucaagcucgacgacaaggaccccaacuucaaggaccaggugauccugcugaacaagcacaucgacgccuacaagaccuucccgcccaccgagcccaagaaggacaagaagaagaaggccgacgagacccaggcgcucccccagcggcagaagaagcagcagacggucacccugcugcccgccgccgaccucgacgacuucuccaagcagcugcagcagagcauguccagcgccgacuccacccaggcgugaggacuaguuauaagacugacuagcccgaugggccucccaacgggcccuccuccccuccuugcaccgagauuaauaaaaaaaaaaaaaaaaaaaaaaaaaaaaaaaaaaaaaaaaaaaaaaaaaaaaaaaaaaaaaaaaugcaucccccccccccccccccccccccccccccccaaaggcucuuuucagagccaccagaauu

SEQ ID NO: 21304 - RNA, 1477 nt, Artificial Sequence
  SARS-CoV-2__MT159718.2__nucleocapsid protein (N) mRNA gc
aggagaaagcuuaccaugagcgacaacggcccccagaaccagcgcaacgccccgcggaucaccuucgggggccccuccgacagcaccggguccaaccagaacggcgagcgcagcggggcccgguccaagcagcgccggccccagggccugagcaacaacacggcguccugguucaccgcccucacccagcacggcaaggaggaccugaaguucccccgcgggcagggcgugccgaucaacaccaacagcucccccgacgaccagaucggguacuaccggcgcgccacgcggcgcauccggggcggggacggcaagaugaaggaccugagcccccgcugguacuucuacuaccucggcaccgggcccgaggccggccugccguacggggccaacaaggacggcaucaucugggucgcgaccgagggcgcccugaacacccccaaggaccacaucgggacgcggaaccccgccaacaacgccgcgaucgugcuccagcugccccagggcaccacccugccgaagggguucuacgccgagggcucccgcgggggcagccaggccuccagccgguccagcucccgcagccggaacuccagccgcaacagcacccccggcuccagccgggggacgucccccgcccgcauggccggcaacgggggcgacgcggcccucgcccugcugcuccuggaccggcugaaccagcucgagagcaagauguccgggaagggccagcagcagcagggccagaccgugaccaagaaguccgccgccgaggcgagcaagaagccccgccagaagcgcaccgccacgaaggccuacaacgucacccaggccuucgggcggcgcggcccggagcagacccaggggaacuucggcgaccaggagcugauccggcaggggaccgacuacaagcacuggccccagaucgcccaguucgcgcccagcgccuccgccuucuucggcaugagccgcaucggcauggaggugacgcccuccgggaccuggcugaccuacaccggcgccaucaagcucgacgacaaggacccgaacuucaaggaccaggugauccugcugaacaagcacaucgacgccuacaagacguucccgcccaccgagcccaagaaggacaagaagaagaaggcggacgagacccaggcccucccccagcggcagaagaagcagcagaccgucacgcugcugcccgccgccgaccucgacgacuucagcaagcagcugcagcaguccaugagcuccgcggacagcacccaggccugaggacuaguuauaagacugacuagcccgaugggccucccaacgggcccuccuccccuccuugcaccgagauuaauaaaaaaaaaaaaaaaaaaaaaaaaaaaaaaaaaaaaaaaaaaaaaaaaaaaaaaaaaaaaaaaaugcaucccccccccccccccccccccccccccccccaaaggcucuuuucagagccaccagaauu

SEQ ID NO: 21305 - RNA, 1477 nt, Artificial Sequence
  SARS-CoV-2__MT135043.1__nucleocapsid protein (N) mRNA gc
aggagaaagcuuaccaugagcgacaacggcccccagaaccagcgcaacgccccgcggaucaccuucgggggccccuccgacagcaccggguccaaccagaacggcgagcgcagcggggcccgguccaagcagcgccggccccagggccugcccaacaacacggcgagcugguucaccgcccucacccagcacggcaaggaggaccugaaguucccgcgcgggcagggcgugcccaucaacaccaacuccagccccgacgaccagaucggguacuaccggcgcgccacgcggcgcauccggggcggggacggcaagaugaaggaccugagcccccgcugguacuucuacuaccucggcaccgggccggaggccggccugcccuacggggccaacaaggacggcaucaucugggucgcgaccgagggcgcccugaacacccccaaggaccacaucgggacgcggaaccccgccaacaacgccgcgaucgugcuccagcugccgcagggcaccacccugcccaagggguucuacgccgagggcucccgcgggggcucccaggccagcucccggagcuccagccgcucccggaacagcucccgcaacagcacccccggcagcucccgggggacgagccccgcccgcauggccggcaacgggggcgacgcggcccucgcccugcugcuccuggaccggcugaaccagcucgaguccaagaugagcgggaagggccagcagcagcagggccagaccgugaccaagaaguccgccgccgaggcgagcaagaagccgcgccagaagcgcaccgccacgaaggccuacaacgucacccaggccuucgggcggcgcggccccgagcagacccaggggaacuucggcgaccaggagcugauccggcaggggaccgacuacaagcacuggccccagaucgcccaguucgcgcccuccgccagcgccuucuucggcaugucccgcaucggcauggaggugacgccgagcgggaccuggcugaccuacaccggcgccaucaagcucgacgacaaggugcccaacuucaaggaccaggucauccugcugaacaagcacaucgacgccuacaagacguucccgcccaccgagcccaagaaggacaagaagaagaaggcggacgagacccaggcccucccccagcggcagaagaagcagcagaccgugacgcugcugcccgccgccgaccucgacgacuucuccaagcagcugcagcagagcauguccagcgcggacuccacccaggccugaggacuaguuauaagacugacuagcccgaugggccucccaacgggcccuccuccccuccuugcaccgagauuaauaaaaaaaaaaaaaaaaaaaaaaaaaaaaaaaaaaaaaaaaaaaaaaaaaaaaaaaaaaaaaaaaugcaucccccccccccccccccccccccccccccccaaaggcucuuuucagagccaccagaauu

SEQ ID NO: 21306 - RNA, 466 nt, Artificial Sequence
  MERS-CoV/MERS-CoV-Jeddah-human-1__KF958702.1__envelope protein (E) mRNA gc
aggagaaagcuuaccaugcugcccuucgugcaggagcgcaucggccucuucaucgucaacuucuucaucuucaccguggugugcgccaucacccugcuggucugcauggccuuccucacggcgacccggcugugcgugcagugcaugaccggguucaacacccugcucgugcagcccgcccuguaccuguacaacacgggccgcagcgucuacgugaaguuccaggacuccaagccgccccucccgcccgacgagugggugugaggacuaguuauaagacugacuagcccgaugggccucccaacgggcccuccuccccuccuugcaccgagauuaauaaaaaaaaaaaaaaaaaaaaaaaaaaaaaaaaaaaaaaaaaaaaaaaaaaaaaaaaaaaaaaaaugcaucccccccccccccccccccccccccccccccaaaggcucuuuucagagccaccagaauu

SEQ ID NO: 21307 - RNA, 466 nt, Artificial Sequence; identical to SEQ ID NO: 21306
  MERS-CoV/Al-Hasa_4_2013__KF186564.1__envelope protein (E) mRNA gc

SEQ ID NO: 21308 - RNA, 466 nt, Artificial Sequence; identical to SEQ ID NO: 21306
  MERS-CoV/Riyadh_14_2013__KJ156934.1__envelope protein (E) mRNA gc

SEQ ID NO: 21309 - RNA, 466 nt, Artificial Sequence; identical to SEQ ID NO: 21306
  MERS-CoV/England 1__NC_038294.1__envelope protein (E) mRNA gc

SEQ ID NO: 21310 - RNA, 448 nt, Artificial Sequence
  SARS-CoV/Tor2__NC_004718.3__envelope protein (E) mRNA gc
aggagaaagcuuaccauguacagcuucguguccgaggagaccggcacccugaucgucaacagcgugcuccuguuccuggccuucguggucuuccuccuggugacgcuggccauccucaccgcgcugcgccugugcgccuacugcugcaacaucgugaacgucucccucgugaagcccaccguguacgucuacagccgggugaagaaccugaacuccagcgagggggugccggaccugcucgucugaggacuaguuauaagacugacuagcccgaugggccucccaacgggcccuccuccccuccuugcaccgagauuaauaaaaaaaaaaaaaaaaaaaaaaaaaaaaaaaaaaaaaaaaaaaaaaaaaaaaaaaaaaaaaaaaugcaucccccccccccccccccccccccccccccccaaaggcucuuuucagagccaccagaauu

SEQ ID NO: 21311 - RNA, 472 nt, Artificial Sequence
  HCoV/OC43__NC_006213.1__envelope protein (E) mRNA gc
aggagaaagcuuaccauguucauggccgacgccuaccuggcggacaccgugugguacgucggccagaucaucuucaucguggccaucugccuccuggugaccaucgucgugguggccuuccuggccacguucaagcucugcauccagcugugcgggaugugcaacacccugguccucagccccuccaucuacguguucaaccgcggccggcaguucuacgaguucuacaacgacgugaagccgcccguccuggacguggacgacgugugaggacuaguuauaagacugacuagcccgaugggccucccaacgggcccuccuccccuccuugcaccgagauuaauaaaaaaaaaaaaaaaaaaaaaaaaaaaaaaaaaaaaaaaaaaaaaaaaaaaaaaaaaaaaaaaaugcaucccccccccccccccccccccccccccccccaaaggcucuuuucagagccaccagaauu

SEQ ID NO: 21312 - RNA, 466 nt, Artificial Sequence
  HCoV/HKU1__NC_006577.2__envelope protein (E) mRNA gc
aggagaaagcuuaccaugguggaccuguucuucaacgacaccgccugguacaucggccagauccucgugcuggugcuguucugccucaucagccugaucuucguggucgccuuccuggcgaccaucaagcucugcaugcagcugugcggguucugcaacuucuucaucaucucccccagcgccuacguguacaagcgcggcaugcagcuguacaaguccuacagcgagcaggucaucccgcccacguccgacuaccucaucugaggacuaguuauaagacugacuagcccgaugggccucccaacgggcccuccuccccuccuugcaccgagauuaauaaaaaaaaaaaaaaaaaaaaaaaaaaaaaaaaaaaaaaaaaaaaaaaaaaaaaaaaaaaaaaaaugcaucccccccccccccccccccccccccccccccaaaggcucuuuucagagccaccagaauu

SEQ ID NO: 21313 - RNA, 451 nt, Artificial Sequence
  HCoV/229E/BN1/GER/2015__KU291448.1__envelope protein (E) mRNA gc
aggagaaagcuuaccauguuccugaagcucguggacgaccacgcccugaucgucaacgugcugaucuggugcgugguccucaucgugauccugcuggugugcaucaccaucaucaagcucaucaagcugugcuucacgugccacauguucugcaaccgcaccgucuacggccccaucaagaacguguaccacaucuaccagagcuacaugcacaucgacccguuccccaagcgggugaucgacuucugaggacuaguuauaagacugacuagcccgaugggccucccaacgggcccuccuccccuccuugcaccgagauuaauaaaaaaaaaaaaaaaaaaaaaaaaaaaaaaaaaaaaaaaaaaaaaaaaaaaaaaaaaaaaaaaaugcaucccccccccccccccccccccccccccccccaaaggcucuuuucagagccaccagaauu

SEQ ID NO: 21314 - RNA, 451 nt, Artificial Sequence
  HCoV/NL63/RPTEC/2004__JX504050.1__envelope protein (E) mRNA gc
aggagaaagcuuaccauguuccugcgccucaucgacgacaacggcaucgugcugaacagcauccuguggcuccuggucaugaucuucuucuucgugcuggccaugaccuucaucaagcucauccagcugugcuucacgugccacuacuucuucucccggacccuguaccagcccguguacaagaucuuccucgccuaccaggacuacaugcagaucgcgccgguccccgccgaggugcugaacgugugaggacuaguuauaagacugacuagcccgaugggccucccaacgggcccuccuccccuccuugcaccgagauuaauaaaaaaaaaaaaaaaaaaaaaaaaaaaaaaaaaaaaaaaaaaaaaaaaaaaaaaaaaaaaaaaaugcaucccccccccccccccccccccccccccccccaaaggcucuuuucagagccaccagaauu

SEQ ID NO: 21315 - RNA, 448 nt, Artificial Sequence; identical to SEQ ID NO: 21310
  Bat SARS-like CoV/WIV1__KF367457.1__envelope protein (E) mRNA gc

SEQ ID NO: 21316 - RNA, 457 nt, Artificial Sequence
  BatCoV/HKU9-1 BF_005I__NC_009021.1__envelope protein (E) mRNA gc
aggagaaagcuuaccauguacgacaucgugggcaccaacaacagcauccugaucgccaacguccucgugcugaucaucaucugccugcucguggucaucguggggugcgcccugcugcucauccugcaguucguguucggcgucugcggguucguguucaaguucgugugcaagcccaccauccuggucuacaacaaguuccgcaacgagucccuccugaacgagcgggaggagcugcucugcgacaacgugugaggacuaguuauaagacugacuagcccgaugggccucccaacgggcccuccuccccuccuugcaccgagauuaauaaaaaaaaaaaaaaaaaaaaaaaaaaaaaaaaaaaaaaaaaaaaaaaaaaaaaaaaaaaaaaaaugcaucccccccccccccccccccccccccccccccaaaggcucuuuucagagccaccagaauu

SEQ ID NO: 21317 - RNA, 469 nt, Artificial Sequence
  PDCoV/Swine/Thailand/S5011/2015__KU051641.1__envelope protein (E) mRNA gc
aggagaaagcuuaccaugguggucgacgacugggccgugaccauccccggccaguacaucaucgccauccugguggucaucugcaucgggguggcgcuccuguucaucaacacgugccuggccugcgugaagcuguucuacaagugcuaccucggcgccgccuaccugguccgcccgaucaucguguacuacagcaagcccaaccccgugcccgaggacgaguucgucaaggugcaccaguucccgcggaacacccacuacgugugaggacuaguuauaagacugacuagcccgaugggccucccaacgggcccuccuccccuccuugcaccgagauuaauaaaaaaaaaaaaaaaaaaaaaaaaaaaaaaaaaaaaaaaaaaaaaaaaaaaaaaaaaaaaaaaaugcaucccccccccccccccccccccccccccccccaaaggcucuuuucagagccaccagaauu

SEQ ID NO: 21318 - RNA, 448 nt, Artificial Sequence
  PEDV/NPL-PEDv/2013/P10__KJ778616.1__envelope protein (E) mRNA gc
aggagaaagcuuaccaugcugcagcucgugaacgacaacggccuggucgugaacgugauccuguggcuguucguccucuucuuccugcucaucaucagcaucaccuucgugcagcuggugaaccugugcuucacgugccaccgccucugcaacuccgccgucuacacccccaucgggcggcuguaccgcguguacaagagcuacaugcagaucgacccgcugcccuccaccgugaucgacgucugaggacuaguuauaagacugacuagcccgaugggccucccaacgggcccuccuccccuccuugcaccgagauuaauaaaaaaaaaaaaaaaaaaaaaaaaaaaaaaaaaaaaaaaaaaaaaaaaaaaaaaaaaaaaaaaaugcaucccccccccccccccccccccccccccccccaaaggcucuuuucagagccaccagaauu

SEQ ID NO: 21319 - RNA, 469 nt, Artificial Sequence
  MHV/A59__NC_048217.1__envelope protein (E) mRNA gc
aggagaaagcuuaccauguucaaccuguuccucaccgacaccgugugguacgucggccagaucaucuucaucuucgccgugugccugauggugacgaucaucgucguggccuuccuggcgagcaucaagcucugcauccagcugugcgggcugugcaacacccucgugcugucccccagcaucuaccuguacgaccgcuccaagcagcucuacaaguacuacaacgaggagaugcggcugccgcugcucgaggucgacgacaucugaggacuaguuauaagacugacuagcccgaugggccucccaacgggcccuccuccccuccuugcaccgagauuaauaaaaaaaaaaaaaaaaaaaaaaaaaaaaaaaaaaaaaaaaaaaaaaaaaaaaaaaaaaaaaaaaugcaucccccccccccccccccccccccccccccccaaaggcucuuuucagagccaccagaauu

SEQ ID NO: 21320 - RNA, 445 nt, Artificial Sequence
  SARS-CoV-2/Wuhan-Hu-1__NC_045512.2/MN908947.2/EPI_ISL_402128__env elope protein (E) mRNA gc
aggagaaagcuuaccauguacagcuucguguccgaggagaccggcacccugaucgucaacagcgugcuccuguuccuggccuucguggucuuccuccuggugacgcuggccauccucaccgcgcugcgccugugcgccuacugcugcaacaucgugaacgucucccucgugaagcccagcuucuacguguacucccgggucaagaaccugaacagcucccgcgugccggaccugcucgugugaggacuaguuauaagacugacuagcccgaugggccucccaacgggcccuccuccccuccuugcaccgagauuaauaaaaaaaaaaaaaaaaaaaaaaaaaaaaaaaaaaaaaaaaaaaaaaaaaaaaaaaaaaaaaaaaugcaucccccccccccccccccccccccccccccccaaaggcucuuuucagagccaccagaauu

SEQ ID NO: 21321 - RNA, 445 nt, Artificial Sequence
  SARS-CoV-2__MT919790.1__envelope protein (E) mRNA gc
aggagaaagcuuaccauguacagcuucguguccgaggagaccggcacccugaucgucaacagcgugcuccuguucuucgccuucguggucuuccugcucgugacgcuggccauccugaccgcgcuccgccugugcgccuacugcugcaacaucgugaacgucucccuggugaagcccagcuucuacguguacucccgggucaagaaccucaacagcucccgcgugccggaccugcuggugugaggacuaguuauaagacugacuagcccgaugggccucccaacgggcccuccuccccuccuugcaccgagauuaauaaaaaaaaaaaaaaaaaaaaaaaaaaaaaaaaaaaaaaaaaaaaaaaaaaaaaaaaaaaaaaaaugcaucccccccccccccccccccccccccccccccaaaggcucuuuucagagccaccagaauu

SEQ ID NO: 21322 - RNA, 445 nt, Artificial Sequence
  SARS-CoV-2__MT907517.1__envelope protein (E) mRNA gc
aggagaaagcuuaccauguacagcuucguguccgaggagaccggcacccugaucgucaacagcgugcuccuguuccuggccuucguggucuuccuccuggugacgcuggccauccucaccgcgcugcgccugugcgccuacugcugcaacaucgugaacgucucccucgugaagcccagcuucuacguguacucccgggucaaggaccugaacagcucccgcgugccggaccugcucgugugaggacuaguuauaagacugacuagcccgaugggccucccaacgggcccuccuccccuccuugcaccgagauuaauaaaaaaaaaaaaaaaaaaaaaaaaaaaaaaaaaaaaaaaaaaaaaaaaaaaaaaaaaaaaaaaaugcaucccccccccccccccccccccccccccccccaaaggcucuuuucagagccaccagaauu

SEQ ID NO: 21323 - RNA, 445 nt, Artificial Sequence
  SARS-CoV-2__MT905416.1__envelope protein (E) mRNA gc
aggagaaagcuuaccauguacagcuucuucuccgaggagaccggcacccugaucgugaacagcguccuccuguuccuggccuucgugguguuccuccuggucacgcuggccauccucaccgcgcugcgccugugcgccuacugcugcaacaucgugaacgugucccucgucaagcccagcuucuacguguacucccgggugaagaaccugaacagcucccgcgucccggaccugcucgugugaggacuaguuauaagacugacuagcccgaugggccucccaacgggcccuccuccccuccuugcaccgagauuaauaaaaaaaaaaaaaaaaaaaaaaaaaaaaaaaaaaaaaaaaaaaaaaaaaaaaaaaaaaaaaaaaugcaucccccccccccccccccccccccccccccccaaaggcucuuuucagagccaccagaauu

SEQ ID NO: 21324 - RNA, 445 nt, Artificial Sequence
  SARS-CoV-2__MT873051.1__envelope protein (E) mRNA gc
aggagaaagcuuaccauguacagcuucguguccgaggagaccggcacccugaucgucaacagcgugcuccuguuccuggccuucguggucuuccuccuggugacgcuggccauccucaccgcgcugcgccugugcgccuacugcugcaacaucgugaacgucucccucgugaagcccagcuucuacguguacucccgggucaagaaccugaacagcucccgcgugcuggaccuccuggugugaggacuaguuauaagacugacuagcccgaugggccucccaacgggcccuccuccccuccuugcaccgagauuaauaaaaaaaaaaaaaaaaaaaaaaaaaaaaaaaaaaaaaaaaaaaaaaaaaaaaaaaaaaaaaaaaugcaucccccccccccccccccccccccccccccccaaaggcucuuuucagagccaccagaauu

SEQ ID NO: 21325 - RNA, 445 nt, Artificial Sequence
  SARS-CoV-2__MT873111.1__envelope protein (E) mRNA gc
aggagaaagcuuaccauguacagcuucguguccgaggagaccggcacccugaucgucaacagcgugcuccuguuccuggccuucguggucuuccuccuggugacgcuggccauccucaccgcgcugcgccugugcgccuacugcugcaacaucgugaacgucucccucgugaagcccagcuucuacguguacucccgggucaagaaccugaacagcuuccgcgugccggaccugcucgugugaggacuaguuauaagacugacuagcccgaugggccucccaacgggcccuccuccccuccuugcaccgagauuaauaaaaaaaaaaaaaaaaaaaaaaaaaaaaaaaaaaaaaaaaaaaaaaaaaaaaaaaaaaaaaaaaugcaucccccccccccccccccccccccccccccccaaaggcucuuuucagagccaccagaauu

SEQ ID NO: 21326 - RNA, 445 nt, Artificial Sequence
  SARS-CoV-2__MT873335.1__envelope protein (E) mRNA gc
aggagaaagcuuaccauguacagcuucguguccgaggagaccggcacccugaucgucaacagcgugcuccuguuccuggccuucguggucuuccuccuggugacgcuggccauccucaccgcgcugcgccugugcgccuacugcugcaacaucgugaacgucuccuucgugaagcccagcuucuacguguacucccgggucaagaaccucaacagcucccgcgugccggaccugcuggugugaggacuaguuauaagacugacuagcccgaugggccucccaacgggcccuccuccccuccuugcaccgagauuaauaaaaaaaaaaaaaaaaaaaaaaaaaaaaaaaaaaaaaaaaaaaaaaaaaaaaaaaaaaaaaaaaugcaucccccccccccccccccccccccccccccccaaaggcucuuuucagagccaccagaauu

SEQ ID NO: 21327 - RNA, 445 nt, Artificial Sequence
  SARS-CoV-2__MT873370.1__envelope protein (E) mRNA gc
aggagaaagcuuaccauguacagcuucguguccgaggagaccggcacccugaucgucaacagcgugcuccuguuccuggccuucguggucuuccuccuggugacgcuggccauccucaccgcgcugcgccugugcgccuacugcugcaacaucgugaacgucucccucgugaagcccagcuucuacguguacucccgguucaagaaccugaacagcucccgcgucccggaccugcucgugugaggacuaguuauaagacugacuagcccgaugggccucccaacgggcccuccuccccuccuugcaccgagauuaauaaaaaaaaaaaaaaaaaaaaaaaaaaaaaaaaaaaaaaaaaaaaaaaaaaaaaaaaaaaaaaaaugcaucccccccccccccccccccccccccccccccaaaggcucuuuucagagccaccagaauu

SEQ ID NO: 21328 - RNA, 445 nt, Artificial Sequence
  SARS-CoV-2__MT872498.1__envelope protein (E) mRNA gc
aggagaaagcuuaccauguacagcuucguguccgaggagaccggcacccugaucgucaacagcguccucuucuuccuggccuucgugguguuccugcucgugacgcuggccauccugaccgcgcuccgccugugcgccuacugcugcaacaucgugaacgucucccuggugaagcccagcuucuacguguacucccgguucaagaaccucaacagcucccgcgucccggaccugcuggugugaggacuaguuauaagacugacuagcccgaugggccucccaacgggcccuccuccccuccuugcaccgagauuaauaaaaaaaaaaaaaaaaaaaaaaaaaaaaaaaaaaaaaaaaaaaaaaaaaaaaaaaaaaaaaaaaugcaucccccccccccccccccccccccccccccccaaaggcucuuuucagagccaccagaauu

SEQ ID NO: 21329 - RNA, 445 nt, Artificial Sequence
  SARS-CoV-2__MT846585.1__envelope protein (E) mRNA gc
aggagaaagcuuaccauguacagcuucaucuccgaggagaccggcacccugaucgugaacagcguccuccuguuccuggccuucgugguguuccuccuggucacgcuggccauccucaccgcgcugcgccugugcgccuacugcugcaacaucgugaacgugucccucgucaagcccagcuucuacguguacucccgggugaagaaccugaacagcucccgcgucccggaccugcucgugugaggacuaguuauaagacugacuagcccgaugggccucccaacgggcccuccuccccuccuugcaccgagauuaauaaaaaaaaaaaaaaaaaaaaaaaaaaaaaaaaaaaaaaaaaaaaaaaaaaaaaaaaaaaaaaaaugcaucccccccccccccccccccccccccccccccaaaggcucuuuucagagccaccagaauu

SEQ ID NO: 21330 - RNA, 445 nt, Artificial Sequence
  SARS-CoV-2__MT835383.1__envelope protein (E) mRNA gc
aggagaaagcuuaccauguacagcuucgccuccgaggagaccggcacccugaucgugaacagcguccuccuguuccuggccuucgugguguuccuccuggucacgcuggcgauccucaccgcccugcgccugugcgccuacugcugcaacaucgugaacgugucccucgucaagcccagcuucuacguguacucccgggugaagaaccugaacagcucccgcgucccggaccugcucgugugaggacuaguuauaagacugacuagcccgaugggccucccaacgggcccuccuccccuccuugcaccgagauuaauaaaaaaaaaaaaaaaaaaaaaaaaaaaaaaaaaaaaaaaaaaaaaaaaaaaaaaaaaaaaaaaaugcaucccccccccccccccccccccccccccccccaaaggcucuuuucagagccaccagaauu

SEQ ID NO: 21331 - RNA, 445 nt, Artificial Sequence
  SARS-CoV-2__MT833965.1__envelope protein (E) mRNA gc
aggagaaagcuuaccauguacagcuucguguccgaggagaccggcacccugaucgucaacagcgugcuccuguuccuggccuucguggucuuccuccuggugauccuggccauccucacggcgcugcgccugugcgccuacugcugcaacaucgugaacgucucccucgugaagcccagcuucuacguguacucccgggucaagaaccugaacagcucccgcgugccggaccugcucgugugaggacuaguuauaagacugacuagcccgaugggccucccaacgggcccuccuccccuccuugcaccgagauuaauaaaaaaaaaaaaaaaaaaaaaaaaaaaaaaaaaaaaaaaaaaaaaaaaaaaaaaaaaaaaaaaaugcaucccccccccccccccccccccccccccccccaaaggcucuuuucagagccaccagaauu

SEQ ID NO: 21332 - RNA, 445 nt, Artificial Sequence
  SARS-CoV-2__MT834224.1__envelope protein (E) mRNA gc
aggagaaagcuuaccauguacagcuucguguccgaggagaccggcacccugaucgucaacagcgugcuccuguuccuggccuucguggucuuccuccuggugacgcuggccauccucaccgcgcugcgccugugcgccuacugcugcaacaucgugaacgucucccucgugaagcccagcuucuacguguacucccgggucaagaaccugaacagcucccgcgugagcgaccugcucgugugaggacuaguuauaagacugacuagcccgaugggccucccaacgggcccuccuccccuccuugcaccgagauuaauaaaaaaaaaaaaaaaaaaaaaaaaaaaaaaaaaaaaaaaaaaaaaaaaaaaaaaaaaaaaaaaaugcaucccccccccccccccccccccccccccccccaaaggcucuuuucagagccaccagaauu

SEQ ID NO: 21333 - RNA, 445 nt, Artificial Sequence
  SARS-CoV-2__MT704816.1__envelope protein (E) mRNA gc
aggagaaagcuuaccauguacagcuucguguccgaggagaccggcacccugaucgucaacagcgugcuccuguuccuggccuucguggucuuccuccuggugacgcuggccauccucaccgcgcugcgccugugcgccuacuucugcaacaucgugaacgucucccucgugaagcccagcuucuacguguacucccgggucaagaaccugaacagcucccgcgugccggaccugcucgugugaggacuaguuauaagacugacuagcccgaugggccucccaacgggcccuccuccccuccuugcaccgagauuaauaaaaaaaaaaaaaaaaaaaaaaaaaaaaaaaaaaaaaaaaaaaaaaaaaaaaaaaaaaaaaaaaugcaucccccccccccccccccccccccccccccccaaaggcucuuuucagagccaccagaauu

SEQ ID NO: 21334 - RNA, 445 nt, Artificial Sequence
  SARS-CoV-2__MT827831.1__envelope protein (E) mRNA gc
aggagaaagcuuaccauguacagcuucguguccgaggagaucggcacccugaucgucaacagcgugcuccuguuccuggccuucguggucuuccuccuggugacccuggccauccucacggcgcugcgccugugcgccuacugcugcaacaucgugaacgucucccucgugaagcccagcuucuacguguacucccgggucaagaaccugaacagcucccgcgugccggaccugcucgugugaggacuaguuauaagacugacuagcccgaugggccucccaacgggcccuccuccccuccuugcaccgagauuaauaaaaaaaaaaaaaaaaaaaaaaaaaaaaaaaaaaaaaaaaaaaaaaaaaaaaaaaaaaaaaaaaugcaucccccccccccccccccccccccccccccccaaaggcucuuuucagagccaccagaauu

SEQ ID NO: 21335 - RNA, 445 nt, Artificial Sequence
  SARS-CoV-2__MT825091.1__envelope protein (E) mRNA gc
aggagaaagcuuaccauguacagcuucguguccgaggagaccggcacccugaucgucaacagcgugcuccuguuccuggccuucguggucuuccuccuggugacgcuggccacccucaccgcgcugcgccugugcgccuacugcugcaacaucgugaacgucucccucgugaagcccagcuucuacguguacucccgggucaagaaccugaacagcucccgcgugccggaccugcucgugugaggacuaguuauaagacugacuagcccgaugggccucccaacgggcccuccuccccuccuugcaccgagauuaauaaaaaaaaaaaaaaaaaaaaaaaaaaaaaaaaaaaaaaaaaaaaaaaaaaaaaaaaaaaaaaaaugcaucccccccccccccccccccccccccccccccaaaggcucuuuucagagccaccagaauu

SEQ ID NO: 21336 - RNA, 445 nt, Artificial Sequence
  SARS-CoV-2__MT821604.1__envelope protein (E) mRNA gc
aggagaaagcuuaccauguacagcuucguguccgaggagaccggcacccugaucgucaacagcgugcuccuguuccuggccuucguggucuuccuccuggugacgcuggccauccucaccgcgcugcgccugugcguguacugcugcaacaucgucaacgugucccucgugaagcccagcuucuacgucuacucccgggugaagaaccugaacagcucccgcgugccggaccugcucgucugaggacuaguuauaagacugacuagcccgaugggccucccaacgggcccuccuccccuccuugcaccgagauuaauaaaaaaaaaaaaaaaaaaaaaaaaaaaaaaaaaaaaaaaaaaaaaaaaaaaaaaaaaaaaaaaaugcaucccccccccccccccccccccccccccccccaaaggcucuuuucagagccaccagaauu

SEQ ID NO: 21337 - RNA, 445 nt, Artificial Sequence
  SARS-CoV-2__MT810623.1__envelope protein (E) mRNA gc
aggagaaagcuuaccauguacagcuucguguccgaggacaccggcacccugaucgucaacagcgugcuccuguuccuggccuucguggucuuccuccuggugacgcuggccauccucaccgcgcugcgccugugcgccuacugcugcaacaucgugaacgucucccucgugaagcccagcuucuacguguacucccgggucaagaaccugaacagcucccgcgugccggaccugcucgugugaggacuaguuauaagacugacuagcccgaugggccucccaacgggcccuccuccccuccuugcaccgagauuaauaaaaaaaaaaaaaaaaaaaaaaaaaaaaaaaaaaaaaaaaaaaaaaaaaaaaaaaaaaaaaaaaugcaucccccccccccccccccccccccccccccccaaaggcucuuuucagagccaccagaauu

SEQ ID NO: 21338 - RNA, 445 nt, Artificial Sequence
  SARS-CoV-2__MT811741.1__envelope protein (E) mRNA gc
aggagaaagcuuaccauguacagcuucguguccgaggagaccggcacccugaucgucaacagcgugcuccuguuccuggccuucgugguccuccugcuggugacgcucgccauccugaccgcgcugcgccucugcgccuacugcugcaacaucgugaacgucucccuggugaagcccagcuucuacguguacucccgggucaagaaccugaacagcucccgcgugccggaccuccuggugugaggacuaguuauaagacugacuagcccgaugggccucccaacgggcccuccuccccuccuugcaccgagauuaauaaaaaaaaaaaaaaaaaaaaaaaaaaaaaaaaaaaaaaaaaaaaaaaaaaaaaaaaaaaaaaaaugcaucccccccccccccccccccccccccccccccaaaggcucuuuucagagccaccagaauu

SEQ ID NO: 21339 - RNA, 445 nt, Artificial Sequence
  SARS-CoV-2__MT666099.1__envelope protein (E) mRNA gc
aggagaaagcuuaccauguacagcuucguguccgaggagaccggcacccugaucgucaacagcgugcuccugcugcucgccuucguggucuuccugcuggugacgcucgccauccugaccgcgcugcgccucugcgccuacugcugcaacaucgugaacgucucccuggugaagcccagcuucuacguguacucccgggucaagaaccugaacagcucccgcgugccggaccuccuggugugaggacuaguuauaagacugacuagcccgaugggccucccaacgggcccuccuccccuccuugcaccgagauuaauaaaaaaaaaaaaaaaaaaaaaaaaaaaaaaaaaaaaaaaaaaaaaaaaaaaaaaaaaaaaaaaaugcaucccccccccccccccccccccccccccccccaaaggcucuuuucagagccaccagaauu

SEQ ID NO: 21340 - RNA, 445 nt, Artificial Sequence
  SARS-CoV-2__MT627619.1__envelope protein (E) mRNA gc
aggagaaagcuuaccauguacagcuucguguccgaggagaccggcacccugaucgucaacagcgugcuccuguuccuggccuucguggucuuccuccuggugacgcuggccauccucaccgcgcugcgccugugcuccuacugcugcaacaucgugaacgucagccucgugaagcccuccuucuacguguacagccgggucaagaaccugaacuccagccgcgugccggaccugcucgugugaggacuaguuauaagacugacuagcccgaugggccucccaacgggcccuccuccccuccuugcaccgagauuaauaaaaaaaaaaaaaaaaaaaaaaaaaaaaaaaaaaaaaaaaaaaaaaaaaaaaaaaaaaaaaaaaugcaucccccccccccccccccccccccccccccccaaaggcucuuuucagagccaccagaauu

SEQ ID NO: 21341 - RNA, 445 nt, Artificial Sequence
  SARS-CoV-2__MT630422.1__envelope protein (E) mRNA gc
aggagaaagcuuaccauguacagcuucguguccgaggagaccggcacccugaucgucaacagcguccucuucuuccuggccuucgugguguuccugcucgugacgcuggccauccugaccgcgcuccgccugugcgccuacugcugcaacaucgugaacgucucccuggugaagcccagcuucuacguguacucccgggucaagaaccucaacagcucccgcgugccggaccugcuggugugaggacuaguuauaagacugacuagcccgaugggccucccaacgggcccuccuccccuccuugcaccgagauuaauaaaaaaaaaaaaaaaaaaaaaaaaaaaaaaaaaaaaaaaaaaaaaaaaaaaaaaaaaaaaaaaaugcaucccccccccccccccccccccccccccccccaaaggcucuuuucagagccaccagaauu

SEQ ID NO: 21342 - RNA, 445 nt, Artificial Sequence
  SARS-CoV-2__MT632491.1__envelope protein (E) mRNA gc
aggagaaagcuuaccauguacagcuucgugucccaggagaccggcacccugaucgucaacagcgugcuccuguuccuggccuucguggucuuccuccuggugacgcuggccauccucaccgcgcugcgccugugcgccuacugcugcaacaucgugaacgucucccucgugaagcccagcuucuacguguacucccgggucaagaaccugaacagcucccgcgugccggaccugcucgugugaggacuaguuauaagacugacuagcccgaugggccucccaacgggcccuccuccccuccuugcaccgagauuaauaaaaaaaaaaaaaaaaaaaaaaaaaaaaaaaaaaaaaaaaaaaaaaaaaaaaaaaaaaaaaaaaugcaucccccccccccccccccccccccccccccccaaaggcucuuuucagagccaccagaauu

SEQ ID NO: 21343 - RNA, 445 nt, Artificial Sequence
  SARS-CoV-2__MT632864.1__envelope protein (E) mRNA gc
aggagaaagcuuaccauguacagcuucguguccgaggagaccggcacccugaucgucaacagcgugcuccuguuccuggccuucguggucuuccuccuggugacgcuggccauccucaccgcgcugcgccugugcgccuacugcugcaacaucgugaacgucucccucgugaagcccuucuucuacguguacagccgggucaagaaccugaacuccagccgcgugccggaccugcucgugugaggacuaguuauaagacugacuagcccgaugggccucccaacgggcccuccuccccuccuugcaccgagauuaauaaaaaaaaaaaaaaaaaaaaaaaaaaaaaaaaaaaaaaaaaaaaaaaaaaaaaaaaaaaaaaaaugcaucccccccccccccccccccccccccccccccaaaggcucuuuucagagccaccagaauu

SEQ ID NO: 21344 - RNA, 445 nt, Artificial Sequence
  SARS-CoV-2__MT598173.1__envelope protein (E) mRNA gc
aggagaaagcuuaccauguacagcuucguguccgagaagaccggcacccugaucgucaacagcgugcuccuguuccuggccuucguggucuuccuccuggugacgcuggccauccucaccgcgcugcgccugugcgccuacugcugcaacaucgugaacgucucccucgugaagcccagcuucuacguguacucccgggucaagaaccugaacagcucccgcgugccggaccugcucgugugaggacuaguuauaagacugacuagcccgaugggccucccaacgggcccuccuccccuccuugcaccgagauuaauaaaaaaaaaaaaaaaaaaaaaaaaaaaaaaaaaaaaaaaaaaaaaaaaaaaaaaaaaaaaaaaaugcaucccccccccccccccccccccccccccccccaaaggcucuuuucagagccaccagaauu

SEQ ID NO: 21345 - RNA, 445 nt, Artificial Sequence
  SARS-CoV-2__MT568636.1__envelope protein (E) mRNA gc
aggagaaagcuuaccauguacagcuucguguccgaggagaccggcacccugaucgucaacagcgugcuccuguuccuggccuucguggucuuccuccuggugacgcuggccauccucaccgcgcugcgccugugcgccuacugcugcaacaucgugaacgucucccucgugaagcccagcuucuacguguacucccgggucaagaaccugaacagcucccgcgugccguaccugcucgugugaggacuaguuauaagacugacuagcccgaugggccucccaacgggcccuccuccccuccuugcaccgagauuaauaaaaaaaaaaaaaaaaaaaaaaaaaaaaaaaaaaaaaaaaaaaaaaaaaaaaaaaaaaaaaaaaugcaucccccccccccccccccccccccccccccccaaaggcucuuuucagagccaccagaauu

SEQ ID NO: 21346 - RNA, 445 nt, Artificial Sequence
  SARS-CoV-2__MT568638.1__envelope protein (E) mRNA gc
aggagaaagcuuaccauguacagcuucguguccgaggagaccggcacccugaucgucaacagcgugcuccuguuccuggccuucguggucuuccuccuggugacgcuggccauccucaccgcgcugcgccugugcgccuacugcugcaacaucgugaacgucucccucgugaagcccagcuucuacguguacucccgggucaagaaccugaacagcugccgcgugccggaccugcucgugugaggacuaguuauaagacugacuagcccgaugggccucccaacgggcccuccuccccuccuugcaccgagauuaauaaaaaaaaaaaaaaaaaaaaaaaaaaaaaaaaaaaaaaaaaaaaaaaaaaaaaaaaaaaaaaaaugcaucccccccccccccccccccccccccccccccaaaggcucuuuucagagccaccagaauu

SEQ ID NO: 21347 - RNA, 445 nt, Artificial Sequence
  SARS-CoV-2__MT459833.1__envelope protein (E) mRNA gc
aggagaaagcuuaccauguacagcuucguguccgaggagaccggcacccugaucgucaacagcgugcuccuguuccuggccuucguggucuuccuccuggugacgcuggccauccucaccgcgcugcgcaugugcgccuacugcugcaacaucgugaacgucucccuggugaagcccagcuucuacguguacucccgggucaagaaccucaacagcucccgcgugccggaccugcuggugugaggacuaguuauaagacugacuagcccgaugggccucccaacgggcccuccuccccuccuugcaccgagauuaauaaaaaaaaaaaaaaaaaaaaaaaaaaaaaaaaaaaaaaaaaaaaaaaaaaaaaaaaaaaaaaaaugcaucccccccccccccccccccccccccccccccaaaggcucuuuucagagccaccagaauu

SEQ ID NO: 21348 - RNA, 445 nt, Artificial Sequence
  SARS-CoV-2__MT451171.1__envelope protein (E) mRNA gc
aggagaaagcuuaccauguacagcuucguguccgaggagaccggcacccugaucgucaacagcgugcuccuguuccuggccuucguggucuuccuccuggugacgcuggccauccucaccgcgcugcgccugugcgccuacugcugcaacaucgugaacgucucccucgugaagcccagcuucuacguguacucccgggucaagaaccugaacagcucccgcgugccggacuuccuggugugaggacuaguuauaagacugacuagcccgaugggccucccaacgggcccuccuccccuccuugcaccgagauuaauaaaaaaaaaaaaaaaaaaaaaaaaaaaaaaaaaaaaaaaaaaaaaaaaaaaaaaaaaaaaaaaaugcaucccccccccccccccccccccccccccccccaaaggcucuuuucagagccaccagaauu

SEQ ID NO: 21349 - RNA, 445 nt, Artificial Sequence
  SARS-CoV-2__MT350246.1__envelope protein (E) mRNA gc
aggagaaagcuuaccauguacagcuucguguccgaggagaccggcacccugaucgucaacagcgugcuccuguuccuggccuucguggucuuccuccuggugacgcuggccauccucaccgugcugcgccugugcgcguacugcugcaacaucgucaacgugucccucgugaagcccagcuucuacgucuacucccgggugaagaaccugaacagcucccgcgugccggaccugcucgucugaggacuaguuauaagacugacuagcccgaugggccucccaacgggcccuccuccccuccuugcaccgagauuaauaaaaaaaaaaaaaaaaaaaaaaaaaaaaaaaaaaaaaaaaaaaaaaaaaaaaaaaaaaaaaaaaugcaucccccccccccccccccccccccccccccccaaaggcucuuuucagagccaccagaauu

SEQ ID NO: 21350 - RNA, 445 nt, Artificial Sequence
  SARS-CoV-2__MT039890.1__envelope protein (E) mRNA gc
aggagaaagcuuaccauguacagcuucguguccgaggagaccggcacccugaucgucaacagcgugcuccuguuccuggccuucguggucuuccuccuggugacgcuggccauccucaccgcgcaccgccugugcgccuacugcugcaacaucgugaacgucucccuggugaagcccagcuucuacguguacucccgggucaagaaccucaacagcucccgcgugccggaccugcuggugugaggacuaguuauaagacugacuagcccgaugggccucccaacgggcccuccuccccuccuugcaccgagauuaauaaaaaaaaaaaaaaaaaaaaaaaaaaaaaaaaaaaaaaaaaaaaaaaaaaaaaaaaaaaaaaaaugcaucccccccccccccccccccccccccccccccaaaggcucuuuucagagccaccagaauu

SEQ ID NO: 21351 - RNA, 5884 nt, Artificial Sequence
  MERS-CoV/MERS-CoV-Jeddah-human-1__KF958702.1__non-structural protein 3 (NSP3) mRNA gc
aggagaaagcuuaccauggcccccgugaagaagguggccuucggcggggaccaggugcacgagguggcggccguccgcagcgugaccguggaguacaacauccacgccguccuggacacccuccuggccuccagcucccugcggacguucgugguggacaagagccucuccaucgaggaguucgccgacgucgugaaggagcaggucagcgaccugcuggugaagcuccugcgcggcaugccgauccccgacuucgaccuggacgacuucaucgacgcgcccugcuacugcuucaacgccgagggggacgccuccuggagcuccaccaugaucuucagccuccaccccguggagugcgacgaggagugcuccgagguggaggccagcgaccuggaggagggcgaguccgagugcaucagcgagaccuccaccgagcaggucgacgugagccacgagaucuccgacgacgagugggcggccgccguggacgaggccuucccgcuggacgaggccgaggacgucacggagagcgugcaggaggaggcgcagcccguggagguccccguggaggacaucgugcaggucgugaucgccgacacccuccaggagacccccgucguguccgacaccguggaggucccgccccagguggugaagcugcccagcgagccccagacgauccagccggaggucaaggagguggcccccguguacgaggccgacaccgagcagacccagagcgucaccgugaagcccaagcggcugcgcaagaagcggaacguggacccccucuccaacuucgagcacaaggucaucacggagugcgugaccaucgugcugggggacgccauccaggucgcgaagugcuacggcgagagcgugcuggugaacgccgccaacacccaccucaagcacggcgggggcaucgccggggccaucaacgcggccuccaagggcgccguccagaaggagagcgacgaguacauccuggccaaggggccgcuccaggugggcgacuccgugcugcugcagggccacagccuggccaagaacauccuccacgucguggggcccgacgcgcgcgccaagcaggacgugucccugcugagcaagugcuacaaggccaugaacgccuacccccucgucgugacgccccugguguccgcgggcaucuucggggucaagccggccgugagcuucgacuaccugauccgggaggccaagacccgcgugcucgucguggugaacucccaggacgucuacaagagccugaccaucguggacaucccccagucccugaccuucagcuacgacggccuccggggcgccauccgcaaggccaaggacuacggguucaccguguucgucugcacggacaacuccgcgaacaccaaggugcugcggaacaagggcguggacuacaccaagaaguuccugaccgucgacggggugcaguacuacugcuacacgagcaaggacacccucgacgacauccugcagcaggccaacaaguccgugggcaucaucagcaugccccugggguacgucucccacggccucgaccugauccaggccggcagcguggugcgccgggucaacgugcccuacgugugccugcucgccaacaaggagcaggaggccauccugaugagcgaggacgucaagcugaacccguccgaggacuucaucaagcacgugcgcaccaacgggggcuacaacagcuggcaccucguggagggggagcugcugguccaggaccugcggcucaacaagcugcugcacugguccgaccagaccaucugcuacaaggacagcguguucuacgucgugaagaacuccacggcguuccccuucgagacccucagcgccugccgcgccuaccuggacucccggaccacccagcagcugacgaucgaggugcucgucaccguggacggcgugaacuuccgcaccgucgugcugaacaacaagaacaccuaccggagccagcuggggugcguguucuucaacggcgccgacaucuccgacacgauccccgacgagaagcagaacggccacagccucuaccuggccgacaaccugaccgcggacgagaccaaggcccucaaggagcuguacgggcccgucgacccgaccuuccugcaccgcuucuacucccucaaggccgccgugcacgaguggaagaugguggucugcgacaaggugcggagccugaagcuguccgacaacaacugcuaccucaacgcggugaucaugacccuggaccugcucaaggacaucaaguucgucauccccgcccugcagcacgccuucaugaagcacaagggcggggacagcacggacuucaucgcccugaucauggccuacggcaacugcaccuucggggcgcccgacgacgccucccgccuccugcacaccgugcuggccaaggccgagcucugcugcagcgcccgcaugguguggcgggaguggugcaacgucugcggcaucaaggacguggugcugcagggccugaaggcgugcugcuacgucggggugcagaccguggaggaccuccgcgcccggaugacguacgucugccagugcggcggggagcgccaccggcagaucguggagcacaccaccccguggcugcugcucuccggcacccccaacgagaagcuggugacgaccagcaccgcccccgacuucgucgccuucaacguguuccagggcaucgagaccgccguggggcacuacguccacgcgcgccugaagggcgggcucauccugaaguucgacagcggcacgguguccaagaccagcgacuggaagugcaaggugaccgacguccuguuccccgggcagaaguacuccagcgacugcaacguggugcgguacucccucgacggcaacuuccgcaccgaggucgacccggaccugagcgccuucuacgugaaggacggcaaguacuucacguccgagccgcccgugaccuacagccccgccaccauccuggccggguccgucuacaccaacagcugccucguguccagcgacggccagcccgggggcgacgcgaucucccugagcuucaacaaccugcucggguucgacuccagcaagcccgugaucaagaaguacacguacuccuuccugcccaaggaggacggcgacguccugcucgccgaguucgacaccuacgaccccaucuacaagaacggcgccauguacaaggggaagccgauccugugggugaacaaggccagcuacgacaccaaccugaacaaguucaaccgggccucccuccgccagaucuucgacguggcgcccaucgagcuggagaacaaguucacgccccugagcgucgagagcacccccguggagccgcccaccguggacgucguggcccuccagcaggagaugaccaucgugaagugcaagggccugaacaagcccuucgucaaggacaacguguccuucgucgccgacgacagcgggacccccgugguggaguaccuguccaaggaggaccuccacacgcuguacgucgacccgaaguaccaggugaucgugcugaaggacaacguccucagcuucaugcugcggcugcacaccguggaguccggcgacaucaacguggucgccgccagcgggucccucacccgcaaggugaagcugcuguuccgggcgagcuucuacuucaaggaguucgccacccgcacguucaccgccaccaccgccgugggcuccugcaucaagagcgucgugcggcaccucggcgugacgaaggggauccugaccggcugcuucuccuucgucaagaugcuguucaugcucccccuggccuacuucagcgacuccaagcuggggaccaccgaggugaaggugagcgcgcucaagaccgccggcgucgugacggggaacguggucaagcagugcugcaccgccgccguggaccuguccauggacaagcugcgccggguggacuggaaguccacccuccgccugcugcucaugcugugcaccacgaugguccugcucagcagcguguaccaccuguacguguucaaccagguccuguccagcgacgugauguucgaggacgcccagggccucaagaaguucuacaaggaggugcgggcguaccugggcaucagcuccgccugcgacgggcuggccagcgccuaccgcgcgaacuccuucgacguccccaccuucugcgccaaccgcagcgccaugugcaacuggugccucaucucccaggacagcaucacccacuaccccgcccugaagauggugcagacccaccugucccacuacgugcucaacaucgacuggcugugguucgccuucgagacgggccuggcguacaugcucuacaccagcgccuucaacuggcugcugcucgccgggacccugcacuacuucuucgcccagaccuccaucuucgucgacuggcggagcuacaacuacgccguguccagcgcguucuggcuguucacgcacaucccgauggccggccuggugcgcauguacaaccuccuggccugccuguggcuccugcggaaguucuaccagcacgucaucaacggcugcaaggacaccgccugccugcucugcuacaagcgcaaccggcugacccgcguggaggccuccaccguggucugcgggggcaagcggacguucuacaucaccgcgaacgggggcaucagcuucugccgccggcacaacuggaacugcguggacugcgacaccgccggggugggcaacaccuucaucugcgaggaggucgccaacgaccugacgaccgcccuccgccggcccaucaacgcgaccgaccgcucccacuacuacguggacagcgugaccgucaaggagacgguggugcaguucaacuaccggcgcgacggccagcccuucuacgagcgguucccgcugugcgccuucaccaaccuggacaagcucaaguucaaggaggucugcaagaccaccacggggauccccgaguacaacuucaucaucuacgacuccagcgaccgcggccaggagucccuggcccggagcgccugcguguacuacagccaggugcugugcaaguccauccuccuggucgacagcucccuggugaccagcgucggggacuccagcgagaucgccaccaagauguucgacuccuucgugaacagcuucgugucccucuacaacgucacccgcgacaagcuggagaagcugaucagcacggcgcgggacggcgugcgccgcggggacaacuuccacuccgugcucaccaccuucaucgacgccgcccggggccccgccggcgucgagagcgacguggagaccaacgagaucguggacuccguccaguacgcccacaagcacgacauccagaucacgaacgagagcuacaacaacuacgugcccuccuacgugaagccggacagcgucuccaccagcgaccuggggucccugaucgacugcaacgcggccagcgugaaccagaucgugcuccgcaacagcaacggcgccugcaucuggaacgccgccgcguacaugaagcuguccgacgcccugaagcggcagauccgcaucgccugccggaagugcaaccucgccuuccgccugaccaccagcaagcugcgggcgaacgacaacauccucuccguccgcuucacggccaacaagaucgucgggggcugaggacuaguuauaagacugacuagcccgaugggccucccaacgggcccuccuccccuccuugcaccgagauuaauaaaaaaaaaaaaaaaaaaaaaaaaaaaaaaaaaaaaaaaaaaaaaaaaaaaaaaaaaaaaaaaaugcaucccccccccccccccccccccccccccccccaaaggcucuuuucagagccaccagaauu

SEQ ID NO: 21352 - RNA, 5884 nt, Artificial Sequence
  MERS-CoV/Al-Hasa_4_2013__KF186564.1__non-structural protein 3 (NSP3) mRNA gc
aggagaaagcuuaccauggcccccgugaagaaggucgccuucggcggggaccaggugcacgagguggcggccguccgcagcgugaccguggaguacaacauccacgccguccuggacacccuccuggccuccagcucccugcggacguucgugguggacaagagccucuccaucgaggaguucgccgacgucgugaaggagcaggucagcgaccugcuggugaagcuccugcgcggcaugccgauccccgacuucgaccuggacgacuucaucgacgcgcccugcuacugcuucaacgccgagggggacgccuccuggagcuccaccaugaucuucagccuccaccccguggagugcgacgaggagugcuccgagguggaggccagcgaccuggaggagggcgaguccgagugcaucagcgagaccuccaccgagcaggucgacgugagccacgagguguccgacgacgagugggcggccgccgucgacgaggccuucccgcuggacgaggccgaggacgugacggagagcgugcaggaggaggcgcagcccgucgaggugcccguggaggacaucgcccaggucgugaucgccgacacccuccaggagacccccgucguguccgacaccguggaggucccgccccagguggugaagcugcccagcgagccccagacgauccagccggaggucaaggagguggcccccguguacgaggccgacaccgagcagacccagagcgucaccgugaagcccaagcggcugcgcaagaagcggaacguggacccccucuccaacuucgagcacaaggucaucacggagugcgugaccaucgugcugggggacgcgauccaggucgccaagugcuacggcgagagcgugcuggugaacgccgccaacacccaccucaagcacggcgggggcaucgccggggcgaucaacgccgccuccaagggcgccguccagaaggagagcgacgaguacauccuggccaaggggccgcuccaggugggcgacuccgugcugcugcagggccacagccuggcgaagaacauccuccacgucguggggcccgacgcccgcgccaagcaggacgugucccugcugagcaagugcuacaaggccaugaacgcguacccccucgucgugacgccccugguguccgccggcaucuucggggucaagccggccgugagcuucgacuaccugauccgggaggccaagacccgcgugcucgucguggugaacucccaggacgucuacaagagccugaccaucguggacaucccccagucccugaccuucagcuacgacggccuccggggcgccauccgcaaggcgaaggacuacggguucaccguguucgucugcacggacaacuccgccaacaccaaggugcugcggaacaagggcguggacuacaccaagaaguuccugaccgucgacggggugcaguacuacugcuacacgagcaaggacacccucgacgacauccugcagcaggccaacaaguccgugggcaucaucagcaugccccugggguacgucucccacggccucgaccugauccaggccggcagcguggugcgccgggucaacgugcccuacgugugccugcucgccaacaaggagcaggaggcgauccugaugagcgaggacgucaagcugaacccguccgaggacuucaucaagcacgugcgcaccaacgggggcuacaacagcuggcaccucguggagggggagcugcugguccaggaccugcggcucaacaagcugcugcacugguccgaccagaccaucugcuacaaggacagcguguucuacgucgugaagaacuccacggccuuccccuucgagacccucagcgccugccgcgccuaccuggacucccggaccacccagcagcugacgaucgaggugcucgucaccguggacggcgugaacuuccgcaccgucgugcugaacaacaagaacaccuaccggagccagcuggggugcguguucuucaacggcgccgacaucuccgacacgauccccgacgagaagcagaacggccacagccucuaccuggcggacaaccugaccgccgacgagaccaaggcccucaaggagcuguacgggcccgucgacccgaccuuccugcaccgcuucuacucccucaaggccgcggugcacaaguggaagaugguggucugcgacaaggugcggagccugaagcuguccgacaacaacugcuaccucaacgccgugaucaugacccuggaccugcucaaggacaucaaguucgucauccccgcccugcagcacgccuucaugaagcacaagggcggggacagcacggacuucaucgcccugaucauggcguacggcaacugcaccuucgggucccccgacgacgccagccgccuccugcacaccgugcuggccaaggccgagcucugcugcuccgcccgcaugguguggcgggaguggugcaacgucugcggcaucaaggacguggugcugcagggccugaaggcgugcugcuacgucggggugcagaccguggaggaccuccgcgcccggaugacguacgucugccagugcggcggggagcgccaccggcagaucguggagcacaccaccccguggcugcugcucagcggcacccccaacgagaagcuggugacgaccagcaccgcccccgacuucgucgccuucaacguguuccagggcaucgagaccgccguggggcacuacguccacgcgcgccugaagggcgggcucauccugaaguucgacuccggcacggugagcaagaccuccgacuggaagugcaaggugaccgacguccuguuccccgggcagaaguacagcuccgacugcaacguggugcgguacagccucgacggcaacuuccgcaccgaggucgacccggaccuguccgccuucuacgugaaggacggcaaguacuucacgagcgagccgcccgugaccuacucccccgccaccauccuggccgggagcgucuacaccaacuccugccucgugagcuccgacggccagcccgggggcgacgcgaucagccuguccuucaacaaccugcucggguucgacagcuccaagcccgugacgaagaaguacaccuacagcuuccugcccaaggaggacggcgacguccugcucgccgaguucgacaccuacgaccccaucuacaagaacggcgccauguacaaggggaagccgauccugugggugaacaaggccuccuacgacaccaaccugaacaaguucaaccgggccagccuccgccagaucuucgacguggcgcccaucgagcuggagaacaaguucacgccccugagcgucgaguccacccccguggagccgcccaccguggacgucguggcccuccagcaggagaugaccaucgugaagugcaagggccugaacaagcccuucgucaaggacaacgugagcuucgucgccgacgacuccgggacgcccgugguggaguaccugagcaaggaggaccuccacacccuguacgucgacccgaaguaccaggugaucgugcugaaggacaacguccucuccagcaugcugcggcugcacaccguggaguccggcgacaucaacguggucgccgccagcgggucccucacccgcaaggugaagcugcuguuccgggcgagcuucuacuucaaggaguucgccacgcgcaccuucaccgccaccacggccgugggcuccugcaucaagagcgucgugcggcaccucggcgugaccaaggggauccugaccggcugcuucuccuucgucaagaugcuguucaugcucccccuggccuacuucagcgacuccaagcuggggaccaccgaggugaaggugagcgcgcucaagacggccggcgucgugaccgggaacguggucaagcagugcugcaccgccgccguggaccuguccauggacaagcugcgccggguggacuggaaguccacccuccgccugcugcucaugcugugcacgaccaugguccugcucagcagcguguaccaccuguacguguucaaccagguccugagcuccgacgugauguucgaggacgcccagggccucaagaaguucuacaaggaggugcgggcguaccugggcaucagcuccgccugcgacgggcuggccagcgccuaccgcgcgaacuccuucgacguccccaccuucugcgccaaccgcagcgccaugugcaacuggugccucaucucccaggacagcaucacccacuaccccgcccugaagauggugcagacgcaccugucccacuacgugcucaacaucgacuggcugugguucgccuucgagaccggccuggcguacaugcucuacaccagcgccuucaacuggcugcugcucgccgggacccugcacuacuucuucgcccagacguccaucuucgucgacuggcggagcuacaacuacgccguguccagcgcguucuggcuguucacccacaucccgauggccggccuggugcgcauguacaaccuccuggccugccuguggcuccugcggaaguucuaccagcacgucaucaacggcugcaaggacaccgccugccugcucugcuacaagcgcaaccggcugacccgcguggaggccuccacgguggucugcgggggcaagcggaccuucuacaucaccgcgaacgggggcaucagcuucugccgccggcacaacuggaacugcguggacugcgacaccgccggggugggcaacacguucaucugcgaggaggucgccaacgaccugaccaccgcccuccgccggcccaucaacgcgaccgaccgcucccacuacuacguggacagcgugacggucaaggagaccguggugcaguucaacuaccggcgcgacggccagcccuucuacgagcgguucccgcugugcgccuucaccaaccuggacaagcucaaguucaaggaggucugcaagaccacgaccgggauccccgaguacaacuucaucaucuacgacuccagcgaccgcggccaggagagccuggcccgguccgccugcguguacuacagccaggugcugugcaaguccauccuccuggucgacagcucccugaucaccagcgugggggacuccagcgagaucgccaccaagauguucgacuccuucgucaacagcuucgugucccucuacaacgugacgcgcgacaagcuggagaagcugaucagcaccgcgcgggacggcguccgccgcggggacaacuuccacuccgugcucaccaccuucaucgacgccgcccggggccccgccggcguggagagcgacgucgagacgaacgagaucguggacuccgugcaguacgcccacaagcacgacauccagaucaccaacgagagcuacaacaacuacguccccuccuacgugaagccggacagcguguccaccagcgaccuggggagccugaucgacugcaacgcggccuccgucaaccagaucgugcuccgcaacagcaacggcgccugcaucuggaacgccgccgcguacaugaagcuguccgacgcccugaagcggcagauccgcaucgccugccggaagugcaaccucgccuuccgccugaccacgagcaagcugcgggcgaacgacaacauccucuccgugcgcuucaccgccaacaagaucgucgggggcugaggacuaguuauaagacugacuagcccgaugggccucccaacgggcccuccuccccuccuugcaccgagauuaauaaaaaaaaaaaaaaaaaaaaaaaaaaaaaaaaaaaaaaaaaaaaaaaaaaaaaaaaaaaaaaaaugcaucccccccccccccccccccccccccccccccaaaggcucuuuucagagccaccagaauu

SEQ ID NO: 21353 - RNA, 5884 nt, Artificial Sequence
  MERS-CoV/Riyadh_14_2013__KJ156934.1__non-structural protein 3 (NSP3) mRNA gc
aggagaaagcuuaccauggcccccgugaagaagguggccuucggcggggaccaggugcacgagguggcggccguccgcagcgugaccguggaguacaacauccacgccguccuggacacccuccuggccuccagcucccugcggacguucgugguggacaagagccucuccaucgaggaguucgccgacgucgugaaggagcaggucagcgaccugcuggugaagcuccugcgcggcaugccgauccccgacuucgaccuggacgacuucaucgacgcgcccugcuacugcuucaacgccgagggggacgccuccugguacagcaccaugaucuucucccuccaccccguggagugcgacgaggagugcagcgagguggaggccuccgaccuggaggagggcgagagcgagugcaucuccgagaccagcaccgagcaggucgacgugucccacgaggugagcgacgacgagugggcggccgccgucgacgaggccuucccgcuggacgaggccgaggacgugacggaguccgugcaggaggaggcgcagcccgucgaggugcccguggaggacaucgcccaggucgugaucgccgacacccuccaggagacccccgucgugagcgacaccguggaggucccgccccagguggugaagcugcccuccgagccccagacgauccagccggaggucaaggagguggcccccguguacgaggccgacaccgagcagacccagagcgucaccgugaagcccaagcggcugcgcaagaagcggaacguggacccccucagcaacuucgagcacaaggucaucacggagugcgugaccaucgugcugggggacgcgauccaggucgccaagugcuacggcgaguccgugcuggugaacgccgccaacacccaccucaagcacggcgggggcaucgccggggcgaucaacgccgccagcaagggcgccguccagaaggaguccgacgaguacauccuggccaaggggccgcuccaggugggcgacagcgugcugcugcagggccacucccuggcgaagaacauccuccacgucguggggcccgacgcccgcgccaagcaggacgugagccugcuguccaagugcuacaaggccaugaacgcguacccccucgucgugacgccccuggugagcgccggcaucuucggggucaagccggccguguccuucgacuaccugauccgggaggccaagacccgcgugcucgucguggugaacagccaggacgucuacaagucccugaccaucguggacaucccccagagccugaccuucuccuacgacggccuccggggcgccauccgcaaggcgaaggacuacggguucaccguguucgucugcacggacaacagcgccaacaccaaggugcugcggaacaagggcguggacuacaccaagaaguuccugaccgucgacggggugcaguacuacugcuacacguccaaggacacccucgacgacauccugcagcaggccaacaagagcgugggcaucaucuccaugccccugggguacgucagccacggccucgaccugauccaggccggcuccguggugcgccgggucaacgugcccuacgugugccugcucgccaacaaggagcaggaggcgauccugaugagcgaggacgucaagcugaacccgagcgaggacuucaucaagcacgugcgcaccaacgggggcuacaacuccuggcaccucguggagggggagcugcugguccaggaccugcggcucaacaagcugcugcacuggagcgaccagaccaucugcuacaaggacuccguguucuacgucgugaagaacagcacggccuuccccuucgagacccucuccgccugccgcgccuaccuggacagccggaccacccagcagcugacgaucgaggugcucgucaccguggacggcgugaacuuccgcaccgucgugcugaacaacaagaacaccuaccggucccagcuggggugcguguucuucaacggcgccgacaucagcgacacgauccccgacgagaagcagaacggccacucccucuaccuggcggacaaccugaccgccgacgagaccaaggcccucaaggagcuguacgggcccgucgacccgaccuuccugcaccgcuucuacagccucaaggccgcggugcacaaguggaagaugguggucugcgacaaggugcggucccugaagcugagcgacaacaacugcuaccucaacgccgugaucaugacccuggaccugcucaaggacaucaaguucgucauccccgcccugcagcacgccuucaugaagcacaagggcggggacuccacggacuucaucgcccugaucauggcguacggcaacugcaccuucggggcccccgacgacgccagccgccuccugcacaccgugcuggccaaggccgagcucugcugcuccgcgcgcaugguguggcgggaguggugcaacgucugcggcaucaaggacguggugcugcagggccugaaggccugcugcuacgucggggugcagaccguggaggaccuccgcgcccggaugacguacgucugccagugcggcggggagcgccaccggcagaucguggagcacaccaccccguggcugcugcucagcggcacccccaacgagaagcuggugacgaccuccaccgcccccgacuucgucgccuucaacguguuccagggcaucgagaccgcgguggggcacuacguccacgcccgccugaagggcgggcucauccugaaguucgacagcggcacggugagcaagaccuccgacuggaagugcaaggugaccgacguccuguuccccgggcagaaguacagcuccgacugcaacguggugcgguacagccucgacggcaacuuccgcaccgaggucgacccggaccuguccgccuucuacgugaaggacggcaaguacuucacgagcgagccgcccgugaccuacucccccgccaccauccuggcggggagcgucuacaccaacuccugccucgugagcuccgacggccagcccgggggcgacgccaucagccuguccuucaacaaccugcucggguucgacagcuccaagcccgugacgaagaaguacaccuacagcuuccugcccaaggaggacggcgacguccugcucgccgaguucgacaccuacgaccccaucuacaagaacggcgccauguacaaggggaagccgauccugugggugaacaaggccuccuacgacaccaaccugaacaaguucaaccgggcgagccuccgccagaucuucgacguggcccccaucgagcuggagaacaaguucacgccccuguccgucgagagcacccccguggagccgcccaccguggacgucguggcccuccagcaggagaugaccaucgugaagugcaagggccugaacaagcccuucgucaaggacaacgugagcuucgucgccgacgacuccgggacgcccgugguggaguaccugagcaaggaggaccuccacacccuguacgucgacccgaaguaccaggugaucgugcugaaggacaacguccucuccagcaugcugcggcugcacaccguggaguccggcgacaucaacguggucgccgcgagcgggucccucacccgcaaggugaagcugcuguuccgggccagcuucuacuucaaggaguucgccacgcgcaccuucaccgccaccacggccgugggcuccugcaucaagagcgucgugcggcaccucggcgugaccaaggggauccugaccggcugcuucuccuucgucaagaugcuguucaugcucccccuggcguacuucagcgacuccaagcuggggaccaccgaggugaaggugagcgcccucaagacggccggcgucgugaccgggaacguggucaagcagugcugcaccgccgccguggaccuguccauggacaagcugcgccggguggacuggaaguccacccuccgccugcugcucaugcugugcacgaccaugguccugcucagcagcguguaccaccuguacguguucaaccagguccuguccagcgacgugauguucgaggacgcgcagggccucaagaaguucuacaaggaggugcgggccuaccugggcaucagcuccgccugcgacgggcuggccagcgcguaccgcgccaacuccuucgacguccccaccuucugcgccaaccgcagcgccaugugcaacuggugccucaucucccaggacagcaucacccacuaccccgcccugaagauggugcagacgcaccugucccacuacgugcucaacaucgacuggcugugguucgcguucgagaccggccuggccuacaugcucuacaccagcgccuucaacuggcugcugcucgccgggacccugcacuacuucuucgcccagacguccaucuucgucgacuggcggagcuacaacuacgcgguguccagcgccuucuggcuguucacccacaucccgauggccggccuggugcgcauguacaaccuccuggccugccuguggcuccugcggaaguucuaccagcacgucaucaacggcugcaaggacaccgccugccugcucugcuacaagcgcaaccggcugacccgcguggaggcguccacgguggucugcgggggcaagcggaccuucuacaucaccgccaacgggggcaucagcuucugccgccggcacaacuggaacugcguggacugcgacaccgccggggugggcaacacguucaucugcgaggaggucgccaacgaccugaccaccgcgcuccgccggcccaucaacgccaccgaccgcucccacuacuacguggacagcgugacggucaaggagaccguggugcaguucaacuaccggcgcgacggccagcccuucuacgagcgguucccgcugugcgccuucaccaaccuggacaagcucaaguucaaggaggucugcaagaccacgaccgggauccccgaguacaacuucaucaucuacgacuccagcgaccgcggccaggagucccuggcccggagcgccugcguguacuacagccaggugcugugcaaguccauccuccuggucgacagcucccuggugaccagcgucggggacuccagcgagaucgcgaccaagauguucgacuccuucgugaacagcuucgugucccucuacaacgucacgcgcgacaagcuggagaagcugaucagcaccgcccgggacggcgugcgccgcggggacaacuuccacuccgugcucaccaccuucaucgacgccgcccggggccccgccggcgucgagagcgacguggagacgaacgagaucguggacuccguccaguacgcgcacaagcacgacauccagaucaccaacgagagcuacaacaacuacgugcccuccuacgugaagccggacagcgucuccaccagcgaccuggggucccugaucgacugcaacgccgccagcgugaaccagaucgugcuccgcaacagcaacggcgccugcaucuggaacgccgcggccuacaugaagcuguccgacgcccugaagcggcagauccgcaucgccugccggaagugcaaccucgcguuccgccugaccacgagcaagcugcgggccaacgacaacauccucuccguccgcuucaccgccaacaagaucgucgggggcugaggacuaguuauaagacugacuagcccgaugggccucccaacgggcccuccuccccuccuugcaccgagauuaauaaaaaaaaaaaaaaaaaaaaaaaaaaaaaaaaaaaaaaaaaaaaaaaaaaaaaaaaaaaaaaaaugcaucccccccccccccccccccccccccccccccaaaggcucuuuucagagccaccagaauu

SEQ ID NO: 21354 - RNA, 5884 nt, Artificial Sequence
  MERS-CoV/England 1__NC_038294.1__non-structural protein 3 (NSP3) mRNA gc
aggagaaagcuuaccauggcccccgugaagaaggucgccuucggcggggaccaggugcacgagguggcggccguccgcagcgugaccguggaguacaacauccacgccguccuggacacccuccuggccuccagcucccugcggacguucgugguggacaagagccucuccaucgaggaguucgccgacgucgugaaggagcaggucagcgaccugcuggugaagcuccugcgcggcaugccgauccccgacuucgaccuggacgacuucaucgacgcgcccugcuacugcuucaacgccgagggggacgccuccuggagcuccaccaugaucuucagccuccaccccguggagugcgacgaggagugcuccgagguggaggccagcgaccuggaggagggcgaguccgagugcaucagcgagaccuccaccgagcaggucgacgugagccacgagaucuccgacgacgagugggcggccgccguggacgaggccuucccgcuggacgaggccgaggacgucacggagagcgugcaggaggaggcgcagcccguggagguccccguggaggacaucgcccagguggucaucgccgacacccuccaggagacccccguggucuccgacaccguggaggugccgccccaggucgugaagcugcccagcgagccccagacgauccagccggaggugaaggaggucgcccccguguacgaggccgacaccgagcagacccagagcgugaccgucaagcccaagcggcugcgcaagaagcggaacguggacccccucuccaacuucgagcacaaggugaucacggagugcgucaccaucgugcugggggacgcgauccagguggccaagugcuacggcgagagcguccuggugaacgccgccaacacccaccucaagcacggcgggggcaucgccggggcgaucaacgccgccuccaagggcgccgugcagaaggagagcgacgaguacauccuggccaaggggccgcugcaggucggcgacuccgugcuccugcagggccacagccuggcgaagaacauccuccacguggucgggcccgacgcccgcgccaagcaggacgugucccugcugagcaagugcuacaaggccaugaacgcguacccccucguggucacgccccugguguccgccggcaucuucggggugaagccggccgucagcuucgacuaccugauccgggaggccaagacccgcgugcucguggucgugaacucccaggacguguacaagagccugaccaucgucgacaucccccagucccugaccuucagcuacgacggccuccggggcgccauccgcaaggcgaaggacuacggguucaccguguucgugugcacggacaacuccgccaacaccaagguccugcggaacaagggcguggacuacaccaagaaguuccugaccguggacgggguccaguacuacugcuacacgagcaaggacacccucgacgacauccugcagcaggccaacaaguccgugggcaucaucagcaugccccugggguacgugucccacggccucgaccugauccaggccggcagcgucgugcgccgggugaacguccccuacgugugccugcucgccaacaaggagcaggaggcgauccugaugagcgaggacgugaagcugaacccguccgaggacuucaucaagcacguccgcaccaacgggggcuacaacagcuggcaccucguggagggggagcugcuggugcaggaccugcggcucaacaagcugcugcacugguccgaccagaccaucugcuacaaggacagcgucuucuacguggucaagaacuccacggccuuccccuucgagacccucagcgccugccgcgccuaccuggacucccggaccacccagcagcugacgaucgaggugcucgugaccgucgacggcgugaacuuccgcaccgugguccugaacaacaagaacaccuaccggagccagcuggggugcguguucuucaacggcgccgacaucuccgacacgauccccgacgagaagcagaacggccacagccucuaccuggcggacaaccugaccgccgacgagaccaaggcccucaaggagcuguacgggcccguggacccgaccuuccugcaccgcuucuacucccucaaggccgcgguccacaaguggaagaugguggugugcgacaagguccggagccugaagcuguccgacaacaacugcuaccucaacgccgugaucaugacccuggaccugcucaaggacaucaaguucgugauccccgcccugcagcacgccuucaugaagcacaagggcggggacagcacggacuucaucgcccugaucauggcguacggcaacugcaccuucggggcccccgacgacgccucccgccuccugcacaccguccuggccaaggccgagcucugcugcagcgcgcgcaugguguggcgggaguggugcaacgugugcggcaucaaggacgucgugcugcagggccugaaggccugcugcuacguggggguccagaccguggaggaccuccgcgcccggaugacguacgugugccagugcggcggggagcgccaccggcagaucgucgagcacaccaccccguggcugcugcucuccggcacccccaacgagaagcuggugacgaccagcaccgcccccgacuucguggccuucaacgucuuccagggcaucgagaccgcgguggggcacuacgugcacgcccgccugaagggcgggcucauccugaaguucgacagcggcacggucuccaagaccagcgacuggaagugcaaggugaccgacgugcuguuccccgggcagaaguacuccagcgacugcaacgucgugcgguacucccucgacggcaacuuccgcaccgagguggacccggaccugagcgccuucuacgucaaggacggcaaguacuucacguccgagccgcccgugaccuacagccccgccaccauccuggcgggguccguguacaccaacagcugccucgucuccagcgacggccagcccgggggcgacgccaucucccugagcuucaacaaccugcucggguucgacuccagcaagcccgugacgaagaaguacaccuacuccuuccugcccaaggaggacggcgacgugcugcucgccgaguucgacaccuacgaccccaucuacaagaacggcgccauguacaaggggaagccgauccugugggucaacaaggccagcuacgacaccaaccugaacaaguucaaccgggcgucccuccgccagaucuucgacguggcccccaucgagcuggagaacaaguucacgccccugagcguggagagcacccccgucgagccgcccaccguggacguggucgcccuccagcaggagaugaccaucgugaagugcaagggccugaacaagcccuucgugaaggacaacgucuccuucguggccgacgacagcgggacgcccgucguggaguaccuguccaaggaggaccuccacacccuguacguggacccgaaguaccaggucaucgugcugaaggacaacgugcucagcuccaugcugcggcugcacaccgucgagagcggcgacaucaacgugguggccgcguccgggagccucacccgcaaggucaagcugcuguuccgggccuccuucuacuucaaggaguucgccacgcgcaccuucaccgccaccacggccgugggcagcugcaucaaguccgugguccggcaccucggcgugaccaaggggauccugaccggcugcuucagcuucgugaagaugcuguucaugcucccccuggcguacuucuccgacagcaagcuggggaccaccgaggucaagguguccgcccucaagacggccggcguggucaccgggaacguggugaagcagugcugcaccgccgccgucgaccugagcauggacaagcugcgccggguggacuggaaguccacccuccgccugcugcucaugcugugcacgaccauggugcugcucagcuccgucuaccaccuguacguguucaaccaggugcugagcagcgacgucauguucgaggacgcgcagggccucaagaaguucuacaaggaggugcgggccuaccugggcaucuccagcgccugcgacgggcuggccuccgcguaccgcgccaacagcuucgacgugcccaccuucugcgccaaccgcuccgccaugugcaacuggugccucaucagccaggacuccaucacccacuaccccgcccugaagaugguccagacgcaccugagccacuacgugcucaacaucgacuggcugugguucgcguucgagaccggccuggccuacaugcucuacaccuccgccuucaacuggcugcugcucgccgggacccugcacuacuucuucgcccagacgagcaucuucguggacuggcgguccuacaacuacgcggucagcuccgccuucuggcuguucacccacaucccgauggccggccuggugcgcauguacaaccuccuggccugccuguggcuccugcggaaguucuaccagcacgugaucaacggcugcaaggacaccgccugccugcucugcuacaagcgcaaccggcugacccgcgucgaggcgagcacgguggugugcgggggcaagcggaccuucuacaucaccgccaacgggggcaucuccuucugccgccggcacaacuggaacugcgucgacugcgacaccgccggggugggcaacacguucaucugcgaggagguggccaacgaccugaccaccgcgcuccgccggcccaucaacgccaccgaccgcagccacuacuacgucgacuccgugacggugaaggagaccgucgugcaguucaacuaccggcgcgacggccagcccuucuacgagcgguucccgcugugcgccuucaccaaccuggacaagcucaaguucaaggaggugugcaagaccacgaccgggauccccgaguacaacuucaucaucuacgacagcuccgaccgcggccaggagagccuggcccggagcgccugcgucuacuacucccaggugcugugcaagagcauccuccugguggacuccagccuggucaccuccgugggggacagcuccgagaucgcgaccaagauguucgacagcuucgucaacuccuucgugagccucuacaacgugacgcgcgacaagcuggagaagcugaucuccaccgcccgggacggcguccgccgcggggacaacuuccacagcgugcucaccaccuucaucgacgccgcccggggccccgccggcguggaguccgacgucgagacgaacgagaucguggacagcgugcaguacgcgcacaagcacgacauccagaucaccaacgaguccuacaacaacuacguccccagcuacgugaagccggacuccgugagcaccuccgaccuggggagccugaucgacugcaacgccgccagcgucaaccagaucgugcuccgcaacuccaacggcgccugcaucuggaacgccgcggccuacaugaagcugagcgacgcccugaagcggcagauccgcaucgccugccggaagugcaaccucgcguuccgccugaccacguccaagcugcgggccaacgacaacauccucagcgugcgcuucaccgccaacaagaucgucgggggcugaggacuaguuauaagacugacuagcccgaugggccucccaacgggcccuccuccccuccuugcaccgagauuaauaaaaaaaaaaaaaaaaaaaaaaaaaaaaaaaaaaaaaaaaaaaaaaaaaaaaaaaaaaaaaaaaugcaucccccccccccccccccccccccccccccccaaaggcucuuuucagagccaccagaauu

SEQ ID NO: 21355 - RNA, 5989 nt, Artificial Sequence
  SARS-CoV/Tor2__NC_004718.3__non-structural protein 3 (NSP3) mRNA gc
aggagaaagcuuaccauggcccccaucaagggcgugaccuucggggaggacaccgucugggaggugcagggcuacaagaacgugcgcaucacguucgagcuggacgagcgggucgacaaggugcucaacgagaagugcagcguguacaccgucgaguccgggaccgaggugaccgaguucgccugcguggucgcggaggccguggugaagacgcugcagccggucagcgaccugcucaccaacaugggcaucgaccuggacgagugguccguggccaccuucuaccuguucgacgacgccggggaggagaacuucagcucccgcauguacugcagcuucuacccgcccgacgaggaggaggaggacgacgccgagugcgaggaggaggagaucgacgagaccugcgagcacgaguacggcacggaggacgacuaccagggccucccccuggaguucggggcguccgccgagaccgugcgggucgaggaggaggaggaggaggacuggcuggacgacaccaccgagcagagcgagaucgagcccgagcccgagcccacgcccgaggagccggugaaccaguucaccggcuaccucaagcugaccgacaacguggccaucaagugcgucgacaucgugaaggaggcccaguccgcgaaccccauggugaucgucaacgccgccaacauccaccugaagcacgggggcgggguggccggcgcccucaacaaggcgaccaacggcgccaugcagaaggagagcgacgacuacaucaagcugaacgggccccugacggugggcggguccugccuccugagcggccacaaccuggccaagaagugccuccacgucgugggccccaaccugaacgccggggaggacauccagcugcucaaggccgcguacgagaacuucaacucccaggacauccugcuggccccgcuccugagcgccggcaucuucggggccaagccccugcagucccuccaggucugcgugcagaccgugcgcacccaggucuacaucgccgugaacgacaaggcgcuguacgagcaggucgucauggacuaccuggacaaccucaagccccggguggaggcccccaagcaggaggagccgcccaacaccgaggacagcaagacggaggagaaguccgugguccagaagcccguggacgugaagcccaagaucaaggccugcaucgacgaggucaccaccacccuggaggagacgaaguuccugaccaacaagcuccugcuguucgccgacaucaacggcaagcucuaccacgacagccagaacaugcugcgcggggaggacauguccuuccuggagaaggacgccccguacauggugggcgacgugaucaccagcggcgacaucacgugcgucgugauccccagcaagaaggccgggggcacgaccgagaugcucucccgggcgcugaagaaggugcccgucgacgaguacaucaccaccuaccccgggcagggcugcgccggguacacgcuggaggaggccaagaccgcgcucaagaagugcaagagcgccuucuacgugcugccguccgaggcccccaacgccaaggaggagauccugggcaccgugagcuggaaccuccgcgagaugcuggcccacgcggaggagacccggaagcugaugcccaucugcauggacguccgcgccaucauggccacgauccagcggaaguacaagggcaucaagauccaggaggggaucguggacuacggcgugcgcuucuucuucuacaccuccaaggagcccgucgccagcaucaucaccaagcugaacucccucaacgagccgcuggugaccaugcccaucggguacgugacccacggcuucaaccuggaggaggccgcgcggugcaugcgcagccucaaggcccccgccgucguguccgugagcuccccggacgccgucaccaccuacaacggguaccugaccagcuccagcaagaccuccgaggagcacuucguggagacggugagccuggccggcuccuaccgggacuggagcuacuccggccagcggaccgagcucgggguggaguuccugaagcggggcgacaagaucguguaccacacccuggagagccccguggaguuccaccucgacggggagguccugagccuggacaagcucaagucccugcugagccuccgcgaggugaagaccaucaagguguucacgaccgucgacaacaccaaccugcacacccagcugguggacauguccaugacguacggccagcaguucggccccaccuaccucgacggggcggacgugaccaagaucaagccccacgucaaccacgagggcaagaccuucuucgugcugccgagcgacgacacgcugcgguccgaggccuucgaguacuaccacacccucgacgagagcuuccuggggcgcuacauguccgcccugaaccacaccaagaaguggaaguucccccaggugggcgggcucaccagcaucaagugggccgacaacaacugcuaccuguccagcguccugcucgcgcugcagcagcuggaggugaaguucaacgcccccgcccuccaggaggccuacuaccgggcccgcgcgggcgacgccgccaacuucugcgcccugauccuggccuacuccaacaagacggugggcgagcucggggacguccgcgagaccaugacccaccuccugcagcacgcgaaccucgagagcgccaagcgggugcugaacguggucugcaagcacugcggccagaagaccacgacccugaccgggguggaggccgucauguacaugggcacccucuccuacgacaaccugaagacgggggugagcauccccugcgugugcggccgcgacgccacccaguaccugguccagcaggaguccagcuucgugaugauguccgccccgcccgcggaguacaagcuccagcagggcaccuuccugugcgccaacgaguacaccgggaacuaccagugcggccacuacacgcacaucaccgccaaggagacccuguaccggaucgacggggcccaccucaccaagaugagcgaguacaagggccccgugacggacgucuucuacaaggagaccagcuacaccaccaccaucaagcccguguccuacaagcuggacggggugacguacaccgagaucgagccgaagcuggacggcuacuacaagaaggacaacgcguacuacaccgagcagcccaucgaccucguccccacccagccccugccgaacgccagcuucgacaacuucaagcugacgugcuccaacaccaaguucgccgacgaccucaaccagaugaccggcuucaccaagcccgccagccgcgagcuguccgugacguucuuccccgaccugaacggggacguggucgccaucgacuaccggcacuacagcgcguccuucaagaagggcgccaagcuccugcacaagcccaucguguggcacaucaaccaggccaccaccaagaccacguucaagccgaacaccuggugccugcgcugccucuggagcaccaagcccguggacaccuccaacagcuucgagguccuggccguggaggacacgcaggggauggacaaccuggccugcgagucccagcagcccaccagcgaggagguggucgagaaccccaccauccagaaggaggugaucgagugcgacgugaagaccacggaggucgugggcaacgugauccucaagccguccgacgagggggucaaggugacccaggagcugggccacgaggaccugauggcggccuacguggagaacaccagcaucaccaucaagaagcccaacgagcucucccuggcccugggccucaagacgaucgccacccacgggaucgccgcgaucaacagcguccccugguccaagauccuggccuacgugaagccguuccugggccaggccgccaucaccaccagcaacugcgccaagcggcucgcgcagcgcguguucaacaacuacaugcccuacgucuucacgcugcuguuccagcucugcaccuucaccaaguccaccaacagccggauccgcgccagccugcccacgaccaucgccaagaacuccgucaagagcguggccaagcugugccucgacgcggggaucaacuacgugaagucccccaaguucagcaagcuguucaccaucgccauguggcugcuccugcuguccaucugccucggcagccugaucugcgugaccgccgccuucggcgugcugcucuccaacuucggggccccgagcuacugcaacggcguccgggagcuguaccugaacuccagcaacgugacgaccauggacuucugcgagggguccuuccccugcagcaucugccucuccggccuggacagccuggacuccuaccccgcgcucgagaccauccaggugaccaucagcuccuacaagcuggaccugacgauccucgggcuggccgccgaguggguccuggccuacaugcuguucaccaaguucuucuaccugcugggccugagcgccaucaugcaggucuucuucggcuacuucgcgucccacuucaucagcaacagcuggcucaugugguucaucaucuccaucgugcagauggcccccgugagcgccauggugcgcauguacaucuucuucgccuccuucuacuacaucuggaaguccuacgugcacaucauggacgggugcaccagcuccacgugcaugaugugcuacaagcggaaccgcgccacccgggucgagugcaccaccaucgugaacggcaugaagcgcagcuucuacguguacgcgaacgggggccggggguucugcaagacccacaacuggaacugccugaacugcgacaccuucugcacgggcagcaccuucaucuccgacgaggucgcccgcgaccugagccuccaguucaagcggccgaucaaccccaccgaccaguccagcuacaucguggacuccguggccgucaagaacggcgcccugcaccuguacuucgacaaggcggggcagaagaccuacgagcgccacccccucagccacuucgugaaccuggacaaccugcgcgccaacaacacgaagggcucccuccccaucaacgucaucguguucgacggcaagagcaagugcgacgaguccgccagcaaguccgccagcguguacuacagccagcugaugugccagccgauccugcuccuggaccaggcccuggucuccgacgugggggacagcaccgagguguccgucaagauguucgacgcguacguggacaccuucagcgccaccuucuccgugcccauggagaagcucaaggcccuggucgccacggcccacagcgagcuggcgaaggggguggcccucgacggcgugcuguccaccuucgucagcgccgcccggcagggcgugguggacaccgacgucgacaccaaggacgugaucgagugccugaagcucucccaccacagcgaccuggaggugacgggggacuccugcaacaacuucaugcugaccuacaacaaggucgagaacaugacgccccgcgaccucggcgccugcaucgacugcaacgcgcggcacaucaacgcccagguggccaagagccacaacgugucccugaucuggaacgucaaggacuacaugagccuguccgagcagcuccgcaagcagauccggagcgccgcgaagaagaacaacauccccuuccgccugaccugcgccaccacccgccagguggugaacgucaucaccaccaagaucucccugaagggcgggugaggacuaguuauaagacugacuagcccgaugggccucccaacgggcccuccuccccuccuugcaccgagauuaauaaaaaaaaaaaaaaaaaaaaaaaaaaaaaaaaaaaaaaaaaaaaaaaaaaaaaaaaaaaaaaaaugcaucccccccccccccccccccccccccccccccaaaggcucuuuucagagccaccagaauu

SEQ ID NO: 21356 - RNA, 5920 nt, Artificial Sequence
  HCoV/OC43__NC_006213.1__non-structural protein 3 (NSP3) mRNA gc
aggagaaagcuuaccaugggccgccgggugaccuucaaggagcagcccaccgucaaggagaucaucagcaugccgaagaucaucaagguguucuacgagcuggacaacgacuucaacacgauccucaacaccgccugcgggguguucgaggucgacgacaccguggacauggaggaguucuacgccguggucaucgacgcgaucgaggagaagcugucccccugcaaggagcuggagggcgugggggccaaggugagcgccuuccuccagaagcuggaggacaacccccuguuccucuucgacgaggccggcgaggagguccuggcccccaagcuguacugcgcguucaccgccccggaggacgacgacuuccucgaggaguccgacguggaggaggacgacguggagggggaggagacggaccugaccgucaccagcgccggccagcccugcguggccuccgagcaggaggagagcuccgaggugcuggaggacacccucgacgacggccccagcgucgagacguccgacagccagguggaggaggacguggagauguccgacuucgucgaccuggagagcgugauccaggacuacgagaacgugugcuucgaguucuacaccaccgagcccgaguucgucaaggugcuggggcucuacgugccgaaggcgacccgcaacaacugcuggcugcgguccguccuggccgugaugcagaagcuccccugccaguucaaggacaagaaccugcaggaccuguggguccucuacaagcagcaguacagccagcuguucguggacacgcuggugaacaagauccccgccaacaucguccucccccagggcggguacguggccgacuucgccuacugguuccugacccugugcgacuggcagugcguggcguacuggaagugcaucaagugcgaccucgcccugaagcugaagggccucgacgccauguucuucuacggggacgucgugucccacaucugcaagugcggcgagagcauggugcugaucgacgucgacgugccguucaccgcccacuucgcccugaaggacaagcuguucugcgcguucaucaccaagcgcaucguguacaaggccgccugcgucguggacgugaacgacucccacagcauggccgucguggacggcaagcagaucgacgaccaccggaucacguccaucaccagcgacaaguucgacuucaucaucgggcacggcaugagcuucuccaugaccaccuucgagaucgcccagcucuacgggagcugcaucacgcccaacgugugcuucgucaagggcgacaucaucaagguguccaagcuggugaaggcggaggucguggugaaccccgccaacggccacauggcccacgggggcggggucgccaaggccaucgcgguggccgccggccagcaguucgugaaggagaccaccgacauggucaagagcaagggggugugcgccaccggcgacugcuacguguccacgggcgggaagcucugcaagaccguccugaacguggugggccccgacgcgcgcacccaggggaagcagagcuacguccugcucgagcggguguacaagcaccugaacaacuacgacugcguggucaccacgcugaucuccgccggcaucuucagcgugccguccgacgugagccucaccuaccugcuggggaccgccaagaagcaggucgugcucguguccaacaaccaggaggacuucgaccugaucagcaagugccagaucaccgccgucgagggcacgaagaagcuggccgcgcgccuguccuucaacgugggccggagcaucguguacgagaccgacgccaacaagcucauccugaucaacgacgucgccuucguguccaccuucaacgugcugcaggacguccucagccugcgccacgacaucgcccuggacgacgacgcccggaccuucgugcaguccaacguggacgucgugcccgagggguggcgcgucgugaacaaguucuaccagaucaacggcgugcggacggucaaguacuucgagugcaccgggggcaucgacaucugcagccaggacaagguguucggguacgugcagcagggcaucuucaacaaggcgaccgucgcccagaucaaggcccucuuccuggacaagguggacauccugcucaccguggacggcgucaacuucaccaaccgcuucgugcccgugggggaguccuucggcaagagccuggggaacgucuucugcgacggcgugaacgugacgaagcacaagugcgacaucaacuacaagggcaaggucuucuuccaguucgacaaccugagcuccgaggaccucaaggccgugcggagcuccuucaacuucgaccagaaggagcugcuggccuacuacaacaugcucgugaacugcuucaaguggcaggucguggugaacgggaaguacuucaccuucaagcaggcgaacaacaacugcuucgucaacgugagcugccugaugcugcagucccuccaccugaccuucaagaucgugcaguggcaggaggccuggcuggaguuccgcagcggccggcccgcccgcuucgucgcccucgugcuggcgaagggcggguucaaguucggggacccggccgacucccgggacuuccugcgcguggucuucagccagguggaccucaccggcgccaucugcgacuucgagaucgccugcaagugcggcgugaagcaggagcagcggacggggcuggacgccgucaugcacuucggcacccugucccgcgaggaccucgagaucggguacaccguggacugcagcugcggcaagaagcugauccacugcgugcgcuucgacguccccuuccugaucugcuccaacacccccgcgagcgugaagcuccccaagggggugggcuccgccaacaucuucaucggcgacaaggucgggcacuacgugcacgugaagugcgagcagagcuaccagcuguacgacgccuccaacgucaagaaggugacggacgugaccggcaagcugagcgacugccucuaccugaagaaccugaagcagaccuucaaguccguccucaccacguacuaccuggacgacgugaagaagaucgaguacaagccggaccugagccaguacuacugcgacgggggcaaguacuacacccagcggaucaucaaggcccaguucaagaccuucgagaagguggacggggucuacaccaacuucaagcucaucggccacacggugugcgacagccugaacgccaagcugggcuucgacuccagcaaggaguucguggaguacaagaucaccgaguggcccaccgcgaccggggacgucgugcucgccacggacgaccuguacgugaagcgcuacgagcggggcugcaucaccuucgggaagcccgucaucuggcugucccacgagaaggccagccucaacucccugaccuacuucaaccgccccagccugguggacgacaacaaguucgacguccucaagguggacgacguggacgacggcggggacuccagcgaguccggcgccaaggagaccaaggagaucaacaucaucaagcugagcggcgucaagaagccguucaagguggaggacuccgugaucgucaacgacgacacgagcgagaccaaguacgugaagucccugagcaucguggacgucuacgacauguggcucaccgggugcaaguacguggugcggaccgccaacgcgcugucccgcgccgucaacgugcccacgauccggaaguucaucaaguucggcaugacccuggugagcauccccaucgaccuccugaaccugcgcgagaucaagccggccgucaacguggugaaggccguccggaacaagaucuccgugugcuucaacuucaucaaguggcuguucgugcuccuguucggguggaucaagaucagcgcggacaacaaggucaucuacaccaccgagaucgccuccaagcucacgugcaagcugguggcccuggccuucaagaacgccuuccucaccuucaaguggagcaugguggcgcgcggcgccugcaucaucgccaccaucuuccugcugugguucaacuucaucuacgccaacgucaucuucagcgacuucuaccuccccaagaucggcuuccugcccaccuucguggggaagaucgcccaguggaucaagaacacguucucccuggugaccaucugcgaccucuacagcauccaggacgucggcuucaagaaccaguacugcaacggguccaucgcgugccaguucugccuggccggcuucgacaugcuggacaacuacaaggccaucgacguggugcaguacgaggccgaccggcgcgccuucgucgacuacaccggggugcucaagaucgugaucgagcugaucgucagcuacgcgcuguacaccgccugguucuacccccucuucgcccugaucuccauccagauccugaccacguggcucccggagcuguucaugcugagcacccuccacugguccuuccggcugcugguggcccucgccaacaugcugcccgcgcacguguucaugcgcuucuacaucaucaucgccagcuucaucaagcuguucucccucuuccggcacgucgccuacggcugcagcaaguccggcugccuguucugcuacaagcgcaaccggagccugcgcgugaagugcuccaccaucgucgggggcaugauccgguacuacgacgugauggccaacgggggcaccggguucugcagcaagcaccaguggaacugcaucgacugcgacuccuacaagcccggcaacacguucaucaccguggaggcggcccucgaccugagcaaggagcugaagcgccccauccagccgaccgacguggccuaccacaccgucacggacgugaagcaggucggcugcuccaugcgccucuucuacgaccgggacgggcagcgcaccuacgacgacgugaacgccagccuguucguggacuacuccaaccugcuccacagcaaggucaagagcgugcccaacaugcacgugguggucguggagaacgacgccgacaaggcgaacuuccugaacgccgccgucuucuacgcccagucccuguuccggcccauccugaugguggacaagaaccucaucaccaccgccaacacgggcaccagcgugaccgagaccauguucgacgucuacguggacacguuccuguccauguucgacguggacaagaagucccugaacgcgcucaucgccaccgcccacagcagcaucaagcaggggacccagaucuacaagguccuggacaccuuccuguccugcgcccgcaagagcugcuccaucgacagcgacguggacacgaagugccucgccgacuccgugaugagcgcggucuccgccggccuggagcugaccgacgagagcugcaacaaccucgugcccaccuaccugaaguccgacaacaucguggccgccgaccuggggguccucauccagaacagcgcgaagcacgugcagggcaacguggccaagaucgccggcgucuccugcaucuggagcguggacgccuucaaccaguucuccagcgacuuccagcacaagcugaagaaggccugcugcaagaccgggcugaagcucaagcugacguacaacaagcagauggcgaacgugagcguccugaccaccccguucucccucaagggcgggugaggacuaguuauaagacugacuagcccgaugggccucccaacgggcccuccuccccuccuugcaccgagauuaauaaaaaaaaaaaaaaaaaaaaaaaaaaaaaaaaaaaaaaaaaaaaaaaaaaaaaaaaaaaaaaaaugcaucccccccccccccccccccccccccccccccaaaggcucuuuucagagccaccagaauu

SEQ ID NO: 21357 - RNA, 6310 nt, Artificial Sequence
  HCoV/HKU1__NC_006577.2__non-structural protein 3 (NSP3) mRNA gc
aggagaaagcuuaccaugggccgcaaggugaacuucaacgagaagcccgucgugauggagaucccgagccugaugaccgugaaggucauguucgaccucgacuccaccuucgacgacauccuggggaaggugugcagcgaguucgagguggagaagggcgucacgguggacgacuucguggccgucgugugcgacgccaucgagaacgcgcugaacuccugcaaggagcaccccguggucggguaccaggugcgggccuuccucaacaagcugaacgagaacguggucuaccuguucgacgaggccggcgacgaggccauggccagccgcauguacugcaccuucgcgaucgaggacguggaggacgugaucuccagcgaggccgucgaggacaccaucgacggggugguggaggacaccaucaacgacgacgaggacgucgugacgggcgacaacgacgacgaggacguggucaccggcgacaacgacgacgaggacguggucaccggggacaacgacgacgaggacguggugaccggcgacaacgacgacgaggacgucgugacgggggacaacgacgacgaggacguggucaccggcgacaacgacgacgaggacguggugaccggggacaacgacgacgaggacgucgugaccggcgacaacgacgacgaggacguggucacgggcgacaacgacgacgaggacguggugaccggggacaacgacgacgaggacgucgugaccggcgacaacgacgacgaggacguggucaccggggacaacgacgacgaggacguggugacgggcgacaacgacgacgaggacgucgugaccggcgacaacaacgacgaggagaucgugaccggggacaacgacgaccagaucgucgugaccggcgacgacguggacgacaucgaguccaucuacgacuucgacacguacaaggcccuccuggucuucaacgacguguacaacgacgcccuguucgugagcuacggguccagcgucgagaccgagaccuacuucaaggugaacggccucuggucccccaccaucacgcacaccaacugcuggcugcggagcgugcugcucgucaugcagaagcugcccuucaaguucaaggaccuggcgaucgagaacauguggcucuccuacaaggugggguacaaccagagcuucguggacuaccugcugaccaccaucccgaaggccaucguccucccccagggcggcuucguggccgacuucgccuacugguuccugaaccaguucgacaucaacgccuacgcgaacuggugcugccugaagugcggguucuccuucgaccucaacggccuggacgcccuguucuucuacggggacaucgugagccacgucugcaagugcggccacaacaugacgcucaucgccgccgaccugcccugcacccugcacuucucccucuucgacgacaacuucugcgccuucugcacccccaagaagaucuucaucgcggccugcgccguggacgugaacgucugccacagcguggccgugaucggggacgagcagaucgacggcaaguucgucaccaaguucuccggcgacaaguucgacuucaucgugggguacggcaugagcuucagcauguccagcuucgagcugccgcagcuguacgggcucugcaucacgcccaacgugugcuucgucaagggcgacaucaucaacguggcccgccuggugaaggcggacgucaucgugaaccccgccaacgggcacaugcugcacggcggcggggucgccaaggccaucgccguggcggccggcaagaaguucuccaaggagaccgccgccauggucaagagcaagggggugugccaggugggcgacugcuacguguccaccggcgggaagcucugcaagaccauccugaacaucgucggccccgacgcgcggcaggacgggcgccagagcuacgugcugcucgcccgggccuacaagcaccugaacaacuacgacugcugccuguccacgcucaucagcgccggcaucuucuccgugccggccgacgucagccugaccuaccugcucggggugguggacaagcaggucauccugguguccaacaacaaggaggacuucgacaucauccagaagugccagaucaccagcguggucggcaccaaggcgcuggccgugcgccucaccgccaacgugggccgggucaucaaguucgagacggacgccuacaagcuguuccuguccggggacgacugcuucgugagcaacuccagcgugauccaggagguccugcuccugcgccacgacauccagcugaacaacgacgugcgggacuaccuccuguccaagaugaccagccugcccaaggacuggcgccucaucaacaaguucgacgugaucaacggcgucaagaccgugaaguacuucgagugccccaacuccaucuacaucugcagccaggggaaggacuucggcuacgugugcgacgggagcuucuacaaggccaccgucaaccaggugugcgugcugcuggcgaagaagaucgacguccuccugacgguggacggcgugaacuucaaguccaucagccugaccgucggcgagguguucgggaagauccucggcaacguguucugcgacgggaucgacgucaccaagcugaagugcuccgacuucuacgccgacaagauccuguaccaguacgagaaccucagccuggccgacaucuccgccgugcagagcuccuucggcuucgaccagcagcagcugcucgccuacuacaacuuccugaccgugugcaaguggagcgucguggugaacgggcccuucuucuccuucgagcagagccacaacaacugcuacgucaacguggcgugccugaugcuccagcacaucaaccugaaguucaacaaguggcaguggcaggaggccugguacgaguuccgggccggccgcccgcaccggcugguggcccucguccuggcgaagggccacuucaaguucgacgagcccuccgacgccacggacuucauccgcguggugcugaagcaggccgaccucagcggggccaucugcgagcuggagcugaucugcgacugcggcaucaagcaggagucccgggucgggguggacgccgugaugcacuucggcacccucgcgaagaccgaccuguucaacggguacaagaucggcugcaacugcgccggccgcaucguccacugcaccaagcugaacgugcccuuccucaucugcagcaacacgccccuguccaaggaccugccggacgacgucguggccgccaacauguucaugggggugggcgucgggcacuacacccaccucaagugcggcagccccuaccagcacuacgacgccugcuccgugaagaaguacaccggcgugagcgggugccugaccgacugccuguaccucaagaaccugacgcagaccuucaccagcaugcugaccaacuacuuccucgacgacgucgagaugguggcguacaaccccgaccugucccaguacuacugcgacaacggcaaguacuacacgaagcccaucaucaaggcccaguucaagccguucgccaagguggacggggucuacaccaacuucaagcuggugggccacgacaucugcgcccagcucaacgacaagcugggguucaacguggaccugcccuucgucgaguacaaggugaccguguggcccgucgccaccggcgacguggugcucgcgagcgacgaccuguacgucaagcgguacuucaagggcugcgagacguucgggaagcccgugaucugguucugccacgacgaggccucccugaacagccucaccuacuucaacaagccguccuucaagagcgagaaccgcuacuccgugcugagcgucgacuccgugagcgaggagucccagggcaacguggucaccagcgugauggagucccagaucagcaccaaggaggugaagcugaaggggguccggaagacggugaagaucgaggacgccaucaucgugaacgacgagaacuccagcaucaaggucgugaagucccucagccugguggacgucugggacauguaccugaccggcugcgacuacguggugugggucgccaacgagcucucccgccuggucaagagccccaccgugcgcgaguacauccgguacgggaucaagcccaucaccaucccgaucgaccugcucugccugcgcgacgacaaccagacgcugcucgugcccaagaucuucaaggcgcgggccaucgaguucuacggcuuccugaaguggcuguucaucuacguguucagccuccugcacuucaccaacgacaagaccaucuucuacaccacggagaucgccuccaaguucaccuucaaccuguucugccucgcccugaagaacgccuuccagaccuuccgcuggagcaucuucaucaagggcuuccugguggucgcgaccguguuccucuucugguucaacuuccuguacaucaacgugaucuucuccgacuucuaccugcccaacaucagcgucuuccccaucuucguggggcggaucgugauguggaucaaggccaccuucggccucgucacgaucugcgacuucuacuccaagcugggggugggcuucaccagccacuucugcaacggguccuucaucugcgagcugugccacagcggcuucgacaugcucgacaccuacgccgccaucgacuucgugcaguacgaggucgaccgccgggugcuguucgacuacgucucccuggugaagcucaucguggagcuggucaucggcuacagccuguacaccgugugguucuacccccucuucugccugaucgggcugcagcuguucacgaccuggcucccggaccuguucaugcucgagaccaugcacuggcugauccgcuucaucguguucgucgccaacaugcugcccgcguucgugcuccugcgguucuacaucguggucaccgccauguacaagguggugggcuucauccgccacaucgucuacgggugcaacaaggccggcugccuguucugcuacaagcggaacugcuccgugcgcgugaagugcagcacgaucgucggcggggugauccgguacuacgacaucaccgccaacggcgggaccggcuucugcgugaagcaccaguggaacugcuucaacugccacuccuucaagcccgggaacaccuucaucacggucgaggccgcgaucgagcucagcaaggagcugaagcgcccggugaaccccaccgacgccucccacuacguggucaccgacaucaagcaggucggcugcaugaugcggcuguucuacgaccgcgacggccagcggguguacgacgacguggacgccagccuguucguggacaucaacaaccuccugcacuccaaggugaaggucgugcccaaccuguacguggucgugguggagagcgacgccgaccgcgccaacuuccucaacgcggucguguucuacgcccagucccuguaccggcccauccugcucguggacaagaagcugaucaccacggccugcaacgggaucagcgucacccagaccauguucgacguguacguggacaccuucaugagccacuucgacgucgaccgcaaguccuucaacaacuucgugaacaucgcccacgcgagccugcgcgagggcgugcagcucgagaagguccuggacacguucguggggugcgugcggaagugcugcuccaucgacagcgacgucgagacccgcuucaucaccaaguccaugaucagcgccguggccgccggccuggaguucaccgacgagaacuacaacaaccucgugccgacguaccugaaguccgacaacaucgucgccgcggaccugggggugcucauccagaacggcgccaagcacgugcagggcaacgucgccaaggccgccaacaucagcugcaucugguucaucgacgcguucaaccagcugaccgccgaccugcagcacaagcucaagaaggccugcgugaagaccgggcugaagcugaagcucaccuucaacaagcaggaggccuccguccccauccugacgacccccuucagccugaagggcgggugaggacuaguuauaagacugacuagcccgaugggccucccaacgggcccuccuccccuccuugcaccgagauuaauaaaaaaaaaaaaaaaaaaaaaaaaaaaaaaaaaaaaaaaaaaaaaaaaaaaaaaaaaaaaaaaaugcaucccccccccccccccccccccccccccccccaaaggcucuuuucagagccaccagaauu

SEQ ID NO: 21358 - RNA, 4999 nt, Artificial Sequence
  HCoV/229E/BN1/GER/2015__KU291448.1__non-structural protein 3 (NSP3) mRNA gc
aggagaaagcuuaccaugggcaaggugagcuucuccgacgacgucgaggugaaggacaucgagcccguguaccgcgucaagcugugcuucgaguucgaggacgagaagcucguggacgugugcgagaaggccaucgggaagaagaucaagcacgagggcgacugggacagcuucugcaagaccauccaguccgcccugagcgucguguccugcuacgugaaccugccgaccuacuacaucuacgacgaggagggcgggaacgaccucagccugcccgucaugaucuccgaguggccccuguucgagagcgacaaggaggaggacgugcagcaggcgcagcaggaggccacgcacaucgccgaggacguggucgaccagguggaggaggugaacuccaucuucgacaucgagaccgucgacgugaagcacgagaugagccccuucgagaugccguucgaggagcucaacgggcugaagauccugaagcagcucgacaacaacugcugggugaacuccgucaugcugcagauccagcugaccggcauccucgacggcgacuacgccaugcaguucuucaagauggggcggguggccaagaugaucgagcgcugcuacaccgcggagcagugcauccggggcgccaugggggacgugggccugugcauguaccgccugcucaaggaccugcacacgggguucauggucauggacuacaagugcagcugcaccuccggccggcuggaggagagcggcgccguccucuucugcacccccaccaagaaggccuuccccuacgggacgugccugaacugcaacgcgccccgcaugugcaccauccggcagcugcagggcaccaucaucuucgugcagcagaagccggagcccgugaaccccguguccuucgucgugaagcccgugugcagcuccaucuuccgcggggccgucagcugcggccacuaccagaccaacaucuacucccagaaccucugcguggacggcuucggggugaacaagauccagccguggacgaacgacgcccugaacaccaucugcaucaaggacgccgacuacaacgccaaggacgagaucagcgucacccccaucaagaacaccguggacacgauccccaaggaggaguucguggucaaggagaagcugaacgcguuccucgugcacggcaacguggucuucuaccagggggacguggacaccguggucaacggcguggacuucgacuucaucgugaacgccgccaacgagaaccuggcccacgggggcggccuggccaaggcgcucgacgucuacaccaaggggaagcugcagcggcugagcaaggagcacaucggccucgccgggaaggugcgcgugggcaccggggucaugguggagugcgacucccugcggaucuucaacguggucggcccccgcaagggcaagcacgagcgggaccugcucgugaaggccuacaacacgaucaacaacgagcaggggaccccgcugacccccauccugagcugcggcaucuucggggugaagcucgagaccucccuggagguccugcucgacgugugcaacacgaaggaguucaagguguucgucuacaccgacaccgaggugugcaaggugaaggacuucgucagcggccuggugaacgugcagaaggucgcccagcccaagaucgagcagaagcccgugucccugaucaagguggccccgaagcccuaccgcgucgacgggaaguucagcuacuucaccgaggaccuccugugcguggcggacgacaagcccaucgugcuguucacggacuccaugcucacccuggacgaccggggccuggcccuggacaacgcccucagcggcguccuguccgccgccaucaaggacugcguggacaucaacaaggcgauccccagcgggaaccugaucaaguucgacaucgacuccguggucguguacaugugcguggucccgagcgagaaggacaagcaccucgacaacaacgugcagcgcugcacccggaagcugaaccgccugaugugcgacaucgugugcaccauccccgccgacuacauccucccccugguccuguccagccucacgugcaacguguccuucgucggcgagcugaaggccgccgaggcgaaggugaucaccaucaaggugaccgaggacggggucaacgugcacgacgugaccgucacgaccgacaagagcuucgagcagcaggucggcgugaucgccgacaaggacaaggaccuguccggcgccgugcccagcgaccucaacaccuccgagcugcugaccaaggccaucgacguggacuggguggaguucuacggguucaaggacgccgucaccuucgcgacgguggaccacagcgccuucgccuacgagagcgccguggucaacggcauccgggugcucaagaccuccgacaacaacugcugggugaacgccgucugcaucgcgcugcaguaccugaagccgcacuucaucagccaggggcucgacgccgccuggaacaaguucgugcugggcgacguggagaucuucgucgccuucguguacuacguggcccgccuggucaagggggacaagggcgacgcggaggacacccucaacaagcuguccaaguaccuggugaacgaggcccaggugcagcucgagcacuacagcuccugcgucgagugcgacgccaaguucaagaacagcgugaccuccaucaacagcgccaucgugugcgcguccgucaagcgggacggcguccaggugggguacugcgugcacggcaucaaguacuacagccgcgugaaguccgugcgcgggcgggccaucaucgucagcguggagcagcuggagcccugcgugcagucccgccugcucagcggcgucgccuacacggccuucuccgggcccguggacaagggccacuacaccguguacgacaccgccaagaaguccauguacgacggcgaccgguucgucaagcacgaccugagccugcucagcgugaccagcguggucauggugggggacuacguggcgccggucuccacggugaagcccaagcccgugaucagccagcuggacgagaacgcccagaaguucuucgacuucggcgacuuccugguccacaacuucgugaucuucuucaccuggcuccuguccauguucacccugugcaagaccgccgucacgaccugcgacgugaagaucauggccaaggcgccccagcgcaccggggugguccucaagcggagccugaaguacaaccugaaggccuccgccgccgugcucaagagcaagugguggcugcuggccaaguucaccaagcuccugcugcucaucuacacgcuguacuccgugguccuguucugcgugcgcuucggcccguucgaguucugcagcgagaccgugaacggguacgccaaguccaacuucgucaaggacgacuacugcgacggcagccucggcugcaagaugugccuguucggguaccaggagcugucccaguucagccaccucgacgugguguggaagcacaucaccgacccccuguucuccaacauccagcccuucaucgucauggugcugcuccugaucuucggcgacaacuaccugcggugcuuccuccuguacuucguggcgcagaugaucagcaccgucgggguguuccugggcuacaaggagacgaacugguuccuccacuucauccccuucgacgugaucugcgacgagcuguucgucaccgugaucgugaucaaggucaucuccuucgugcgccacgugcuguucgggugcgagaacccggacugcaucgccugcagcaaguccgcccggcucaagcgcuuccccgucaacaccaucgugaacggcgugcagcggagcuucuacgucaacgccaacggcggguccaaguucugcaagaagcaccgcuucuucugcguggacugcgacagcuacggcuacgggagcaccuucaucacgcccgaggugucccgggagcugggcaacaucaccaagaccaacguccagcccaccggcccggcguacgugaugaucgacaagguggaguucgagaacggguucuaccgccuguacagcggcgagacguucuggcgguacaacuucgacaucaccgaguccaaguacagcugcaaggaggucuucaagaacugcaacgugcucgacgacuucaucguguucaacaacaacgggaccaacgucacccaggugaagaacgccuccguguacuucagccagcugcugugccgccccaucaagcucgucgacuccgagcugcugagcacgcucuccguggacuucaacggcgugcugcacaaggccuacaucgacguccugcggaacagcuucgggaaggaccucaacgccaacaugucccuggccgacugcaagagcgcgcugggccucuccaucagcgaccacgaguucaccuccgccaucagcaacgcccaccgcugcgacgugcugcuguccgaccucagcuucaacaacuucguguccagcuacgccaagcccgaggagaagcugagcgccuacgaccuggcgugcugcaugcgggccggcgccaaggucgugaacgccaacgugcucaccaaggaccagacccccaucgucuggcacgccaaggacuucaacucccugagcgcggaggggcgcaaguacaucgugaagacguccaaggccaagggccugaccuuccuccugaccaucaacgagaaccaggccgugacccagaucccggccaccagcaucgucgccaagcagggggcgugaggacuaguuauaagacugacuagcccgaugggccucccaacgggcccuccuccccuccuugcaccgagauuaauaaaaaaaaaaaaaaaaaaaaaaaaaaaaaaaaaaaaaaaaaaaaaaaaaaaaaaaaaaaaaaaaugcaucccccccccccccccccccccccccccccccaaaggcucuuuucagagccaccagaauu

SEQ ID NO: 21359 - RNA, 4915 nt, Artificial Sequence
  HCoV/NL63/RPTEC/2004__JX504050.1__non-structural protein 3 (NSP3) mRNA gc
aggagaaagcuuaccaugggcaagaucagcuucuccgacgacgugaucguccacgacguggagcccacccacaaggugaagcugaucuucgaguucgaggacgacgucgugaccagccucugcaagaaguccuucggcaagagcaucaucuacacgggggacugggaggggcugcacgaggugcugaccuccgccaugaacgucaucggccagcacaucaagcucccgcaguucuacaucuacgacgaggagggcggguacgacgugagcaagcccgugaugaucucccaguggcccaucagcaacgacuccaacggcugcgucguggaggccagcaccgacuuccaccagcuggagugcaucguggacgacuccguccgcgaggagguggacaucaucgagcagcccuucgaggagguggagcacguccugagcaucaagcagccguucuccuucagcuuccgggacgagcucggggugcgcgugcuggaccaguccgacaacaacugcuggaucagcaccacgcugguccagcuccagcugaccaagcugcucgacgacuccaucgagaugcagcuguucaaggugggcaagguggacagcaucguccagaagugcuacgagcugucccaccucaucagcgggagccugggcgacuccgggaagcugcucagcgagcugcugaaggagaaguacacgugcuccaucaccuucgagaugagcugcgacugcggcaagaaguucgacgaccaggugggcugccucuucuggaucaugcccuacaccaagcuguuccagaagggggagugcugcaucugccacaagaugcagaccuacaagcugguguccaugaagggcaccggggucuucgugcaggaccccgcgcccaucgacaucgacgccuucccggucaagcccaucugcagcuccguguaccucggcgugaagggcagcgggcacuaccagaccaaccuguacuccuucaacaaggccaucgacggcuucggggucuucgacaucaagaacagcuccgugaacacggugugcuucgucgacguggacuuccacagcguggagaucgaggccggcgaggucaagcccuucgccguguacaagaacgugaaguucuaccugggggacaucucccaccucgucaacugcgugagcuucgacuucguggucaacgcggccaacgagaaccugcugcacggcggcgggguggcccgggccaucgacauccucaccgagggccagcugcagucccugagcaaggacuacaucuccagcaacgggccccucaaggugggcgcgggggucaugcuggagugcgagaaguucaacguguucaacguggucggcccgcgcaccggcaagcacgagcacucccugcucguggaggccuacaacagcauccuguucgagaacgggaucccccugaugccccuccugagcugcggcaucuucggggugcggaucgagaacucccugaaggcccucuucagcugcgacaucaacaagccccugcaggucuucguguacuccagcaacgaggagcaggccgugcugaaguuccucgacggccuggaccugaccccggucaucgacgacguggacguggucaagcccuuccgcguggaggggaacuucuccuucuucgacugcggcgugaacgcccuggacggcgacaucuaccuccuguucacgaacagcauccugaugcucgacaagcaggggcagcugcuggacaccaagcucaacggcauccugcagcaggcggcccuggacuaccucgccaccgucaagaccgugcccgccgggaaccuggugaagcuggucguggaguccugcacgaucuacaugugcgugguccccagcaucaacgaccucuccuucgacaagaaccugggccggugcgugcgcaagcugaaccggcucaagaccugcgugaucgccaacgucccggcgaucgacgugcugaagaagcugcucagcucccugacccugaccgugaaguucgucguggagagcaacgugauggacgucaacgacugcuucaagaacgacaacguggugcucaagaucacggaggacggcaucaacgucaaggacguggucguggaguccagcaagucccuggggaagcagcugggcguggucagcgacgggguggacuccuucgagggcgugcuccccaucaacaccgacaccguccugagcguggcccccgagguggacugggucgccuucuacggguucgagaaggccgcccuguucgcgagccucgacgugaagcccuacggcuacccgaacgacuucgugggcggguuccgcguccugggcaccacggacaacaacugcugggugaacgcgaccugcaucauccugcaguaccucaagcccaccuucaaguccaaggggcugaacgugcuguggaacaaguucgucaccggcgacguggggcccuucgugagcuucaucuacuucaucacgauguccagcaagggccagaagggcgacgccgaggaggcccucuccaagcugagcgaguaccugaucuccgacagcaucgucacccucgagcaguacuccacgugcgacaucugcaagagcaccgugguggaggucaaguccgccaucgugugcgccagcgugcugaaggacgggugcgacgucggcuucugcccccaccggcacaagcugcgcucccgggugaaguucgugaacgggcgcgucgugaucaccaacgugggcgagccgaucaucagccagcccuccaagcuccugaacgggaucgccuacaccaccuucagcggcuccuucgacaacggccacuacgucguguacgacgccgccaacaacgcgguguacgacggggcccggcuguucagcuccgaccucagcacccuggccgucaccgccaucgugguggucggcgggugcgugacgagcaacgugcccaccaucgucuccgagaagaucagcgugauggacaagcuggacaccggcgcccagaaguucuuccaguucggggacuucgugaugaacaacaucguccucuuccugaccuggcugcucuccauguucagccugcugcgcacguccaucaugaagcacgacaucaaggugaucgcgaaggccccgaagcggaccggcgugauccucacccgcagcuucaaguacaacauccgguccgcccuguucgucaucaagcagaaguggugcgugaucgugacccuguucaaguuccuccugcugcucuacgccaucuacgcccuggucuucaugaucgugcaguucagccccuucaacucccugcucugcggcgacaucgugagcggguacgagaaguccacguucaacaaggacaucuacugcggcaacagcauggucugcaagaugugccuguucuccuaccaggaguucaacgaccuggaccacaccagccucguguggaagcacauccgcgaccccauccugaucucccugcagcccuucgucauccucgugauccugcugaucuucgggaacauguaccuccgguucggccugcuguacuucguggcgcaguucaucagcaccuucggcuccuuccucggguuccaccagaagcagugguuccugcacuucgucccguucgacgugcugugcaacgaguuccucgccaccuucaucgugugcaagaucguccuguucgugcgccacaucaucgugggcugcaacaacgccgacugcgucgccugcagcaaguccgcccgccugaagcgggugccccuccagacgaucaucaacgggaugcacaagagcuucuacgugaacgcgaacggcgggaccugcuucugcaacaagcacaacuucuucugcgucaacugcgacagcuucggccccggcaacaccuucaucaacggggacaucgcccgcgagcugggcaacguggugaagaccgccguccagcccacggccccggcguacgugaucaucgacaagguggacuucgucaacggguucuaccggcuguacuccggcgacaccuucuggcgcuacgacuucgacaucaccgagagcaaguacuccugcaaggaggugcucaagaacugcaacgugcuggagaacuucaucgucuacaacaacagcggguccaacaucacccagaucaagaacgccugcguguacuucagccagcugcucugcgagcccaucaagcuggugaacuccgagcugcucagcacgcuguccgucgacuucaacggcgugcugcacaaggccuacguggacguccucugcaacagcuucuucaaggagcugaccgccaacauguccauggccgagugcaaggcgacccugggccucaccgugagcgacgacgacuucguguccgccgucgccaacgcccaccgguacgacgugcugcugagcgaccucuccuucaacaacuucuucaucagcuacgccaagcccgaggacaagcuguccguguacgacaucgcgugcugcaugcgcgccgggagcaaggucgugaaccacaacgugcugaucaaggaguccauccccaucgucuggggcgugaaggacuucaacacgcugagccaggaggggaagaaguaccucgugaagaccaccaaggccaagggccugaccuuccugcucacguucaacgacaaccaggccaucacccaggucccggccaccagcaucguggcgaagcagggggccugaggacuaguuauaagacugacuagcccgaugggccucccaacgggcccuccuccccuccuugcaccgagauuaauaaaaaaaaaaaaaaaaaaaaaaaaaaaaaaaaaaaaaaaaaaaaaaaaaaaaaaaaaaaaaaaaugcaucccccccccccccccccccccccccccccccaaaggcucuuuucagagccaccagaauu

SEQ ID NO: 21360 - RNA, 5989 nt, Artificial Sequence
  Bat SARS-like CoV/WIV1__KF367457.1__non-structural protein 3 (NSP3) mRNA gc
aggagaaagcuuaccauggcccccaccaagggcgugaccuucggggaggacacgguccuggaggugcagggcuacaagaacgugcgcaucaccuucgagcucgacgagcgggucgacaaggugcugaacgagaagugcagcguguacaccgucgaguccgggaccgaggugacggaguucgccugcguggucgcggaggccguggugaagacccugcagccggucagcgaccuccugaccaacaugggcaucgaccuggacgagugguccguggccaccuucuaccucuucgacgacgccggggaggagaagcugagcucccgcauguacugcagcuucuacccgcccgacgacgaggaggacugcgacgaguacgacgaggaggaggaggugcuggaggaguccugcgcccacgaguacggcacggaggaggacuaccagggccucagccuggaguucggggcguccaccgagaugcaggucgaggaggaggaggaggaggacuggcugggcgacgccaccgagcucagcgagcacgagcccgagcccgagcugacccccgaggagcccgugaaccaguucacgggguaccugaagcucaccgacaacguggccaucaagugcgucgacaucgugaaggaggcccagaacgcgaaccccaccgugaucgucaacgccgccaacauccaccugaagcacggcgggggcguggccggcgcccugaacaaggcgaccaacggggccaugcagaaggaguccgacgacuacaucaagcucaacggcccgcugguggucgggggcagcugccugcucuccggccacaaccuggccaagaagugccugcacguggucgggcccaaccucaacgccggcgaggacauccagcugcugaaggccgcguacgagaacuucaacagccaggacacgcuccuggcgccccugcucuccgccgggaucuucggcgccaagccccugcagagccugcaggucugcgugcagaccguccggacccagguguacaucgccgugaacgacaaggcccucuacgagcaggucgugauggacuaccuggacucccugaagccgcgcguggaggcccccaagcaggaggagccgccccggaccgaggaccccaagaucgaggagaaguccgucgugcagaagcccaucgacgugaagcccaagaucaaggccugcaucgacgaggucacgaccacccucgaggagaccaaguuccugacgaacaagcugcuccuguucgccgacaucaacgggaagcuguaccacgacucccacaacaugcuccgcggcgaggacaugagcuuccuggagaaggacgcccccuacguggugggcgacgucaucaccagcggggacaucacgugcguggugaucccguccaagaaggcgggcgggaccacggagaugcugagccgggcccucaagaagguccccguggacgaguacaucaccaccuaccccggccaggggugcgccggcuacacccuggaggaggccaagacggcgcugaagaagugcaaguccgccuucuacgugcugcccagcgagaccccgaacgccaaggaggagauccucggcaccgucuccuggaaccugcgcgagaugcuggcccacgccgaggagacccggaagcucaugcccaucugcauggacgugcgcgcgaucauggccacgauccagcggaaguacaaggggaucaaggugcaggagggcaucgucgacuacggggugcgcuucuucuucuacaccagcaaggagcccguggccuccaucaucaccaagcugaacagccugaacgagccccucgucaccaugccgaucggcuacgugacccacggguucaaccuggaggaggccgcccggugcaugcgcucccugaaggcgcccgccguggucagcguguccagccccgacgccgugaccaccuacaacggcuaccucaccagcagcuccaagaccagcgaggagcacuucguggagacggugucccuggccggcagcuaccgggacugguacuacuccgggcagcggaccgagcugggcguggaguuccucaagcgcggggacaagaucgucuaccacacccuggagagcccgguggaguuccaccuggacggcgaggugcucccccuggacaagcugaagucccuccugagccugcgggaggucaagaccaucaagguguucacgaccguggacaacaccaaccuccacacccagcuggucgacaugagcaugacguacggccagcaguucgggcccaccuaccuggacggcgccgacgugaccaagaucaagccccacgugaaccacgaggggaagaccuucuucguccucccguccgacgacacgcugcggagcgaggcguucgaguacuaccacacccuggacgaguccuuccucggccgcuacaugagcgcccugaaccacaccaagaaguggaaguucccccaggucgggggccugaccuccaucaagugggccgacaacaacugcuaccucagcuccgugcugcuggcccuccagcagaucgaggugaaguucaacgcgcccgcccugcaggaggccuacuaccgggcccgcgccggcgacgcggccaacuucugcgcccugauccucgccuacagcaacaagacggugggggagcugggcgacgugcgcgagaccaugacccaccuccugcagcacgccaaccuggaguccgcgaagcggguccugaacguggucugcaagcacugcgggcagaagaccacgacccucaccggcguggaggccgugauguacauggggacccugagcuacgacaaccugaagacgggcgucuccauccccugcgugugcggccgcgacgccacccaguaccucgugcagcaggagagcuccuucgucaugaugagcgccccgcccgccgaguacaagcugcagcaggggaccuuccugugcgcgaacgaguacaccggcaacuaccagugcgggcacuacacgcacaucaccgccaaggagacccucuaccggaucgacggcgcccaccugaccaagauguccgaguacaaggggcccgugacggacguguucuacaaggagaccagcuacaccaccaccaucaagcccgucagcuacaagcuggacggcgugacguacaccgagaucgagccgaagcucgacggcuacuacaagaaggacaacgccuacuacaccgagcagcccaucgaccuggugcccacccagccccugccgaacgcguccuucgacaacuucaagcucacgugcagcaacaccaaguucgccgacgaccugaaccagaugaccggguucaccaagcccgccucccgcgagcuguacgucacguucuuccccgaccucaacggcgacgugguggccaucgacuaccggcacuacagcgccuccuucaagaagggggcgaagcugcugcacaagcccaucgucuggcacaucaaccaggccaccaccaagaccacguucaagccgaacaccuggugccuccgcugccuguggagcaccaagcccguggacaccuccaacagcuucgaggugcuggccgucgaggacacgcagggcauggacaaccucgccugcgagucccagcagcccaccagcgaggaggugguggagaaccccaccauccagaaggaggucaucgagugcgacgugaagaccacggagguggucgggaacgugauccugaagccguccgacgagggcgugaaggucacccaggagcuggaccacgaggaccucauggccgcguacguggagaacaccagcaucaccaucaagaagcccaacgagcugucccuggcccucggccugaagacgaucgccacccacgggaucgccgccaucaacagcgugcccugguccaagauccuggcguacgucaagccguuccucggccaggccgccaucaccaccagcaacugcgccaagcggcuggcccagcgcguguucaacaacuacaugcccuacgugcugacgcuccuguuccagcugugcaccuucaccaaguccaccaacagccggauccgcgcgucccuccccacgaccaucgccaagaacagcguccgcgggguggcccggcugugccuggacgccggcaucaacuacgucaagagccccaaguucuccaagcuguucaccaucgcgauguggcuccugcuccugagcaucugccugggcucccucaucuacgugaccgccgcccugggggugcugcucagcaacuucggcgccccguccuacugcagcggggugcgggaguccuaccugaacagcuccaacgucacgaccauggacuucugcgagggcagcuuccccugcuccgugugccugagcgggcucgacucccuggacagcuaccccgcccuggagaccauccaggugaccaucuccagcuacaagcucgaccugacgauccugggccuggcggccgagugguuccucgccuacaugcuguucaccaaguucuucuaccugcucggccuguccgccaucaugcaggucuucuucggguacuucgccagccacuucaucuccaacagcuggcugaugugguucaucaucagcaucgugcagauggcgcccguguccgccaugguccgcauguacaucuucuucgccagcuucuacuacaucuggaaguccuacgugcacaucauggacggcugcaccagcuccacgugcaugaugugcuacaagcggaaccgcgccacccggguggagugcaccaccaucgucaacgggaugaagcgcagcuucuacguguacgccaacggcgggcggggcuucugcaagacccacaacuggaacugccucaacugcgacaccuucugcacgggcuccaccuucaucagcgacgagguggcgcgcgaccugucccugcaguucaagcgcccgaucaaccccaccgaccagagcuccuacaucgucgacagcguggccgucaagaacggggcccuccaccuguacuucgacaaggccggccagaagaccuacgagcggcacccccugucccacuucaucaaccucgacaaccugcgcgcgaacaacacgaaggggagccugcccaucaacgugaucguguucgacggcaaguccaagugcgacgagagcgccgcccgguccgccagcgucuacuacucccagcucaugugccagccgauccugcugcucgaccaggcccugaucagcgacgugggggacagcaccgagguguccgucaagauguucgacgcguacguggacaccuucagcgccaccuucuccgugcccauggagaagcugcgcgcccucgucgccacggcccacagcgagcuggcgaagggcguggcccuggacggcgugcucuccaccuucgucagcgccgcccggcagggggugguggacaccgacgucgacaccaaggacgugaucgagugccugaagcugucccaccacagcgaccucgaggugacgggcgacuccugcaacaacuucaugcugaccuacaacaaggucgagaacaugacgccccgcgaccugggggccugcaucgacugcaacgcgcggcacaucaacgcccagguggccaagagccacaacgugucccucaucuggaacgucaaggacuacaugagccuguccgagcagcugcgcaagcagauccggagcgccgcgaagaagaacaacauccccuuccgccugaccugcgccaccacccgccagguggugaacgucaucaccaccaagaucucccucaagggcggcugaggacuaguuauaagacugacuagcccgaugggccucccaacgggcccuccuccccuccuugcaccgagauuaauaaaaaaaaaaaaaaaaaaaaaaaaaaaaaaaaaaaaaaaaaaaaaaaaaaaaaaaaaaaaaaaaugcaucccccccccccccccccccccccccccccccaaaggcucuuuucagagccaccagaauu

SEQ ID NO: 21361 - RNA, 5734 nt, Artificial Sequence
  BatCoV/HKU9-1 BF_005I__NC_009021.1__non-structural protein 3 (NSP3) mRNA gc
aggagaaagcuuaccaugggcgugagcaaggucaccuucggggacgaggaggugcacaccauccccaacacggugaccgucaacuucuccuacgacgugugcgagggccuggacgccauccucgacaaggugauggccccguuccaggucgaggaggggaccaagcuggaggaccuggcgugcguggugcagaaggccgucuacgagcgccucagcgaccuguucuccgacugccccgccgagcugcggcccaucaaccucgaggacuuccugaccagcgagugcuucguguacuccaaggacuacgagaagauccugaugcccgagauguacuucagccucgaggacgccgugccggucgacgacgagaugguggacgacaucgaggacacgguggagcaggccuccgacagcgacgaccaguggcugggcgacgagggggcggaggacugcgacaacaccauccaggacgucgacguggccaccuccaugaccacgcccugcggcuacaccaagaucgccgagcacguguacaucaagugcgccgacaucguccaggaggcgcgcaacuacagcuacgccgugcuggugaacgccgccaacgucaaccuccaccacggcgggggcguggccggggcgcugaaccgggccaccaacaacgccaugcagaaggaguccagcgaguacaucaaggccaacggcucccugcagcccgggggccacgugcuccugagcucccacggccuggccagccacgggauccuccacgucgugggccccgacaagcgccuggggcaggaccuggcgcuccuggacgccgucuacgccgccuacaccggcuucgacuccgugcugacgccgcucgugagcgccggcaucuucggguucaccgucgaggagucccugugcagccuggugaagaacguggcgugcaccaccuacgucgugguguacgaccggcagcucuacgagcgcgcccuggccacgagcuucgacguccccggcccccaguccagcgugcagcacgugcccgccaucgacugggccgaggcggucgaggugcaggaguccaucguggaccaggucgagaccccgagccugggggccguggacaccguggacuccaacgccgacagcggccucaacgagaccgcccggucccccgagaacgucguggggagcgugcccgacgacgucguggcggacguggaguccugcguccgcgaccuggugcgccagguggucaagaaggugaagcgggacaagcggcccccgcccaucgugccccagcagacggucgagcagcagccccaggagaucagcuccccgggcgacugcaacaccgugcugguggacgucgugagcauguccuucagcgccauggugaacuucggcaaggagaaggggcuccugauccccgucgugaucgacuaccccgccuuccugaaggugcucaagcgcuucucccccaaggagggccuguucagcuccaacggguacgaguucuacggcuacagccgggacaagccgcugcacgaggucuccaaggaccucaacagccuggggcgcccccugaucaugauccccuucggcuucaucgugaacggccagacccucgccgugagcgccgucuccaugcgggggcugaccgugccccacacgguggucgugccgagcgaguccagcgugccccuguaccgcgcguacuucaacggcgucuucuccggggacaccaccgccgugcaggacuucguggucgacauccuccugaacggcgcccgggacugggacgugcugcagaccacgugcaccgucgaccgcaagguguacaagaccaucugcaagcgggggaacaccuaccugugcuucgacgacacgaaccucuacgccaucaccggcgacgugguccugaaguucgccaccgugagcaaggcgcgcgccuaccuggagaccaagcucugcgcccccgagccgcugaucaaggugcugacgaccgucgacggcaucaacuacuccaccgugcucgugagcaccgcccaguccuaccgggcccagaucgggaccgucuucugcgacggccacgacuggagcaacaagaaccccaugcccacggacgaggggacccaccuguacaagcaggacaacuucuccagcgcggaggugaccgccauccgcgaguacuacggcguggacgacuccaacaucaucgcccgcgccaugagcauccggaagaccguccagacguggcccuacaccgugguggacggccgcguccugcucgcgcagcgggacuccaacugcuaccugaacguggccaucagccugcuccaggacaucgacguguccuucagcaccccgugggucugccgcgccuacgacgcccugaagggcgggaacccccugcccauggccgaggugcucaucgcgcuggggaaggccacccccggcgugagcgacgacgcccacaugguccuguccgccgugcucaaccacgggacggugaccgcccggcgcgucaugcagaccgugugcgagcacugcggcgugagccagauggucuucaccggcacggacgcgugcaccuucuacggguccguggugcuggacgaccuguacgccccggucagcguggugugccagugcggccggcccgccauccgcuacgucuccgagcagaagucccccuggcuccugaugagcugcacccccacccaggugccgcuggacacgagcgggaucuggaagaccgccaucguguuccggggccccgucaccgccgggcacuacauguacgcggugaacggcacccucaucuccguguacgacgccaacacgcgccggcgcaccagcgaccugaagcugcccgccaccgacauccucuacggccccaccuccuucacgagcgacuccaaggucgagaccuacuaccuggacggggugaagcggaccaccaucgacccggacuucagcaaguacgugaagcgcggcgacuacuacuucacgaccgcccccaucgaggucguggcggcccccaagcuggugaccuccuacgacggguucuaccucagcuccugccagaacccccagcuggccgagagcuucaacaaggccaucaacgccaccaagacgggcccgaugaagcugcucaccauguaccccaacgucgcgggggacgugguggccaucuccgacgacaacgucguggcccaccccuacggcagccugcacaugggcaagcccgugcuguucgucacccggccgaacaccuggaagaagcucgugccccugcugagcacggucguggugaacacccccaacaccuacgacguccucgccguggacccgcugcccgugaacaacgagaccuccgaggagcccaucagcgucaaggcccccaucccgcuguacgggcucaaggcgaccauggugcugaacggcacgaccuacgugcccgggaacaagggccaccuccucugccugaaggaguucacccugaccgaccuccagacguucuacgucgagggggugcagcccuucgugcugcugaaggccucccaccucagcaagguccugggccugcgcguguccgacagcucccuccacgugaaccaccugagcaagggcgucguguacgccuacgccgccacccggcugaccacccgcgugacgaccucccuccucgggggccuggucacccggagcgugcgcaagaccgcggacuucgugcgcuccacgaaccccgggagcaagugcgucggccugcugugccuguucuaccagcuguucaugcgguucuggcugcuggugaagaagccgcccaucgugaaggucuccggcaucaucgccuacaacaccgggugcggcgugacgaccugcgugcucaacuaccugcgcagccggugcgggaacaucuccuggagccgccugcucaagcugcugcgguacaugcucuacaucugguucgucuggaccugccugaccaucugcggcguguggcuguccgagcccuacgcccccagccucgugacccgcuucaaguacuuccuggggaucgucaugccgugcgacuacgugcuggugaacgagaccggcacgggcuggcuccaccaccugugcauggccgggauggacucccuggacuaccccgcccuccggaugcagcagcaccgcuacggcagccccuacaacuacaccuacauccugaugcugcucgaggcguucuucgccuaccugcuguacacccccgcccucccgaucgucgggauccuggccgugcugcaccucaucgugcuguaccugcccaucccccucggcaacagcuggcuggucguguuccuguacuacaucauccggcucgugcccuucaccuccaugcugcgcauguacaucgucaucgcguuccuguggcugugcuacaagggguuccuccacgugcgguacggcugcaacaacguggccugccugaugugcuacaagaagaacgucgccaagcgcaucgagugcagcacgguggugaacggcgucaagcggauguucuacgugaacgccaacgggggcacccacuucugcaccaagcacaacuggaacugcguguccugcgacaccuacacggucgacagcaccuucaucugccgccagguggcccuggaccucuccgcgcaguucaagcggccgaucauccacaccgacgaggccuacuacgaggugaccagcgucgaggugcgcaacggguacgucuacugcuacuucgaguccgacggccagcggagcuacgagcgcuuccccauggacgccuucacgaacguguccaagcugcacuacagcgagcugaagggggccgcccccgcguucaacgugcucgucuucgacgccaccaaccggaucgaggagaacgccgugaagaccgccgccaucuacuacgcgcagcuggccugcaagcccauccugcucguggacaagcgcauggucggcguggugggcgacgacgccaccaucgcccgggcgauguucgaggccuacgcccagaacuaccugcugaaguacuccaucgccauggacaaggucaagcaccucuacagcacggcccugcagcagaucuccagcgggaugaccguggaguccgugcugaaggucuucgugggcagcacccgcgcggaggccaaggaccucgaguccgacguggacaccaacgaccuggucagcugcauccgccugugccaccaggaggggugggaguggacgaccgacuccuggaacaaccucgugccgaccuacaucaagcaggacacccugagcacccuggaggugggccaguucaugacggccaacgccaaguacgucaacgccaacaucgcgaagggcgccgccgugaaccucaucuggcgguacgccgacuucaucaagcugagcgaguccaugcgccggcagcugaagguggccgcgcgcaagaccgggcucaaccugcuggucaccaccagcucccucaaggccgacgugcccugcauggugacgcccuucaagaucaucggcugaggacuaguuauaagacugacuagcccgaugggccucccaacgggcccuccuccccuccuugcaccgagauuaauaaaaaaaaaaaaaaaaaaaaaaaaaaaaaaaaaaaaaaaaaaaaaaaaaaaaaaaaaaaaaaaaugcaucccccccccccccccccccccccccccccccaaaggcucuuuucagagccaccagaauu

SEQ ID NO: 21362 - RNA, 5086 nt, Artificial Sequence
  PEDV/NPL-PEDv/2013/P10__KJ778616.1__non-structural protein 3 (NSP3) mRNA gc
aggagaaagcuuaccaugggcgacgugaaguucagcgacgaggucuccgugaagaccaucgaccccguguacaaggucagccuggaguucgaguucgaguccgagaccaucauggccgugcucaacaaggccguggggaacugcaucaaggucacgggcgggugggacgacgugguggaguacaucaacgucgcgaucgaggugcugaaggaccacaucgacgugccgaaguacuacaucuacgacgaggagggcgggaccgaccccaaccugcccgucauggugagccaguggccccucaacgacgacaccaucucccaggaccugcuggacguggaggucgugaccgacgccccgguggacuucgagggcgacgaggucgacagcuccgaccccgacaagguggccgacguggccaacagcgagcccgaggacgacggccucaacgucgcccccgagacgaacguggaguccgagguggaggaggucgcggccacccugagcuucaucaaggacaccccguccaccgugacgaaggaccccuucgccuucgacuucgccagcuacgggggccugaagguccuccgccagucccacaacaacugcugggugaccagcacccuggugcagcugcagcuccuggggaucgucgacgaccccgcgauggagcuguucuccgccggccggguggggcccauggugcgcaagugcuacgagagccagaaggccauccucggcucccugggcgacgucagcgccugccuggagucccucaccaaggaccugcacacgcugaagaucacgugcagcguggugugcgggugcggcaccggggagcggaucuacgacggcugcgccuuccgcaugaccccgacccucgagcccuuccccuacggcgcgugcgcccagugcgcccagguccugaugcacaccuucaagagcaucguggggaccggcaucuucugccgggacaccacggcccugucccucgacagccugguggucaagccccugugcgccgcggccuucaucgggaaggacuccggccacuacgugaccaacuucuacgacgccgccauggccaucgacggguacggccgccaccagaucaaguacgacacccucaacaccaucugcgugaaggacgucaacuggacggcgccguucgugcccgacguggagcccguccuggagcugguggugaagcccuucuacagcuacaagaacgucgacuucuaccagggcgacuucuccgaccucgugaagcugccgugcgacuucguggucaacgccgccaacgagaaccugagccacgggggcgggaucgccaaggccaucgacguguacaccaagggcaugcuccagaagugcuccaacgacuacaucaaggcgcacgggcccaucaaggugggccggggcgucaugcuggaggcccuggggcucaagguguucaacguggucggcccccgcaaggggaagcacgcccccgagcugcuggugaaggccuacaagagcguguucgcgaacuccggcgucgcccucaccccgcugaucagcguggggaucuucuccgugccccuggaggagagccucuccgccuuccuggccugcgucggcgaccggcacugcaagugcuucugcuacagcgacaaggagcgcgaggccaucaucaacuacauggacggccugguggacgcgaucuucaaggacgcccucguggacaccacgcccguccaggaggacgugcagcaggucucccagaagcccgugcugccgaacuucgagcccuuccggaucgagggggcccacgccuucuacgagugcaaccccgagggccugaugagccugggggccgacaagcucgugcuguucaccaacuccaaccuggacuucugcagcgugggcaagugccucaacaacgucaccggcggggcgcugcuggaggccaucaacguguucaagaaguccaacaagaccgugccggccggcaacugcgucacguucgagugcgccgacaugaucagcaucaccaugguggugcuccccagcgacggggacgccaacuacgacaagaacuacgcgcgcgccgucgugaaggucuccaagcugaagggcaagcugcuccuggccgugggggacgccaugcuguacagcaagcucucccaccugagcgugcugggcuucgucuccacccccgacgacguggagcgguucuacgcgaacaagagcguggucaucaaggugaccgaggacacgcgcuccgugaagaccgucaagguggagagcaccgugaccuacggccagcagaucgggcccugccucgucaacgacaccguggugacggacaacaagccggucguggccgacguggucgccaagguggugcccuccgccaacugggacagccacuacggcuucgacaaggccggggaguuccacaugcuggaccacaccggcuucgcguuccccuccgaggucgugaacgggcggcgcgugcugaagaccaccgacaacaacugcugggucaacgugacgugccuccagcugcaguucgcccgguuccgcuucaagagcgccggccugcaggccaugugggaguccuacugcaccggcgacguggccauguucguccacuggcucuacuggcugaccgggguggacaagggccagcccagcgacuccgagaacgcgcugaacaugcucagcaaguacaucgugccggccggguccgucaccaucgagcgggugacgcacgacggcugcugcugcagcaagcgcguggucaccgcccccguggugaacgccagcguccugaagcuggggguggaggacggccucugcccccacggccugaacuacaucgacaagguggucguggugaaggggaccaccaucgucgugaacgugggcaagcccgucguggccccgucccaccuguuccucaagggggugagcuacacgaccuuccuggacaacggcaacggggucgcgggccacuacaccguguucgaccacgacaccggcauggugcacgacggggacgucuucgugcccggcgaccugaacgucucccccgugacgaacguggucgugagcgagcagaccgccguggucaucaaggaccccgugaagaagguggagcucgacgccaccaagcugcuggacaccaugaacuacgccuccgagcgguucuucagcuucggggacuucaugucccgcaaccucaucacggucuuccuguacauccugagcauccucggccugugcuuccgcgcguuccggaagcgcgacgugaaggugcuggccggcgucccgcagcggaccgggaucauccuccgcaaguccgugcgguacaacgccaaggcccugggcguguucuucaagcugaagcucuacugguucaagguccuggggaaguucagccugggcaucuacgcccucuacgcgcugcuguucaugaccauccgcuucacccccaucgggggccccgugugcgacgacguggucgccggcuacgccaacuccagcuucgacaagaacgaguacugcaacuccgugaucugcaaggugugccucuacggguaccaggagcugagcgacuucucccacacgcaggucguguggcagcaccuccgggacccccugaucggcaacgugaugccguucuucuaccuggccuuccuggccaucuucgggggcgucuacgugaaggcgaucacccucuacuucaucuuccaguaccugaacauccuggggguguuccucggccugcagcagagcaucugguuccugcagcucguccccuucgacguguucggcgacgagaucguggucuucuucaucgugacccgcgugcugauguuccugaagcacgucuuccucgggugcgacaaggccuccugcguggccugcagcaaguccgcccggcugaagcgcgugcccguccagaccaucuuccagggcacgagcaagagcuucuacgugcacgccaacgggggcuccaaguucugcaagaagcacaacuucuucugccugaacugcgacagcuacgggcccggcugcaccuucaucaacgacgugaucgcgaccgaggucggcaacguggugaagcucaacguccagccgaccgggcccgccacgauccugaucgacaagguggaguucuccaacggcuucuacuaccuguacagcggggacaccuucuggaaguacaacuucgacaucaccgacaacaaguacacgugcaaggagucccucaagaacugcagcaucaucaccgacuucaucguguucaacaacaacggcuccaacgucaaccaggugaagaacgccugcguguacuucagccagaugcugugcaagcccgucaagcugguggacuccgcccuccuggccagccuguccguggacuucggcgcgagccuccacuccgccuucgucagcgugcuguccaacagcuucgggaaggaccuguccagcugcaacgacaugcaggacugcaaguccacccucggcuucgacgacgucccgcuggacaccuucaacgccgccguggcggaggcccaccgguacgacgugcugcucaccgacaugagcuucaacaacuucaccacgagcuacgccaagcccgaggagaagcugcccguccacgacaucgcgaccugcaugcgcgugggggccaagaucgugaaccacaacguccuggugaaggacuccauccccguggucuggcucgugcgggacuucaucgcccugagcgaggagacccgcaaguacaucauccggaccacgaaggugaagggcaucaccuucaugcugaccuucaacgacugccgcaugcacaccacgaucccgaccgucugcaucgccaacaagaaggggugaggacuaguuauaagacugacuagcccgaugggccucccaacgggcccuccuccccuccuugcaccgagauuaauaaaaaaaaaaaaaaaaaaaaaaaaaaaaaaaaaaaaaaaaaaaaaaaaaaaaaaaaaaaaaaaaugcaucccccccccccccccccccccccccccccccaaaggcucuuuucagagccaccagaauu

SEQ ID NO: 21363 - RNA, 6238 nt, Artificial Sequence
  MHV/A59__NC_048217.1__non-structural protein 3 (NSP3) mRNA gc
aggagaaagcuuaccaugggcaagaagguggaguucaacgacaagcccaagguccgcaagaucccgagcacccggaagaucaagaucaccuucgcccuggacgccacguucgacuccgugcucagcaaggcgugcuccgaguucgagguggacaaggacgucacccuggacgagcugcucgacguggugcuggacgccgucgagagcacccugucccccugcaaggagcacgacgugaucgggaccaaggugugcgcccuccuggaccgccuggccggcgacuacgucuaccucuucgacgagggcggggacgaggugaucgcgccccggauguacugcagcuucuccgcccccgacgacgaggacugcguggccgccgacgucguggacgccgacgagaaccaggacgacgacgcggaggacagcgccgugcuggucgccgacacgcaggaggaggacgggguggccaagggccagguggaggccgacuccgagaucugcgucgcgcacaccggcagccaggaggagcuggccgagccggacgccguggggucccagacccccaucgccagcgccgaggagaccgaggugggcgaggcguccgaccgcgaggggaucgccgaggccaaggccacggucugcgccgacgcgguggacgccugccccgaccagguggaggccuucgagaucgagaaggucgaggacagcauccucgacgagcugcagaccgagcugaacgcccccgccgacaagaccuacgaggacgugcucgcguucgacgccgucugcuccgaggcccugagcgccuucuacgcggugccguccgacgagacccacuucaaggugugcggcuucuacagccccgccaucgagcggacgaacugcuggcugcgcuccacccucaucgucaugcagagccugccccuggaguucaaggaccucgagaugcagaagcuguggcugagcuacaaggccggguacgaccagugcuucguggacaagcucgugaaguccguccccaagagcaucauccugccgcagggcggcuacguggccgacuucgccuacuucuuccugucccagugcagcuucaaggcguacgccaacuggcggugccucgagugcgacauggagcugaagcugcaggggcucgacgccauguucuucuacggcgacguggucucccacaugugcaagugcgggaacagcaugacccugcuguccgccgacauccccuacacccuccacuucggcgugcgcgacgacaaguucugcgccuucuacacgccccggaagguguuccgcgcggccugcgccgucgacgugaacgacugccacagcauggccguggucgagggcaagcagaucgacgggaagguggugaccaaguucaucggcgacaaguucgacuucauggucggguacggcaugaccuucuccaugagccccuucgagcuggcccagcuguacggguccugcaucaccccgaacgugugcuucgugaagggcgacgucaucaagguggugcggcucgucaacgcggaggugaucgugaaccccgccaacggccgcauggcccacggggccggcgucgcgggggccaucgccgagaaggccggcagcgccuucaucaaggagacguccgacauggugaaggcgcagggggugugccaggucggcgagugcuacgagagcgccggcgggaagcugugcaagaaggugcugaacaucgugggccccgacgcccgggggcacggcaagcagugcuacucccuccuggagcgcgccuaccagcacaucaacaagugcgacaacgucgugaccacccugaucagcgccgggaucuucuccgugcccaccgacgucagccucacguaccugcugggcguggugaccaagaacgucauccucguguccaacaaccaggacgacuucgacgugaucgagaagugccaggucaccagcguggcgggcaccaaggcccugagccugcagcuggccaagaaccucugccgggacgugaaguucgucacgaacgccugcuccagccuguucuccgagagcugcuucguguccagcuacgacgugcugcaggaggucgaggcccuccgccacgacauccagcuggacgacgacgcgcggguguucgugcaggccaacauggacugccugccgaccgacuggcgccucgucaacaaguucgacuccguggacgggguccggaccaucaaguacuucgagugccccggcgggaucuucgugagcucccagggcaagaaguucggcuacgugcagaacgggagcuucaaggaggccuccgucagccagauccgcgcccugcuggcgaacaagguggacgugcucugcaccgucgacggcgugaacuuccgguccugcugcguggccgagggggaggucuucggcaagacgcuggggagcguguucugcgacggcaucaacgugaccaagguccgcugcuccgccaucuacaagggcaagguguucuuccaguacagcgaccuguccgaggccgaccucguggccgucaaggacgcguucggguucgacgagccccagcugcugaaguacuacaccaugcucggcaugugcaaguggcccgugguggucugcgggaacuacuucgccuucaagcagagcaacaacaacugcuacaucaacguggccugccugaugcugcagcaccucagccugaaguucccgaaguggcaguggcaggaggccuggaacgaguuccgcuccggcaagccccugcgguucgugagccucguccuggccaagggguccuucaaguucaacgagcccagcgacuccaucgacuucaugcgcguggugcugcgggaggcggaccucagcggcgcgaccugcaaccuggaguucgucugcaagugcggcgugaagcaggagcagcgcaaggggguggacgccgucaugcacuucggcacgcuggacaagggggaccucgugcggggcuacaacaucgccugcacgugcggguccaagcuggugcacugcacccaguucaacguccccuuccugaucugcagcaacaccccggagggccgcaagcuccccgacgacgugguggccgccaacaucuucaccggcggguccgucggccacuacacccacgugaagugcaagcccaaguaccagcuguacgacgccugcaacgugaacaaggucagcgaggccaaggggaacuucaccgacugccuguaccucaagaaccugaagcagaccuucuccagcgugcugaccacguucuaccucgacgacgugaagugcgucgaguacaagccggaccugucccaguacuacugcgagagcggcaaguacuacaccaagcccaucaucaaggcccaguuccggaccuucgagaagguggacgggguguacaccaacuucaagcuggucggccacuccaucgccgagaagcucaacgcgaagcugggcuucgacugcaacagccccuucguggaguacaagaucacggaguggcccaccgccaccggggacgugguccuggccuccgacgaccucuacgugagccgcuaccuguccggcugcaucaccuucgggaagccgguggucuggcugggccacgaggaggccagccucaagagccugacguacuucaaccggcccuccguggugugcgagaacaaguucaacguccugcccguggacgucagcgagcccaccgacaagggcccggugcccgcggccgugcucgucaccggggugcccggcgccgacgccuccgccggggcgggcaucgccaaggagcagaaggccugcgccagcgccuccguggaggaccaggucgugaccgaggugcgccaggagcccagcgucuccgcggccgacgugaaggaggugaagcugaacggggucaagaagccggugaagguggagggcagcgucguggugaacgaccccacguccgagaccaaggucgucaagagccuguccaucguggacguguacgacauguuccucaccggcugcaaguacgugguguggaccgccaacgagcugagccggcuggucaacucccccacggugcgcgaguacgugaagugggggaugggcaagaucgucacccccgccaagcuccugcugcuccgggacgagaagcaggaguucguggccccgaagguggucaaggcgaaggccaucgccugcuacugcgccgugaagugguuccugcuguacugcuucagcuggaucaaguucaacaccgacaacaaggugaucuacaccacggaggucgcguccaagcucaccuucaagcugugcugccuggccuucaagaacgcccuccagaccuucaacuggagcguggugucccgcggguucuuccuggucgccaccguguuccugcucugguucaacuuccuguacgccaacgugauccugagcgacuucuaccuccccaacaucggcccccugcccacguucgucgggcagaucguggcgugguucaagaccaccuucggcguguccaccaucugcgacuucuaccaggucacggaccugggcuaccggagcagcuucugcaacggguccauggugugcgagcucugcuucagcggcuucgacaugcuggacaacuacgacgccaucaacgugguccagcacgugguggaccgccggcuguccuucgacuacaucagccucuucaagcuggucguggagcuggugaucggguacucccucuacaccgucugcuucuacccgcuguucgugcugaucggcaugcagcuccugaccaccuggcugcccgaguucuucaugcucgagacgaugcacuggagcgcccgccuguucgucuucguggccaacaugcugcccgccuucacccuccugcgguucuacaucguggucaccgcgauguacaagguguacugccugugccgccacgugauguacgggugcuccaagcccggcugccucuucugcuacaagcgcaaccggagcguccgcgugaagugcuccaccguggucggcgggagccugcgguacuacgacgugauggccaacggcgggaccggcuucugcacgaagcaccaguggaacugccugaacugcaacuccuggaagccgggcaacaccuucaucacccacgaggccgccgccgaccucagcaaggagcugaagcgccccgugaaccccaccgacuccgcguacuacagcgucacggaggugaagcaggucgggugcuccaugcggcuguucuacgagcgcgacggccagcggguguacgacgacgugaacgccagccucuucguggacaugaacgggcugcugcacuccaaggucaagggcgugccggagacccacguggucgugguggagaacgaggccgacaaggccggguuccugggcgcggccgucuucuacgcccagagccucuaccgccccaugcugaugguggagaagaagcugaucaccaccgccaacacgggccucuccgugagccggaccauguucgaccuguacgucgacagccugcucaacgugcuggacguggaccgcaagucccugaccagcuucgucaacgccgcgcacaacucccucaaggagggggugcagcuggagcaggucauggacaccuucaucggcugcgcccggcgcaagugcgccaucgacagcgacguggagacgaaguccaucaccaagagcgugauguccgccgugaacgccggggucgacuucaccgacgagagcugcaacaaccuggugcccaccuacgugaaguccgacacgaucgucgcggccgaccucggcgugcugauccagaacaacgccaagcacgugcaggccaacgucgccaaggcggccaacguggccugcaucuggagcguggacgccuucaaccagcuguccgccgaccuccagcaccggcugcgcaaggcgugcagcaagaccgggcugaagaucaagcucaccuacaacaagcaggaggccaacguccccauccugaccacgccguucucccugaagggcggcugaggacuaguuauaagacugacuagcccgaugggccucccaacgggcccuccuccccuccuugcaccgagauuaauaaaaaaaaaaaaaaaaaaaaaaaaaaaaaaaaaaaaaaaaaaaaaaaaaaaaaaaaaaaaaaaaugcaucccccccccccccccccccccccccccccccaaaggcucuuuucagagccaccagaauu

SEQ ID NO: 21364 - RNA, 6058 nt, Artificial Sequence
  SARS-CoV-2/Wuhan-Hu-1__NC_045512.2/MN908947.2__non-structural protein 3 (NSP3) mRNA gc R9941
aggagaaagcuuaccauggcccccaccaaggugaccuucggcgacgacaccgucaucgaggugcagggguacaagagcgugaacaucaccuucgagcuggacgagcgcaucgacaagguccucaacgagaagugcuccgccuacaccguggagcugggcaccgaggugaacgaguucgcgugcgucguggccgacgccgugaucaagacgcugcagccggucagcgagcuccugacgccccuggggaucgaccucgacgagugguccauggccaccuacuaccuguucgacgagagcggcgaguucaagcuggccucccacauguacugcagcuucuacccgcccgacgaggacgaggaggagggggacugcgaggaggaggaguucgagcccuccacccaguacgaguacggcacggaggacgacuaccagggcaagccccucgaguucggggcgaccagcgccgcccugcagcccgaggaggagcaggaggaggacuggcuggacgacgacucccagcagaccgugggccagcaggacgggagcgaggacaaccagaccacgaccauccagaccaucguggagguccagccccagcucgagauggagcugaccccgguggugcagacgaucgaggucaacuccuucagcggcuaccugaagcucaccgacaacguguacaucaagaacgccgacaucguggaggaggcgaagaaggucaagcccaccgugguggucaacgccgccaacguguaccugaagcacgggggcggcguggccggggcccugaacaaggcgaccaacaacgccaugcaggucgaguccgacgacuacaucgccacgaacggcccccucaaggucgggggcagcugcgugcuguccggccacaaccuggccaagcacugccuccacgugguggggcccaacgucaacaagggcgaggacauccagcugcucaagagcgccuacgagaacuucaaccagcacgaggugcugcuggcgccgcugcucuccgccgggaucuucggcgccgaccccauccacagccugcgggugugcgucgacaccgugcgcaccaacguguaccuggccgucuucgacaagaaccucuacgacaagcugguguccagcuuccuggagaugaaguccgagaagcaggucgagcagaagaucgccgagauccccaaggaggaggugaagcccuucaucaccgagagcaagccgagcguggagcagcggaagcaggacgacaagaagaucaaggcgugcguggaggaggucacgaccacccucgaggagaccaaguuccugacggagaaccugcuccuguacaucgacaucaacgggaaccugcaccccgacuccgccacccucgugagcgacaucgacaucaccuuccugaagaaggacgcccccuacaucgugggcgacgucgugcaggagggcgugcugaccgccgucgugauccccacgaagaaggccgggggcaccaccgagaugcucgcgaaggcccugcgcaaggugccgaccgacaacuacaucacgaccuaccccgggcagggccugaacggguacaccgucgaggaggccaagaccgugcucaagaagugcaaguccgccuucuacauccugcccagcaucaucuccaacgagaagcaggagauccugggcaccgugagcuggaaccugcgggagaugcucgcgcacgccgaggagacgcgcaagcugaugcccgucugcguggagaccaaggccaucguguccaccauccagcggaaguacaagggcaucaagauccaggagggggucguggacuacggcgcccgcuucuacuucuacaccagcaagacgaccguggccucccugaucaacacccucaacgaccugaacgagacccuggucacgaugccgcucggguacgugacccacggccugaaccuggaggaggcggcccgguacaugcgcagccucaaggugcccgccaccgucuccgugagcucccccgacgccgugaccgccuacaacggguaccugacgagcuccagcaagacccccgaggagcacuucaucgagaccaucucccuggcgggcagcuacaaggacuggagcuacuccggccagagcacccagcucgggaucgaguuccugaagcggggcgacaaguccgucuacuacacgagcaacccgaccaccuuccaccuggacggggaggugaucaccuucgacaaccucaagacgcugcugucccuccgcgaggugcggaccaucaaggucuucaccaccguggacaacaucaaccugcacacccagguggucgacaugagcaugaccuacggccagcaguucggccccaccuaccuggacggggccgacgugaccaagaucaagccccacaacucccacgagggcaagacguucuacgugcucccgaacgacgacacccugcgcgucgaggccuucgaguacuaccacaccaccgaccccagcuuccuggggcgguacauguccgcccucaaccacacgaagaaguggaaguacccccaggugaacggccugaccagcaucaagugggccgacaacaacugcuaccuggcgaccgcccuccugacccugcagcagaucgagcucaaguucaacccgcccgcccugcaggacgccuacuaccgcgcgcgggccggggaggccgccaacuucugcgcccugauccucgcguacugcaacaagacggugggcgagcugggcgacguccgcgagaccauguccuaccuguuccagcacgccaaccucgacagcugcaagcgggugcugaacgucgugugcaagaccugcgggcagcagcagaccacccugaagggcguggaggccgucauguacauggggacgcucuccuacgagcaguucaagaagggcgugcagauccccugcacgugcgggaagcaggccaccaaguaccuggugcagcaggagagccccuucgucaugauguccgcgcccccggcccaguacgagcugaagcacggcaccuucacgugcgccagcgaguacaccggcaacuaccagugcgggcacuacaagcacaucaccuccaaggagacccucuacugcaucgacggcgcccugcugaccaagagcagcgaguacaaggggcccaucaccgacguguucuacaaggagaacuccuacaccaccacgaucaagcccgugaccuacaagcucgacggcgucgugugcaccgagaucgaccccaagcuggacaacuacuacaagaaggacaacagcuacuucaccgagcagccgaucgaccuggugcccaaccagcccuaccccaacgccuccuucgacaacuucaaguucgucugcgacaacaucaaguucgccgacgaccucaaccagcugacgggguacaagaagccggcgagccgcgagcugaaggugaccuucuuccccgaccucaacggcgacguggucgccaucgacuacaagcacuacacccccuccuucaagaagggcgccaagcugcugcacaagcccaucguguggcacgugaacaacgccaccaacaaggcgacguacaagccgaacaccuggugcauccggugccucuggagcaccaagcccgucgagaccuccaacagcuucgacgugcugaaguccgaggacgcccaggggauggacaaccuggccugcgaggaccucaagcccgugagcgaggaggucguggagaaccccacgauccagaaggacgugcuggagugcaacgucaagaccaccgagguggugggcgacaucauccugaagccggccaacaacucccucaagaucaccgaggaggucgggcacacggaccugauggccgcguacguggacaacagcucccugaccaucaagaagcccaacgagcucagccgcgugcugggccugaagacccucgccacccacgggcuggccgccgucaacuccgugcccugggacacgaucgccaacuacgcgaagccguuccugaacaagguggucagcaccaccaccaacaucgugacgcgcugccucaaccgggugugcaccaacuacaugcccuacuucuucacccugcugcuccagcugugcaccuucacgcgcuccaccaacagccggaucaaggccuccaugcccaccaccaucgccaagaacaccgucaagagcgugggcaaguucugccuggaggccagcuucaacuaccucaagucccccaacuucagcaagcugaucaacaucaucaucugguuccugcuccuguccgugugccugggcagccucaucuacuccacggccgcgcuggggguccugaugagcaaccucggcaugccguccuacugcaccggguaccgcgagggcuaccugaacagcaccaacgugaccaucgccacguacugcaccggcuccauccccugcagcgugugccuguccgggcucgacagccuggacaccuaccccucccuggagaccauccagaucacgaucagcuccuucaagugggaccucaccgccuucggccuggucgccgagugguuccuggccuacauccucuucacccgguucuucuacgugcuggggcuggcggccaucaugcagcuguucuucagcuacuucgccgugcacuucaucuccaacagcuggcucauguggcugaucaucaaccugguccagauggcccccaucuccgcgauggugcgcauguacaucuucuucgccagcuucuacuacguguggaaguccuacguccacgugguggacggcugcaacagcagcacgugcaugaugugcuacaagcggaaccgcgccacgcgggucgagugcaccaccaucgugaacgggguccgccgguccuucuacguguacgccaacggcggcaagggguucugcaagcuccacaacuggaacugcgugaacugcgacaccuucugcgccggcagcacguucaucuccgacgaggucgcgcgcgaccugagccugcaguucaagcggccgaucaaccccaccgaccaguccagcuacaucguggacuccgugaccgucaagaacgggagcauccaccucuacuucgacaaggccggccagaagaccuacgagcgccacucccugagccacuucgugaaccuggacaaccuccgggccaacaacacgaaggggucccugcccaucaacgugaucgucuucgacggcaagagcaagugcgaggaguccagcgccaaguccgccagcguguacuacucccagcugaugugccagcccauccuccugcuggaccaggcgcucgugagcgacgucggcgacagcgccgagguggccgugaagauguucgacgccuacgucaacaccuucuccagcaccuucaacgugccgauggagaagcugaagacccugguggccacggcggaggccgagcucgccaagaacgucucccuggacaacgugcugagcaccuucaucuccgccgcgcgccagggguucguggacagcgacgucgagaccaaggacgugguggagugccucaagcugucccaccagagcgacaucgaggucaccggcgacuccugcaacaacuacaugcugacguacaacaagguggagaacaugacgccccgggaccucggggccugcaucgacugcagcgcccgccacaucaacgcccagguggccaagucccacaacaucgcgcugaucuggaacgucaaggacuucaugagccuguccgagcagcuccggaagcagauccgcagcgccgccaagaagaacaaccugcccuucaagcugaccugcgccaccacccgccagguggugaacgucgugaccaccaagaucgcccucaagggcgggugaggacuaguuauaagacugacuagcccgaugggccucccaacgggcccuccuccccuccuugcaccgagauuaauaaaaaaaaaaaaaaaaaaaaaaaaaaaaaaaaaaaaaaaaaaaaaaaaaaaaaaaaaaaaaaaaugcaucccccccccccccccccccccccccccccccaaaggcucuuuucagagccaccagaauu

SEQ ID NO: 21365 - RNA, 6058 nt, Artificial Sequence
  SARS-CoV-2/Wuhan/WIV05/2019__EPI_ISL_402128__non-structural protein 3 (NSP3) mRNA gc
aggagaaagcuuaccauggcccccaccaaggugaccuucggcgacgacacggucaucgaggugcagggguacaagagcgugaacaucaccuucgagcuggacgagcgcaucgacaagguccucaacgagaagugcuccgccuacaccguggagcugggcaccgaggugaacgaguucgcgugcgucguggccgacgccgugaucaagacgcugcagccggucagcgagcuccugaccccccuggggaucgaccucgacgagugguccauggccaccuacuaccuguucgacgagagcggcgaguucaagcuggccucccacauguacugcagcuucuacccccccgacgaggacgaggaggagggggacugcgaggaggaggaguucgagccguccacccaguacgaguacggcacggaggacgacuaccagggcaagccccucgaguucggggcgaccagcgccgcccugcagcccgaggaggagcaggaggaggacuggcuggacgacgacucccagcagaccgugggccagcaggacgggagcgaggacaaccagaccacgaccauccagaccaucguggagguccagccccagcucgagauggagcugaccccgguggugcagacgaucgaggucaacuccuucagcggcuaccugaagcucaccgacaacguguacaucaagaacgccgacaucguggaggaggcgaagaaggucaagcccaccgugguggucaacgccgccaacguguaccugaagcacgggggcggcguggccggggcccugaacaaggcgaccaacaacgccaugcaggucgaguccgacgacuacaucgccacgaacggcccccucaagguggggggcagcugcguccuguccggccacaaccuggccaagcacugccuccacgugguggggcccaacgucaacaagggcgaggacauccagcugcugaagagcgccuacgagaacuucaaccagcacgaggugcuccuggcgccgcugcucuccgccgggaucuucggcgccgaccccauccacagccugcgggugugcgucgacaccgugcgcaccaacguguaccuggccgucuucgacaagaaccucuacgacaagcugguguccagcuuccuggagaugaagagcgagaagcagguggagcagaagaucgccgagauccccaaggaggaggucaagcccuucaucaccgaguccaagccgagcguggagcagcggaagcaggacgacaagaagaucaaggcgugcguggaggaggucacgaccacccucgaggagaccaaguuccugacggagaaccugcuccuguacaucgacaucaacgggaaccugcaccccgacuccgccacccucgugagcgacaucgacaucaccuuccugaagaaggacgcccccuacaucgugggcgacgucgugcaggagggcgugcugaccgccgucgugauccccacgaagaaggccgggggcaccaccgagaugcucgcgaaggcccugcgcaaggugccgaccgacaacuacaucacgaccuaccccgggcagggccugaacggguacaccgucgaggaggccaagaccgugcucaagaagugcaaguccgccuucuacauccugcccagcaucaucuccaacgagaagcaggagauccugggcaccgugagcuggaaccugcgggagaugcucgcgcacgccgaggagacgcgcaagcugaugcccgucugcguggagaccaaggccaucguguccaccauccagcggaaguacaagggcaucaagauccaggagggggucguggacuacggcgcccgcuucuacuucuacaccagcaagacgaccguggccucccugaucaacacccucaacgaccugaacgagacccuggucacgaugccgcucggguacgugacccacggccugaaccuggaggaggcggcccgguacaugcgcagccucaaggugcccgccaccgucuccgugagcucccccgacgccgugaccgccuacaacggguaccugacgagcuccagcaagacccccgaggagcacuucaucgagaccaucucccuggcgggcagcuacaaggacuggagcuacuccggccagagcacccagcucgggaucgaguuccugaagcggggcgacaaguccgucuacuacacgagcaacccgaccaccuuccaccuggacggggaggugaucaccuucgacaaccucaagacgcugcugucccuccgcgaggugcggaccaucaaggucuucaccaccguggacaacaucaaccugcacacgcagguggucgacaugagcaugaccuacggccagcaguucggccccaccuaccuggacggggccgacgugaccaagaucaagccccacaacucccacgagggcaagacguucuacgugcucccgaacgacgacacccugcgcgucgaggccuucgaguacuaccacaccaccgaccccagcuuccuggggcgguacauguccgcccucaaccacacgaagaaguggaaguacccccaggugaacggccugaccagcaucaagugggccgacaacaacugcuaccuggcgaccgcccuccugacccugcagcagaucgagcucaaguucaaccccccggcccugcaggacgccuacuaccgcgcgcgggccggggaggccgccaacuucugcgcccugauccucgcguacugcaacaagacggugggcgagcugggcgacguccgcgagaccauguccuaccuguuccagcacgccaaccucgacagcugcaagcgggugcugaacgucgugugcaagaccugcgggcagcagcagaccacccugaagggcguggaggccgucauguacauggggacgcucuccuacgagcaguucaagaagggcgugcagauccccugcaccugcgggaagcaggccaccaaguaccuggugcagcaggagagccccuucgucaugauguccgcccccccggcgcaguacgagcugaagcacggcaccuucacgugcgccagcgaguacaccggcaacuaccagugcgggcacuacaagcacaucaccuccaaggagacccucuacugcaucgacggcgcccugcugacgaagagcagcgaguacaaggggcccaucaccgacguguucuacaaggagaacuccuacaccaccacgaucaagcccgugaccuacaagcucgacggcgucgugugcaccgagaucgaccccaagcuggacaacuacuacaagaaggacaacagcuacuucaccgagcagccgaucgaccuggugcccaaccagcccuaccccaacgccuccuucgacaacuucaaguucgucugcgacaacaucaaguucgccgacgaccucaaccagcugacgggguacaagaagccggcgagccgcgagcugaaggugaccuucuuccccgaccucaacggcgacguggucgccaucgacuacaagcacuacacccccuccuucaagaagggcgccaagcugcugcacaagcccaucguguggcacgugaacaacgccaccaacaaggcgacguacaagccgaacaccuggugcauccggugccucuggagcaccaagcccgucgagaccuccaacagcuucgacgugcugaaguccgaggacgcccaggggauggacaaccuggccugcgaggaccucaagcccgugagcgaggaggucguggagaaccccacgauccagaaggacgugcuggagugcaacgucaagaccaccgagguggugggcgacaucauccugaagccggccaacaacucccucaagaucaccgaggaggucgggcacacggaccugauggccgcguacguggacaacagcucccugaccaucaagaagcccaacgagcucagccgcgugcugggccugaagacccucgccacccacgggcuggccgccgucaacuccgugcccugggacacgaucgccaacuacgcgaagccguuccugaacaagguggucagcaccaccaccaacaucgugacgcgcugccucaaccgggugugcaccaacuacaugcccuacuucuucacccugcugcuccagcugugcaccuucacgcgcuccaccaacagccggaucaaggccuccaugcccaccaccaucgccaagaacaccgucaagagcgugggcaaguucugccuggaggccagcuucaacuaccucaagucccccaacuucagcaagcugaucaacaucaucaucugguuccugcuccuguccgugugccugggcagccucaucuacuccacggccgcgcugagcguccugauguccaaccucgggaugccgagcuacugcaccggcuaccgcgagggguaccugaacuccaccaacgugaccaucgccacguacugcaccggcagcauccccugcuccgugugccugagcggccucgacucccuggacaccuaccccagccuggagaccauccagaucacgaucuccagcuucaagugggaccucaccgccuucgggcuggucgccgagugguuccuggccuacauccucuucacccgguucuucuacgugcugggccuggcggccaucaugcagcucuucuucuccuacuucgccgugcacuucaucagcaacuccuggcugauguggcugaucaucaaccugguccagauggcccccaucagcgcgauggugcgcauguacaucuucuucgccagcuucuacuacguguggaaguccuacguccacgugguggacgggugcaacagcuccaccugcaugaugugcuacaagcggaaccgcgccacgcgggucgagugcaccaccaucgugaacggcguccgccggagcuucuacguguacgccaacgggggcaagggcuucugcaagcuccacaacuggaacugcgugaacugcgacaccuucugcgccggguccacguucaucagcgacgaggucgcgcgcgaccugucccugcaguucaagcggccgaucaaccccaccgaccagagcuccuacaucguggacagcgugaccgucaagaacggcuccauccaccucuacuucgacaaggccgggcagaagaccuacgagcgccacagccugucccacuucgugaaccuggacaaccuccgggccaacaacacgaagggcagccugcccaucaacgugaucgucuucgacgggaaguccaagugcgaggagagcuccgccaagagcgccuccguguacuacagccagcugaugugccagcccauccuccugcuggaccaggcgcucgugagcgacgucggcgacuccgccgagguggccgugaagauguucgacgccuacgucaacaccuucagcuccaccuucaacgugccgauggagaagcugaagacccugguggccacggcggaggccgagcucgccaagaacgucagccuggacaacgugcuguccaccuucaucagcgccgcgcgccagggcuucguggacuccgacgucgagaccaaggacgugguggagugccucaagcugagccaccaguccgacaucgaggucaccggggacagcugcaacaacuacaugcugacguacaacaagguggagaacaugaccccccgggaccucggcgccugcaucgacugcuccgcccgccacaucaacgcccagguggccaagagccacaacaucgcgcugaucuggaacgucaaggacuucaugucccugagcgagcagcuccggaagcagauccgcuccgccgccaagaagaacaaccugcccuucaagcugaccugcgccaccacgcgccagguggugaacgucgugaccaccaagaucgcccucaaggggggcugaggacuaguuauaagacugacuagcccgaugggccucccaacgggcccuccuccccuccuugcaccgagauuaauaaaaaaaaaaaaaaaaaaaaaaaaaaaaaaaaaaaaaaaaaaaaaaaaaaaaaaaaaaaaaaaaugcaucccccccccccccccccccccccccccccccaaaggcucuuuucagagccaccagaauu

SEQ ID NO: 21366 - RNA, 6058 nt, Artificial Sequence
  SARS-CoV-2__MT919525.1__non-structural protein 3 (NSP3) mRNA gc
aggagaaagcuuaccauggcccccaccaaggugaccuucggcgacgacacggucaucgaggugcagggguacaagagcgugaacaucaccuucgagcuggacgagcgcaucgacaagguccucaacgagaagugcuccgccuacaccguggagcugggcaccgaggugaacgaguucgcgugcgucguggccgacgccgugaucaagacgcugcagccggucagcgagcuccugaccccccuggggaucgaccucgacgagugguccauggccaccuacuaccuguucgacgagagcggcgaguucaagcuggccucccacauguacugcagcuucuacccccccgacgaggacgaggaggagggggacugcgaggaggaggaguucgagccguccacccaguacgaguacggcacggaggacgacuaccagggcaagccccucgaguucggggcgaccagcgccgcccugcagcccgaggaggagcaggaggaggacuggcuggacgacgacucccagcagaccgugggccagcaggacgggagcgaggacaaccagaccacgaccauccagaccaucguggagguccagccccagcucgagauggagcugaccccgguggugcagacgaucgaggucaacuccuucagcggcuaccugaagcucaccgacaacguguacaucaagaacgccgacaucguggaggaggcgaagaaggucaagcccaccgugguggucaacgccgccaacguguaccugaagcacgggggcggcguggccggggcccugaacaaggcgaccaacaacgccaugcaggucgaguccgacgacuacaucgccacgaacggcccccucaagguggggggcagcugcguccuguccggccacaaccuggccaagcacugccuccacgugguggggcccaacgucaacaagggcgaggacauccagcugcugaagagcgccuacgagaacuucaaccagcacgaggugcuccuggcgccgcugcucuccgccgggaucuucggcgccgaccccauccacagccugcgggugugcgucgacaccgugcgcaccaacguguaccuggccgucuucgacaagaaccucuacgacaagcugguguccagcuuccuggagaugaagagcgagaagcagguggagcagaagaucgccgagauccccaaggaggaggucaagcccuucaucaccgaguccaagccgagcguggagcagcggaagcaggacgacaagaagaucaaggcgugcguggaggaggucacgaccacccucgaggagaccaaguuccugacggagaaccugcuccuguacaucgacaucaacgggaaccugcaccccgacuccgccacccucgugagcgacaucgacaucaccuuccugaagaaggacgcccccuacaucgugggcgacgucgugcaggagggcgugcugaccgccgucgugauccccacgaagaaggccgggggcaccaccgagaugcucgcgaaggcccugcgcaaggugccgaccgacaacuacaucacgaccuaccccgggcagggccugaacggguacaccgucgaggaggccaagaccgugcucaagaagugcaaguccgccuucuacauccugcccagcaucaucuccaacgagaagcaggagauccugggcaccgugagcuggaaccuccgggagaugcuggcgcacgccgaggagacgcgcaagcugaugcccgucugcguggagaccaaggccaucguguccaccauccagcggaaguacaagggcaucaagauccaggagggggucguggacuacggcgcccgcuucuacuucuacaccagcaagacgaccguggccucccugaucaacacccucaacgaccugaacgagacccuggucacgaugccgcucggguacgugacccacggccugaaccuggaggaggcggcccgguacaugcgcagccucaaggugcccgccaccgucuccgugagcucccccgacgccgugaccgccuacaacggguaccugacgagcuccagcaagacccccgaggagcacuucaucgagaccaucucccuggcgggcagcuacaaggacuggagcuacuccggccagagcacccagcucgggaucgaguuccugaagcggggcgacaaguccgucuacuacacgagcaacccgaccaccuuccaccuggacggggaggugaucaccuucgacaaccucaagacgcugcugucccuccgcgaggugcggaccaucaaggucuucaccaccguggacaacaucaaccugcacacgcagguggucgacaugagcaugaccuacggccagcaguucggccccaccuaccuggacggggccgacgugaccaagaucaagccccacaacucccacgagggcaagacguucuacgugcucccgaacgacgacacccugcgcgucgaggccuucgaguacuaccacaccaccgaccccagcuuccuggggcgguacauguccgcccucaaccacacgaagaaguggaaguacccccaggugaacggccugaccagcaucaagugggccgacaacaacugcuaccuggcgaccgcccuccugacccugcagcagaucgagcucaaguucaaccccccggcccugcaggacgccuacuaccgcgcgcgggccggggaggccgccaacuucugcgcccugauccucgcguacugcuccaagacggugggcgagcugggcgacguccgcgagaccaugagcuaccuguuccagcacgccaaccucgacuccugcaagcgggugcugaacgucgugugcaagaccugcgggcagcagcagaccacccugaagggcguggaggccgucauguacauggggacgcucagcuacgagcaguucaagaagggcgugcagauccccugcaccugcgggaagcaggccaccaaguaccuggugcagcaggagucccccuucgucaugaugagcgcccccccggcgcaguacgagcugaagcacggcaccuucacgugcgccuccgaguacaccggcaacuaccagugcgggcacuacaagcacaucaccagcaaggagacccucuacugcaucgacggcgcccugcugacgaagagcuccgaguacaaggggcccaucaccgacguguucuacaaggagaacagcuacaccaccacgaucaagcccgugaccuacaagcucgacggcgucgugugcaccgagaucgaccccaagcuggacaacuacuacaagaaggacaacuccuacuucaccgagcagccgaucgaccuggugcccaaccagcccuaccccaacgccagcuucgacaacuucaaguucgucugcgacaacaucaaguucgccgacgaccucaaccagcugacgggguacaagaagccggcgucccgcgagcugaaggugaccuucuuccccgaccucaacggcgacguggucgccaucgacuacaagcacuacacccccagcuucaagaagggcgccaagcugcugcacaagcccaucguguggcacgugaacaacgccaccaacaaggcgacguacaagccgaacaccuggugcauccggugccucugguccaccaagcccgucgagaccagcaacuccuucgacgugcugaagagcgaggacgcccaggggauggacaaccuggccugcgaggaccucaagcccguguccgaggaggucguggagaaccccacgauccagaaggacgugcuggagugcaacgucaagaccaccgagguggugggcgacaucauccugaagccggccaacaacagccucaagaucaccgaggaggucgggcacacggaccugauggccgcguacguggacaacuccagccugaccaucaagaagcccaacgagcucucccgcgugcugggccugaagacccucgccacccacgggcuggccgccgucaacagcgugcccugggacacgaucgccaacuacgcgaagccguuccugaacaagguggucuccaccaccaccaacaucgugacgcgcugccucaaccgggugugcaccaacuacaugcccuacuucuucacccugcugcuccagcugugcaccuucacccgcagcacgaacucccggaucaaggccagcaugcccaccaccaucgccaagaacaccgucaagagcgugggcaaguucugccuggaggccuccuucaacuaccucaagagccccaacuucuccaagcugaucaacaucaucaucugguuccugcuccugagcgugugccugggcucccucaucuacagcacggccgcgcuggggguccugauguccaaccucggcaugccgagcuacugcaccggguaccgcgagggcuaccugaacuccaccaacgugaccaucgccacguacugcaccggcagcauccccugcuccgugugccugagcgggcucgacucccuggacaccuaccccagccuggagaccauccagaucacgaucuccagcuucaagugggaccucaccgccuucggccuggucgccgagugguuccuggccuacauccucuucacccgguucuucuacgugcuggggcuggcggccaucaugcagcucuucuucuccuacuucgccgugcacuucaucagcaacuccuggcugauguggcugaucaucaaccugguccagauggcccccaucagcgcgauggugcgcauguacaucuucuucgccagcuucuacuacguguggaaguccuacguccacgugguggacggcugcaacagcuccaccugcaugaugugcuacaagcggaaccgcgccacgcgggucgagugcaccaccaucgugaacgggguccgccggagcuucuacguguacgccaacggcggcaagggguucugcaagcuccacaacuggaacugcgugaacugcgacaccuucugcgccggcuccacguucaucagcgacgaggucgcgcgcgaccugucccugcaguucaagcggccgaucaaccccaccgaccagagcuccuacaucguggacagcgugaccgucaagaacggguccauccaccucuacuucgacaaggccggccagaagaccuacgagcgccacagccugucccacuucgugaaccuggacaaccuccgggccaacaacacgaaggggagccugcccaucaacgugaucgucuucgacggcaaguccaagugcgaggagagcuccgccaagagcgccuccguguacuacagccagcugaugugccagcccauccuccugcuggaccaggcgcucgugagcgacgucggcgacuccgccgagguggccgugaagauguucgacgccuacgucaacaccuucagcuccaccuucaacgugccgauggagaagcugaagacccugguggccacggcggaggccgagcucgccaagaacgucagccuggacaacgugcuguccaccuucaucagcgccgcgcgccagggguucguggacuccgacgucgagaccaaggacgugguggagugccucaagcugagccaccaguccgacaucgaggucaccggcgacagcugcaacaacuacaugcugacguacaacaagguggagaacaugaccccccgggaccucggggccugcaucgacugcuccgcccgccacaucaacgcccagguggccaagagccacaacaucgcgcugaucuggaacgucaaggacuucaugucccugagcgagcagcuccggaagcagauccgcuccgccgccaagaagaacaaccugcccuucaagcugaccugcgccaccacgcgccagguggugaacgucgugaccaccaagaucgcccucaagggcgggugaggacuaguuauaagacugacuagcccgaugggccucccaacgggcccuccuccccuccuugcaccgagauuaauaaaaaaaaaaaaaaaaaaaaaaaaaaaaaaaaaaaaaaaaaaaaaaaaaaaaaaaaaaaaaaaaugcaucccccccccccccccccccccccccccccccaaaggcucuuuucagagccaccagaauu

SEQ ID NO: 21367 - RNA, 6058 nt, Artificial Sequence
  SARS-CoV-2__MT919768.1__non-structural protein 3 (NSP3) mRNA gc
aggagaaagcuuaccauggcccccaccaaggugaccuucggcgacgacacggucaucgaggugcagggguacaagagcgugaacaucaccuucgagcuggacgagcgcaucgacaagguccucaacgagaagugcuccgccuacaccguggagcugggcaccgaggugaacgaguucgcgugcgucguggccgacgccgugaucaagacgcugcagccggucagcgagcuccugaccccccuggggaucgaccucgacgagugguccauggccaccuacuaccuguucgacgagagcggcgaguucaagcuggccucccacauguacugcagcuucuacccccccgacgaggacgaggaggagggggacugcgaggaggaggaguucgagccguccacccaguacgaguacggcacggaggacgacuaccagggcaagccccucgaguucggggcgaccagcgccgcccugcagcccgaggaggagcaggaggaggacuggcuggacgacgacucccagcagaccgugggccagcaggacgggagcgaggacaaccagaccacgaccauccagaccaucguggagguccagccccagcucgagauggagcugaccccgguggugcagacgaucgaggucaacuccuucagcggcuaccugaagcucaccgacaacguguacaucaagaacgccgacaucguggaggaggcgaagaaggucaagcccaccgugguggucaacgccgccaacguguaccugaagcacgggggcggcguggccggggcccugaacaaggcgaccaacaacgccaugcaggucgaguccgacgacuacaucgccacgaacggcccccucaagguggggggcagcugcguccuguccggccacaaccuggccaagcacugccuccacgugguggggcccaacgucaacaagggcgaggacauccagcugcugaagagcgccuacgagaacuucaaccagcacgaggugcuccuggcgccgcugcucuccgccgggaucuucggcgccgaccccauccacagccugcgggugugcgucgacaccgugcgcaccaacguguaccuggccgucuucgacaagaaccucuacgacaagcugguguccagcuuccuggagaugaagagcgagaagcagguggagcagaagaucgccgagauccccaaggaggaggucaagcccuucaucaccgaguccaagccgagcguggagcagcggaagcaggacgacaagaagaucaaggcgugcguggaggaggucacgaccacccucgaggagaccaaguuccugacggagaaccugcuccuguacaucgacaucaacgggaaccugcaccccgacuccgccacccucgugagcgacaucgacaucaccuuccugaagaaggacgcccccuacaucgugggcgacgucgugcaggagggcgugcugaccgccgucgugauccccacgaagaaggccgggggcaccaccgagaugcucgcgaaggcccugcgcaaggugccgaccgacaacuacaucacgaccuaccccgggcagggccugaacggguacaccgucgaggaggccaagaccgugcucaagaagugcaaguccgccuucuacauccugcccagcaucaucuccaacgagaagcaggagauccugggcaccgugagcuggaaccuccgggagaugcuggcgcacgccgaggagacgcgcaagcugaugcccgucugcguggagaccaaggccaucguguccaccauccagcggaaguacaagggcaucaagauccaggagggggucguggacuacggcgcccgcuucuacuucuacaccagcaagacgaccguggccucccugaucaacacccucaacgaccugaacgagacccuggucacgaugccgcucggguacgugacccacggccugaaccuggaggaggcggcccgguacaugcgcagccucaaggugcccgccaccgucuccgugagcucccccgacgccgugaccgccuacaacggguaccugacgagcuccagcaagacccccgaggagcacuucaucgagaccaucucccuggcgggcagcuacaaggacuggagcuacuccggccagagcacccagcucgggaucgaguuccugaagcggggcgacaaguccgucuacuacacgagcaacccgaccaccuuccaccuggacggggaggugaucaccuucgacaaccucaagacgcugcugucccuccgcgaggugcggaccaucaaggucuucaccaccguggacaacaucaaccugcacacgcagguggucgacaugagcaugaccuacggccagcaguucggccccaccuaccuggacggggccgacgugaccaagaucaagccccacaacucccacgagggcaagacguucuacgugcucccgaacgacgacacccugcgcgucgaggccuucgaguacuaccacaccaccgaccccagcuuccuggggcgguacauguccgcccucaaccacacgaagaaguggaaguacccccaggugaacggccugaccagcaucaagugggccgacaacaacugcuaccuggcgaccgcccuccugacccugcagcagaucgagcucaaguucaaccccccggcccugcaggacgccuacuaccgcgcgcgggccggggaggccgccaacuucugcgcccugauccucgcguacugcaacaagacggugggcgagcugggcgacguccgcgagaccauguccuaccuguuccagcacgccaaccucgacagcugcaagcgggugcugaacgucgugugcaagaccugcgggcagcagcagaccacccugaagggcguggaggccgucauguacauggggacgcucuccuacgagcaguucaagaagggcgugcagauccccugcaccugcgggaagcaggccaccaaguaccuggugcagcaggagagccccuucgucaugauguccgcccccccggcgcaguacgagcugaagcacggcaccuucacgugcgccagcgaguacaccggcaacuaccagugcgggcacuacaagcacaucaccuccaaggagacccucuacugcaucgacggcgcccugcugacgaagagcagcgaguacaaggggcccaucaccgacguguucuacaaggagaacuccuacaccaccacgaucaagcccgugaccuacaagcucgacggcgucgugugcaccgagaucgaccccaagcuggacaacuacuacaagaaggacaacagcuacuucaccgagcagccgaucgaccuggugcccaaccagcccuaccccaacgccuccuucgacaacuucaaguucgucugcgacaacaucaaguucgccgacgaccucaaccagcugacgggguacaagaagccggcgagccgcgagcugaaggugaccuucuuccccgaccucaacggcgacguggucgccaucgacuacaagcacuacacccccuccuucaagaagggcgccaagcugcugcacaagcccaucguguggcacgugaacaacgccaccaacaaggcgacguacaagccgaacaccuggugcauccggugccucuggagcaagaagcccgucgagaccuccaacagcuucgacgugcugaaguccgaggacgcccaggggauggacaaccuggccugcgaggaccucaagcccgugagcgaggaggucguggagaaccccaccauccagaaggacgugcuggagugcaacgucaagacgaccgagguggugggcgacaucauccugaagccggccaacaacucccucaagaucaccgaggaggucgggcacaccgaccugauggccgcguacguggacaacagcucccugacgaucaagaagcccaacgagcucagccgcgugcugggccugaagacccucgccacccacgggcuggccgccgucaacuccgugcccugggacaccaucgccaacuacgcgaagccguuccugaacaagguggucagcacgaccaccaacaucgugacccgcugccucaaccgggugugcacgaacuacaugcccuacuucuucacccugcugcuccagcugugcaccuucacccgcuccaccaacagccggaucaaggccuccaugcccacgaccaucgccaagaacaccgucaagagcgugggcaaguucugccuggaggccagcuucaacuaccucaagucccccaacuucagcaagcugaucaacaucaucaucugguuccugcuccuguccgugugccugggcagccucaucuacuccaccgccgcgcuggggguccugaugagcaaccucggcaugccguccuacugcacgggguaccgcgagggcuaccugaacagcaccaacgugaccaucgccaccuacugcacgggcuccauccccugcagcgugugccuguccgggcucgacagccuggacaccuaccccucccuggagaccauccagaucaccaucagcuccuucaagugggaccucacggccuucggccuggucgccgagugguuccuggccuacauccucuucacccgguucuucuacgugcuggggcuggcggccaucaugcagcucuucuucagcuacuucgccgugcacuucaucuccaacagcuggcugauguggcugaucaucaaccugguccagauggcccccaucuccgcgauggugcgcauguacaucuucuucgccagcuucuacuacguguggaagagcuacguccacgugguggacggcugcaacuccagcaccugcaugaugugcuacaagcggaaccgcgccacccgggucgagugcacgaccaucgugaacgggguccgccgguccuucuacguguacgccaacggcggcaagggguucugcaagcuccacaacuggaacugcgugaacugcgacaccuucugcgccggcagcaccuucaucuccgacgaggucgcgcgcgaccugagccugcaguucaagcggccgaucaaccccacggaccaguccagcuacaucguggacuccgugaccgucaagaacgggagcauccaccucuacuucgacaaggccggccagaagaccuacgagcgccacucccugagccacuucgugaaccuggacaaccuccgggccaacaacaccaaggggucccugcccaucaacgugaucgucuucgacggcaagagcaagugcgaggaguccagcgccaaguccgccagcguguacuacucccagcugaugugccagcccauccuccugcuggaccaggcgcucgugagcgacgucggcgacagcgccgagguggccgugaagauguucgacgccuacgucaacacguucuccagcaccuucaacgugccgauggagaagcugaagacccugguggccaccgcggaggccgagcucgccaagaacgucucccuggacaacgugcugagcacguucaucuccgccgcgcgccagggguucguggacagcgacgucgagaccaaggacgugguggagugccucaagcugucccaccagagcgacaucgaggucaccggcgacuccugcaacaacuacaugcugaccuacaacaagguggagaacaugacgccccgggaccucggggccugcaucgacugcagcgcccgccacaucaacgcccagguggccaagucccacaacaucgcgcugaucuggaacgucaaggacuucaugagccuguccgagcagcuccggaagcagauccgcagcgccgccaagaagaacaaccugcccuucaagcugaccugcgccaccacccgccagguggugaacgucgugacgaccaagaucgcccucaagggcgggugaggacuaguuauaagacugacuagcccgaugggccucccaacgggcccuccuccccuccuugcaccgagauuaauaaaaaaaaaaaaaaaaaaaaaaaaaaaaaaaaaaaaaaaaaaaaaaaaaaaaaaaaaaaaaaaaugcaucccccccccccccccccccccccccccccccaaaggcucuuuucagagccaccagaauu

SEQ ID NO: 21368 - RNA, 6058 nt, Artificial Sequence
  SARS-CoV-2__MT919771.1__non-structural protein 3 (NSP3) mRNA gc
aggagaaagcuuaccauggcccccaccaaggugaccuucggcgacgacacggucaucgaggugcagggguacaagagcgugaacaucaccuucgagcuggacgagcgcaucgacaagguccucaacgagaagugcuccgccuacaccguggagcugggcaccgaggugaacgaguucgcgugcgucguggccgacgccgugaucaagacgcugcagccggucagcgagcuccugaccccccuggggaucgaccucgacgagugguccauggccaccuacuaccuguucgacgagagcggcgaguucaagcuggccucccacauguacugcagcuucuacccccccgacgaggacgaggaggagggggacugcgaggaggaggaguucgagccguccacccaguacgaguacggcacggaggacgacuaccagggcaagccccucgaguucggggcgaccagcgccgcccugcagcccgaggaggagcaggaggaggacuggcuggacgacgacucccagcagaccgugggccagcaggacgggagcgaggacaaccagaccacgaccauccagaccaucguggagguccagccccagcucgagauggagcugaccccgguggugcagacgaucgaggucaacuccuucagcggcuaccugaagcucaccgacaacguguacaucaagaacgccgacaucguggaggaggcgaagaaggucaagcccaccgugguggucaacgccgccaacguguaccugaagcacgggggcggcguggccggggcccugaacaaggcgaccaacaacgccaugcaggucgaguccgacgacuacaucgccacgaacggcccccucaagguggggggcagcugcguccuguccggccacaaccuggccaagcacugccuccacgugguggggcccaacgucaacaagggcgaggacauccagcugcugaagagcgccuacgagaacuucaaccagcacgaggugcuccuggcgccgcugcucuccgccgggaucuucggcgccgaccccauccacagccugcgggugugcgucgacaccgugcgcaccaacguguaccuggccgucuucgacaagaaccucuacgacaagcugguguccagcuuccuggagaugaagagcgagaagcagguggagcagaagaucgccgagauccccaaggaggaggucaagcccuucaucaccgaguccaagccgagcguggagcagcggaagcaggacgacaagaagaucaaggcgugcguggaggaggucacgaccacccucgaggagaccaaguuccugacggagaaccugcuccuguacaucgacaucaacgggaaccugcaccccgacuccgccacccucgugagcgacaucgacaucaccuuccugaagaaggacgcccccuacaucgugggcgacgucgugcaggagggcgugcugaccgccgucgugauccccacgaagaaggccgggggcaccaccgagaugcucgcgaaggcccugcgcaaggugccgaccgacaacuacaucacgaccuaccccgggcagggccugaacggguacaccgucgaggaggccaagaccgugcucaagaagugcaaguccgccuucuacauccugcccagcaucaucuccaacgagaagcaggagauccugggcaccgugagcuggaaccuccgggagaugcuggcgcacgccgaggagacgcgcaagcugaugcccgucugcguggagaccaaggccaucguguccaccauccagcggaaguacaagggcaucaagauccaggagggggucguggacuacggcgcccgcuucuacuucuacaccagcaagacgaccguggccucccugaucaacacccucaacgaccugaacgagacccuggucacgaugccgcucggguacgugacccacggccugaaccuggaggaggcggcccgguacaugcgcagccucaaggugcccgccaccgucuccgugagcucccccgacgccgugaccgccuacaacggguaccugacgagcuccagcaagacccccgaggagcacuucaucgagaccaucucccuggcgggcagcuacaaggacuggagcuacuccggccagagcacccagcucgggaucgaguuccugaagcggggcgacaaguccgucuacuacacgagcaacccgaccaccuuccaccuggacggggaggugaucaccuucgacaaccucaagacgcugcugucccuccgcgaggugcggaccaucaaggucuucaccaccguggacaacaucaaccugcacacgcagguggucgacaugagcaugaccuacggccagcaguucggccccaccuaccuggacggggccgacgugaccaagaucaagccccacaacucccacgagggcaagacguucuacgugcucccgaacgacgacacccugcgcgucgaggccuucgaguacuaccacaccaccgaccccagcuuccuggggcgguacauguccgcccucaaccacacgaagaaguggaaguacccccaggugaacggccugaccagcaucaagugggccgacaacaacugcuaccuggcgaccgcccuccugacccugcagcagaucgagcucaaguucaaccccccggcccugcaggacgccuacuaccgcgcgcgggccggggaggccgccaacuucugcgcccugauccucgcguacugcaacaagacggugggcgagcugggcgacguccgcgagaccauguccuaccuguuccagcacgccaaccucgacagcugcaagcgggugcugaacgucgugugcaagaccugcgggcagcagcagaccacccugaagggcguggaggccgucauguacauggggacgcucuccuacgagcaguucaagaagggcgugcagauccccugcaccugcgggaagcaggccaccaaguaccuggugcagcaggagagccccuucgucaugauguccgcccccccggcgcaguacgagcugaagcacggcaccuucacgugcgccagcgaguacaccggcaacuaccagugcgggcacuacaagcacaucaccuccaaggagacccucuacugcaucgacggcgcccugcugacgaagagcagcgaguacaaggggcccaucaccgacguguucuacaaggagaacuccuacaccaccacgaucaagcccgugaccuacaagcucgacggcgucgugugcaccgagaucgaccccaagcuggacaacuacuacaagaaggacaacagcuacuucaccgagcagccgaucgaccuggugcccaaccagcccuaccccaacgccuccuucgacaacuucaaguucgucugcgacaacaucaaguucgccgacgaccucaaccagcugacgggguacaagaagccggcgagccgcgagcugaaggugaccuucuuccccgaccucaacggcgacguggucgccaucgacuacaagcacuacacccccuccuucaagaagggcgccaagcugcugcacaagcccaucguguggcacgugaacaacgccaccaacaaggcgacguacaagccgaacaccuggugcauccggugccucuggagcaccaagcccgucgagaccuccaacagcuucgacgugcugaaguccgaggacgcccaggggauggacaaccuggccugcgaggaccucaagcccgugagcgaggaggucguggagaaccccacgauccagaaggacgugcuggagugcaacgucaagaccaccgagguggugggcgacaucauccugaagccggccaacaacucccucaagaucaccgaggaggucgggcacacggaccugauggccgcguacguggacaacagcucccugaccaucaagaagcccaacgagcucagccgcgugcugggccugaagacccucgccacccacgggcuggccgccgucaacuccgugcccugggacacgaucgccaacuacgcgaagccguuccugaacaagguggucagcaccaccaucaacaucgugacccgcugccucaaccgggugugcacgaacuacaugcccuacuucuucacccugcugcuccagcugugcaccuucacccgcuccaccaacagccggaucaaggccuccaugcccacgaccaucgccaagaacaccgucaagagcgugggcaaguucugccuggaggccagcuucaacuaccucaagucccccaacuucagcaagcugaucaacaucaucaucugguuccugcuccuguccgugugccugggcagccucaucuacuccaccgccgcgcuggggguccugaugagcaaccucggcaugccguccuacugcacgggguaccgcgagggcuaccugaacagcaccaacgugaccaucgccaccuacugcacgggcuccauccccugcagcgugugccuguccgggcucgacagccuggacaccuaccccucccuggagaccauccagaucaccaucagcuccuucaagugggaccucacggccuucggccuggucgccgagugguuccuggccuacauccucuucacccgguucuucuacgugcuggggcuggcggccaucaugcagcucuucuucagcuacuucgccgugcacuucaucuccaacagcuggcugauguggcugaucaucaaccugguccagauggcccccaucuccgcgauggugcgcauguacaucuucuucgccagcuucuacuacguguggaagagcuacguccacgugguggacggcugcaacuccagcaccugcaugaugugcuacaagcggaaccgcgccacccgggucgagugcacgaccaucgugaacgggguccgccgguccuucuacguguacgccaacggcggcaagggguucugcaagcuccacaacuggaacugcgugaacugcgacaccuucugcgccggcagcaccuucaucuccgacgaggucgcgcgcgaccugagccugcaguucaagcggccgaucaaccccacggaccaguccagcuacaucguggacuccgugaccgucaagaacgggagcauccaccucuacuucgacaaggccggccagaagaccuacgagcgccacucccugagccacuucgugaaccuggacaaccuccgggccaacaacaccaaggggucccugcccaucaacgugaucgucuucgacggcaagagcaagugcgaggaguccagcgccaaguccgccagcguguacuacucccagcugaugugccagcccauccuccugcuggaccaggcgcucgugagcgacgucggcgacagcgccgagguggccgugaagauguucgacgccuacgucaacacguucuccagcaccuucaacgugccgauggagaagcugaagacccugguggccaccgcggaggccgagcucgccaagaacgucucccuggacaacgugcugagcacguucaucuccgccgcgcgccagggguucguggacagcgacgucgagaccaaggacgugguggagugccucaagcugucccaccagagcgacaucgaggucaccggcgacuccugcaacaacuacaugcugaccuacaacaagguggagaacaugacgccccgggaccucggggccugcaucgacugcagcgcccgccacaucaacgcccagguggccaagucccacaacaucgcgcugaucuggaacgucaaggacuucaugagccuguccgagcagcuccggaagcagauccgcagcgccgccaagaagaacaaccugcccuucaagcugaccugcgccaccacccgccagguggugaacgucgugacgaccaagaucgcccucaagggcgggugaggacuaguuauaagacugacuagcccgaugggccucccaacgggcccuccuccccuccuugcaccgagauuaauaaaaaaaaaaaaaaaaaaaaaaaaaaaaaaaaaaaaaaaaaaaaaaaaaaaaaaaaaaaaaaaaugcaucccccccccccccccccccccccccccccccaaaggcucuuuucagagccaccagaauu

SEQ ID NO: 21369 - RNA, 6058 nt, Artificial Sequence
  SARS-CoV-2__MT919775.1__non-structural protein 3 (NSP3) mRNA gc
aggagaaagcuuaccauggcccccaccaaggugaccuucggcgacgacacggucaucgaggugcagggguacaagagcgugaacaucaccuucgagcuggacgagcgcaucgacaagguccucaacgagaagugcuccgccuacaccguggagcugggcaccgaggugaacgaguucgcgugcgucguggccgacgccgugaucaagacgcugcagccggucagcgagcuccugaccccccuggggaucgaccucgacgagugguccauggccaccuacuaccuguucgacgagagcggcgaguucaagcuggccucccacauguacugcagcuucuacccccccgacgaggacgaggaggagggggacugcgaggaggaggaguucgagccguccacccaguacgaguacggcacggaggacgacuaccagggcaagccccucgaguucggggcgaccagcgccgcccugcagcccgaggaggagcaggaggaggacuggcuggacgacgacucccagcagaccgugggccagcaggacgggagcgaggacaaccagaccacgaccauccagaccaucguggagguccagccccagcucgagauggagcugaccccgguggugcagacgaucgaggucaacuccuucagcggcuaccugaagcucaccgacaacguguacaucaagaacgccgacaucguggaggaggcgaagaaggucaagcccaccgugguggucaacgccgccaacguguaccugaagcacgggggcggcguggccggggcccugaacaaggcgaccaacaacgccaugcaggucgaguccgacgacuacaucgccacgaacggcccccucaagguggggggcagcugcguccuguccggccacaaccuggccaagcacugccuccacgugguggggcccaacgucaacaagggcgaggacauccagcugcugaagagcgccuacgagaacuucaaccagcacgaggugcuccuggcgccgcugcucuccgccgggaucuucggcgccgaccccauccacagccugcgggugugcgucgacaccgugcgcaccaacguguaccuggccgucuucgacaagaaccucuacgacaagcugguguccagcuuccuggagaugaagagcgagaagcagguggagcagaagaucgccgagauccccaaggaggaggucaagcccuucaucaccgaguccaagccgagcguggagcagcggaagcaggacgacaagaagaucaaggcgugcguggaggaggucacgaccacccucgaggagaccaaguuccugacggagaaccugcuccuguacaucgacaucaacgggaaccugcaccccgacuccgccacccucgugagcgacaucgacaucaccuuccugaagaaggacgcccccuacaucgugggcgacgucgugcaggagggcgugcugaccgccgucgugauccccacgaagaaggccgggggcaccaccgagaugcucgcgaaggcccugcgcaaggugccgaccgacaacuacaucacgaccuaccccgggcagggccugaacggguacaccgucgaggaggccaagaccgugcucaagaagugcaaguccgccuucuacauccugcccagcaucaucuccaacgagaagcaggagauccugggcaccgugagcuggaaccuccgggagaugcuggcgcacgccgaggagacgcgcaagcugaugcccgucugcguggagaccaaggccaucguguccaccauccagcggaaguacaagggcaucaagauccaggagggggucguggacuacggcgcccgcuucuacuucuacaccagcaagacgaccguggccucccugaucaacacccucaacgaccugaacgagacccuggucacgaugccgcucggguacgugacccacggccugaaccuggaggaggcggcccgguacaugcgcagccucaaggugcccgccaccgucuccgugagcucccccgacgccgugaccgccuacaacggguaccugacgagcuccagcaagacccccgaggagcacuucaucgagaccaucucccuggcgggcagcuacaaggacuggagcuacuccggccagagcacccagcucgggaucgaguuccugaagcggggcgacaaguccgucuacuacacgagcaacccgaccaccuuccaccuggacggggaggugaucaccuucgacaaccucaagacgcugcugucccuccgcgaggugcggaccaucaaggucuucaccaccguggacaacaucaaccugcacacgcagguggucgacaugagcaugaccuacggccagcaguucggccccaccuaccuggacggggccgacgugaccaagaucaagccccacaacucccacgagggcaagacguucuacgugcucccgaacgacgacacccugcgcgucgaggccuucgaguacuaccacaccaccgaccccagcuuccuggggcgguacauguccgcccucaaccacacgaagaaguggaaguacccccaggugaacggccugaccagcaucaagugggccgacaacaacugcuaccuggcgaccgcccuccugacccugcagcagaucgagcucaaguucaaccccccggcccugcaggacgccuacuaccgcgcgcgggccggggaggccgccaacuucugcgcccugauccucgcguacugcaacaagacggugggcgagcugggcgacguccgcgagaccauguccuaccuguuccagcacgccaaccucgacagcugcaagcgggugcugaacgucgugugcaagaccugcgggcagcagcagaccacccugaagggcguggaggccgucauguacauggggacgcucuccuacgagcaguucaagaagggcgugcagauccccugcaccugcgggaagcaggccaccaaguaccuggugcagcaggagagccccuucgucaugauguccgcccccccggcgcaguacgagcugaagcacggcaccuucacgugcgccagcgaguacaccggcaacuaccagugcgggcacuacaagcacaucaccuccaaggagacccucuacugcaucgacggcgcccugcugacgaagagcagcgaguacaaggggcccaucaccgacguguucuacaaggagaacuccuacaccaccacgaucaagcccgugaccuacaagcucgacggcgucgugugcaccgagaucgaccccaagcuggacaacuacuacaagaaggacaacagcuacuucaccgagcagccgaucgaccuggugcccaaccagcccuaccccaacgccuccuucgacaacuucaaguucgucugcgacaacaucaaguucgccgacgaccucaaccagcugacgggguacaagaagccggcgagccgcgagcugaaggugaccuucuuccccgaccucaacggcgacguggucgccaucgacuacaagcacuacacccccuccuucaagaagggcgccaagcugcugcacaagcccaucguguggcacgugaacaacgccaccaacaaggcgacguacaagccgaacaccuggugcauccggugccucuggagcaccaagcccgucgagaccuccaacagcuucgacgugcugaaguccgaggacgcccaggggauggacaaccuggccugcgaggaccucaagcccgugagcgaggaggucguggagaaccccacgauccagaaggacgugcuggagugcaacgucaagaccaccgagguggugggcgacaucauccugaagccggccaacaacucccucaagaucaccgaggaggucgggcacacggaccugauggccgcguacguggacaacagcucccugaccaucaagaagcccaacgagcucagccgcgugcugggccugaagacccucgccacccacgggcuggccgccgucaacuccgugcccugggacacgaucgccaacuacgcgaagccguuccugaacaagguggucagcaccaccaccaacaucgugacgcgcugccucaaccgggugugcaccaacuacaugcccuacuucuucacccugcugcuccagcugugcaccuucacccgcuccacgaacagccggaucaaggccuccaugcccaccaccaucgccaagaacaccgucaagagcgugggcaaguucugccuggaggccagcuucaacuaccucaagucccccaacuucagcaagcugaucaacaucaucaucugguuccugcuccuguccgugugccugggcagccucaucuacuccacggccgcgcuggggguccugaugagcaaccucggcaugccguccuacugcaccggguaccgcgagggcuaccugaacagcaucaacgugaccaucgccaccuacugcacgggcuccauccccugcagcgugugccuguccgggcucgacagccuggacaccuaccccucccuggagaccauccagaucaccaucagcuccuucaagugggaccucacggccuucggccuggucgccgagugguuccuggccuacauccucuucacccgguucuucuacgugcuggggcuggcggccaucaugcagcucuucuucagcuacuucgccgugcacuucaucuccaacagcuggcugauguggcugaucaucaaccugguccagauggcccccaucuccgcgauggugcgcauguacaucuucuucgccagcuucuacuacguguggaagagcuacguccacgugguggacggcugcaacuccagcaccugcaugaugugcuacaagcggaaccgcgccacccgggucgagugcacgaccaucgugaacgggguccgccgguccuucuacguguacgccaacggcggcaagggguucugcaagcuccacaacuggaacugcgugaacugcgacaccuucugcgccggcagcaccuucaucuccgacgaggucgcgcgcgaccugagccugcaguucaagcggccgaucaaccccacggaccaguccagcuacaucguggacuccgugaccgucaagaacgggagcauccaccucuacuucgacaaggccggccagaagaccuacgagcgccacucccugagccacuucgugaaccuggacaaccuccgggccaacaacaccaaggggucccugcccaucaacgugaucgucuucgacggcaagagcaagugcgaggaguccagcgccaaguccgccagcguguacuacucccagcugaugugccagcccauccuccugcuggaccaggcgcucgugagcgacgucggcgacagcgccgagguggccgugaagauguucgacgccuacgucaacacguucuccagcaccuucaacgugccgauggagaagcugaagacccugguggccaccgcggaggccgagcucgccaagaacgucucccuggacaacgugcugagcacguucaucuccgccgcgcgccagggguucguggacagcgacgucgagaccaaggacgugguggagugccucaagcugucccaccagagcgacaucgaggucaccggcgacuccugcaacaacuacaugcugaccuacaacaagguggagaacaugacgccccgggaccucggggccugcaucgacugcagcgcccgccacaucaacgcccagguggccaagucccacaacaucgcgcugaucuggaacgucaaggacuucaugagccuguccgagcagcuccggaagcagauccgcagcgccgccaagaagaacaaccugcccuucaagcugaccugcgccaccacccgccagguggugaacgucgugacgaccaagaucgcccucaagggcgggugaggacuaguuauaagacugacuagcccgaugggccucccaacgggcccuccuccccuccuugcaccgagauuaauaaaaaaaaaaaaaaaaaaaaaaaaaaaaaaaaaaaaaaaaaaaaaaaaaaaaaaaaaaaaaaaaugcaucccccccccccccccccccccccccccccccaaaggcucuuuucagagccaccagaauu

SEQ ID NO: 21370 - RNA, 6058 nt, Artificial Sequence
  SARS-CoV-2__MT919776.1__non-structural protein 3 (NSP3) mRNA gc
aggagaaagcuuaccauggcccccaccaaggugaccuucggcgacgacacggucaucgaggugcagggguacaagagcgugaacaucaccuucgagcuggacgagcgcaucgacaagguccucaacgagaagugcuccgccuacaccguggagcugggcaccgaggugaacgaguucgcgugcgucguggccgacgccgugaucaagacgcugcagccggucagcgagcuccugaccccccuggggaucgaccucgacgagugguccauggccaccuacuaccuguucgacgagagcggcgaguucaagcuggccucccacauguacugcagcuucuacccccccgacgaggacgaggaggagggggacugcgaggaggaggaguucgagccguccacccaguacgaguacggcacggaggacgacuaccagggcaagccccucgaguucggggcgaccagcgccgcccugcagcccgaggaggagcaggaggaggacuggcuggacgacgacucccagcagaccgugggccagcaggacgggagcgaggacaaccagaccacgaccauccagaccaucguggagguccagccccagcucgagauggagcugaccccgguggugcagacgaucgaggucaacuccuucagcggcuaccugaagcucaccgacaacguguacaucaagaacgccgacaucguggaggaggcgaagaaggucaagcccaccgugguggucaacgccgccaacguguaccugaagcacgggggcggcguggccggggcccugaacaaggcgaccaacaacgccaugcaggucgaguccgacgacuacaucgccacgaacggcccccucaagguggggggcagcugcguccuguccggccacaaccuggccaagcacugccuccacgugguggggcccaacgucaacaagggcaaggacauccagcugcugaagagcgccuacgagaacuucaaccagcacgaggugcuccuggcgccgcugcucuccgccgggaucuucggcgccgaccccauccacagccugcgggugugcgucgacaccgugcgcaccaacguguaccuggccgucuucgacaagaaccucuacgacaagcugguguccagcuuccuggagaugaagagcgagaagcagguggagcagaagaucgccgagauccccaaggaggaggucaagcccuucaucaccgaguccaagccgagcguggagcagcggaagcaggacgacaagaagaucaaggcgugcguggaggaggucacgaccacccucgaggagaccaaguuccugacggagaaccugcuccuguacaucgacaucaacgggaaccugcaccccgacuccgccacccucgugagcgacaucgacaucaccuuccugaagaaggacgcccccuacaucgugggcgacgucgugcaggagggcgugcugaccgccgucgugauccccacgaagaaggccgggggcaccaccgagaugcucgcgaaggcccugcgcaaggugccgaccgacaacuacaucacgaccuaccccgggcagggccugaacggguacaccgucgaggaggccaagaccgugcucaagaagugcaaguccgccuucuacauccugcccagcaucaucuccaacgagaagcaggagauccugggcaccgugagcuggaaccuccgggagaugcuggcgcacgccgaggagacgcgcaagcugaugcccgucugcguggagaccaaggccaucguguccaccauccagcggaaguacaagggcaucaagauccaggagggggucguggacuacggcgcccgcuucuacuucuacaccagcaagacgaccguggccucccugaucaacacccucaacgaccugaacgagacccuggucacgaugccgcucggguacgugacccacggccugaaccuggaggaggcggcccgguacaugcgcagccucaaggugcccgccaccgucuccgugagcucccccgacgccgugaccgccuacaacggguaccugacgagcuccagcaagacccccgaggagcacuucaucgagaccaucucccuggcgggcagcuacaaggacuggagcuacuccggccagagcacccagcucgggaucgaguuccugaagcggggcgacaaguccgucuacuacacgagcaacccgaccaccuuccaccuggacggggaggugaucaccuucgacaaccucaagacgcugcugucccuccgcgaggugcggaccaucaaggucuucaccaccguggacaacaucaaccugcacacgcagguggucgacaugagcaugaccuacggccagcaguucggccccaccuaccuggacggggccgacgugaccaagaucaagccccacaacucccacgagggcaagacguucuacgugcucccgaacgacgacacccugcgcgucgaggccuucgaguacuaccacaccaccgaccccagcuuccuggggcgguacauguccgcccucaaccacacgaagaaguggaaguacccccaggugaacggccugaccagcaucaagugggccgacaacaacugcuaccuggcgaccgcccuccugacccugcagcagaucgagcucaaguucaaccccccggcccugcaggacgccuacuaccgcgcgcgggccggggaggccgccaacuucugcgcccugauccucgcguacugcaacaagacggugggcgagcugggcgacguccgcgagaccauguccuaccuguuccagcacgccaaccucgacagcugcaagcgggugcugaacgucgugugcaagaccugcgggcagcagcagaccacccugaagggcguggaggccgucauguacauggggacgcucuccuacgagcaguucaagaagggcgugcagauccccugcaccugcgggaagcaggccaccaaguaccuggugcagcaggagagccccuucgucaugauguccgcccccccggcgcaguacgagcugaagcacggcaccuucacgugcgccagcgaguacaccggcaacuaccagugcgggcacuacaagcacaucaccuccaaggagacccucuacugcaucgacggcgcccugcugacgaagagcagcgaguacaaggggcccaucaccgacguguucuacaaggagaacuccuacaccaccacgaucaagcccgugaccuacaagcucgacggcgucgugugcaccgagaucgaccccaagcuggacaacuacuacaagaaggacaacagcuacuucaccgagcagccgaucgaccuggugcccaaccagcccuaccccaacgccuccuucgacaacuucaaguucgucugcgacaacaucaaguucgccgacgaccucaaccagcugacgggguacaagaagccggcgagccgcgagcugaaggugaccuucuuccccgaccucaacggcgacguggucgccaucgacuacaagcacuacacccccuccuucaagaagggcgccaagcugcugcacaagcccaucguguggcacgugaacaacgccaccaacaaggcgacguacaagccgaacaccuggugcauccggugccucuggagcaccaagcccgucgagaccuccaacagcuucgacgugcugaaguccgaggacgcccaggggauggacaaccuggccugcgaggaccucaagcccgugagcgaggaggucguggagaaccccacgauccagaaggacgugcuggagugcaacgucaagaccaccgagguggugggcgacaucauccugaagccggccaacaacucccucaagaucaccgaggaggucgggcacacggaccugauggccgcguacguggacaacagcucccugaccaucaagaagcccaacgagcucagccgcgugcugggccugaagacccucgccacccacgggcuggccgccgucaacuccgugcccugggacacgaucgccaacuacgcgaagccguuccugaacaagguggucagcaccaccaccaacaucgugacgcgcugccucaaccgggugugcaccaacuacaugcccuacuucuucacccugcugcuccagcugugcaccuucacccgcuccacgaacagccggaucaaggccuccaugcccaccaccaucgccaagaacaccgucaagagcgugggcaaguucugccuggaggccagcuucaacuaccucaagucccccaacuucagcaagcugaucaacaucaucaucugguuccugcuccuguccgugugccugggcagccucaucuacuccacggccgcgcuggggguccugaugagcaaccucggcaugccguccuacugcaccggguaccgcgagggcuaccugaacagcaccaacgugaccaucgccacguacugcaccggcuccauccccugcagcgugugccuguccgggcucgacagccuggacaccuaccccucccuggagaccauccagaucacgaucagcuccuucaagugggaccucaccgccuucggccuggucgccgagugguuccuggccuacauccucuucacccgguucuucuacgugcuggggcuggcggccaucaugcagcucuucuucagcuacuucgccgugcacuucaucuccaacagcuggcugauguggcugaucaucaaccugguccagauggcccccaucuccgcgauggugcgcauguacaucuucuucgccagcuucuacuacguguggaagagcuacguccacgugguggacggcugcaacuccagcaccugcaugaugugcuacaagcggaaccgcgccacgcgggucgagugcaccaccaucgugaacgggguccgccgguccuucuacguguacgccaacggcggcaagggguucugcaagcuccacaacuggaacugcgugaacugcgacaccuucugcgccggcagcacguucaucuccgacgaggucgcgcgcgaccugagccugcaguucaagcggccgaucaaccccaccgaccaguccagcuacaucguggacuccgugaccgucaagaacgggagcauccaccucuacuucgacaaggccggccagaagaccuacgagcgccacucccugagccacuucgugaaccuggacaaccuccgggccaacaacacgaaggggucccugcccaucaacgugaucgucuucgacggcaagagcaagugcgaggaguccagcgccaaguccgccagcguguacuacucccagcugaugugccagcccauccuccugcuggaccaggcgcucgugagcgacgucggcgacagcgccgagguggccgugaagauguucgacgccuacgucaacaccuucuccagcaccuucaacgugccgauggagaagcugaagacccugguggccacggcggaggccgagcucgccaagaacgucucccuggacaacgugcugagcaccuucaucuccgccgcgcgccagggguucguggacagcgacgucgagaccaaggacgugguggagugccucaagcugucccaccagagcgacaucgaggucaccggcgacuccugcaacaacuacaugcugacguacaacaagguggagaacaugaccccccgggaccucggggccugcaucgacugcagcgcccgccacaucaacgcccagguggccaagucccacaacaucgcgcugaucuggaacgucaaggacuucaugagccuguccgagcagcuccggaagcagauccgcagcgccgccaagaagaacaaccugcccuucaagcugaccugcgccaccacgcgccagguggugaacgucgugaccaccaagaucgcccucaagggcgggugaggacuaguuauaagacugacuagcccgaugggccucccaacgggcccuccuccccuccuugcaccgagauuaauaaaaaaaaaaaaaaaaaaaaaaaaaaaaaaaaaaaaaaaaaaaaaaaaaaaaaaaaaaaaaaaaugcaucccccccccccccccccccccccccccccccaaaggcucuuuucagagccaccagaauu

SEQ ID NO: 21371 - RNA, 6058 nt, Artificial Sequence
  SARS-CoV-2__MT919777.1__non-structural protein 3 (NSP3) mRNA gc
aggagaaagcuuaccauggcccccaccaaggugaccuucggcgacgacacggucaucgaggugcagggguacaagagcgugaacaucaccuucgagcuggacgagcgcaucgacaagguccucaacgagaagugcuccgccuacaccguggagcugggcaccgaggugaacgaguucgcgugcgucguggccgacgccgugaucaagacgcugcagccggucagcgagcuccugaccccccuggggaucgaccucgacgagugguccauggugaccuacuaccuguucgacgagagcggcgaguucaagcuggccucccacauguacugcagcuucuacccccccgacgaggacgaggaggagggggacugcgaggaggaggaguucgagccguccacccaguacgaguacggcacggaggacgacuaccagggcaagccccucgaguucggggccaccagcgcggcccugcagcccgaggaggagcaggaggaggacuggcuggacgacgacucccagcagaccgugggccagcaggacgggagcgaggacaaccagaccacgaccauccagaccaucgucgaggugcagccccagcucgagauggagcugaccccggugguccagacgaucgaggugaacuccuucagcggcuaccugaagcucaccgacaacguguacaucaagaacgccgacaucgucgaggaggugaagaaggugaagcccaccgucguggugaacgccgcgaacgucuaccugaagcacgggggcggcguggccggggcccugaacaaggccaccaacaacgccaugcaggucgaguccgacgacuacaucgcgacgaacggcccccucaagguggggggcagcugcgugcuguccggccacaaccuggccaagcacugccuccacgucguggggcccaacgugaacaagggcgaggacauccagcugcugaagagcgccuacgagaacuucaaccagcacgagguccuccuggccccgcugcucuccgccgggaucuucggcgcggaccccauccacagccugcgggugugcguggacaccguccgcaccaacguguaccuggccguguucgacaagaaccucuacgacaagcuggucuccagcuuccuggagaugaagagcgagaagcagguggagcagaagaucgccgagauccccaaggaggaggugaagcccuucaucaccgaguccaagccgagcgucgagcagcggaagcaggacgacaagaagaucaaggccugcguggaggaggugacgaccacccucgaggagaccaaguuccugacggagaaccugcuccuguacaucgacaucaacgggaaccugcaccccgacuccgccacccucgucagcgacaucgacaucaccuuccugaagaaggacgcgcccuacaucgugggcgacgugguccaggagggcgugcugaccgccguggucauccccacgaagaaggccgggggcaccaccgagaugcucgccaaggcccugcgcaaggugccgaccgacaacuacaucacgaccuaccccgggcagggccugaacggguacaccguggaggaggcgaagaccguccucaagaagugcaaguccgccuucuacauccugcccagcaucaucuccaacgagaagcaggagauccugggcaccgugagcuggaaccuccgggagaugcuggcccacgccgaggagacgcgcaagcugaugcccgugugcgucgagaccaaggcgaucguguccaccauccagcggaaguacaagggcaucaagauccaggaggggguggucgacuacggcgcccgcuucuacuucuacaccagcaagacgaccguggccucccugaucaacacccucaacgaccugaacgagacccuggugacgaugccgcucggguacgucacccacggccugaaccuggaggaggccgcccgguacaugcgcagccucaaggugcccgcgaccguguccgucagcucccccgacgccgugaccgccuacaacggguaccugacgagcuccagcaagacccccgaggagcacuucaucgagaccaucucccuggccggcagcuacaaggacuggagcuacuccggccagagcacccagcucgggaucgaguuccugaagcggggcgacaaguccguguacuacacgagcaacccgaccaccuuccaccuggacggggaggucaucaccuucgacaaccucaagacgcugcugucccuccgcgaggugcggaccaucaagguguucaccaccgucgacaacaucaaccugcacacgcaggugguggacaugagcaugaccuacggccagcaguucggccccaccuaccuggacggggccgacgucaccaagaucaagccccacaacucccacgagggcaagacguucuacgugcucccgaacgacgacacccugcgcguggaggcguucgaguacuaccacaccaccgaccccagcuuccuggggcgguacauguccgcccucaaccacacgaagaaguggaaguacccccaggucaacggccugaccagcaucaagugggccgacaacaacugcuaccuggccaccgcccuccugacccugcagcagaucgagcucaaguucaaccccccggcgcugcaggacgccuacuaccgcgcccgggccggggaggcggccaacuucugcgcccugauccucgccuacugcaacaagacggugggcgagcugggcgacguccgcgagaccauguccuaccuguuccagcacgccaaccucgacagcugcaagcgggugcugaacguggucugcaagaccugcgggcagcagcagaccacccugaagggcguggaggcggugauguacauggggacgcucuccuacgagcaguucaagaagggcguccagauccccugcaccugcgggaagcaggccaccaaguaccuggugcagcaggagagccccuucgugaugauguccgcccccccggcccaguacgagcugaagcacggcaccuucacgugcgccagcgaguacaccggcaacuaccagugcgggcacuacaagcacaucaccuccaaggagacccucuacugcaucgacggcgcgcugcugacgaagagcagcgaguacaaggggcccaucaccgacgucuucuacaaggagaacuccuacaccaccacgaucaagcccgugaccuacaagcucgacggcguggucugcaccgagaucgaccccaagcuggacaacuacuacaagaaggacaacagcuacuucaccgagcagccgaucgaccuggugcccaaccagcccuaccccaacgccuccuucgacaacuucaaguucgugugcgacaacaucaaguucgccgacgaccucaaccagcugacgggguacaagaagccggccagccgcgagcugaaggucaccuucuuccccgaccucaacggcgacgugguggccaucgacuacaagcacuacacccccuccuucaagaagggcgcgaagcugcugcacaagcccaucgucuggcacgugaacaacgccaccaacaaggccacguacaagccgaacaccuggugcauccggugccucuggagcaccaagcccguggagaccuccaacagcuucgacguccugaaguccgaggacgcccaggggauggacaaccuggcgugcgaggaccucaagcccgugagcgaggagguggucgagaaccccacgauccagaaggacgugcuggagugcaacgugaagaccaccgaggucgugggcgacaucauccugaagccggccaacaacucccucaagaucaccgaggagguggggcacacggaccugauggccgccuacgucgacaacagcucccugaccaucaagaagcccaacgagcucagccgcgugcugggccugaagacccucgccacccacgggcuggcggccgugaacuccguccccugggacacgaucgccaacuacgccaagccguuccugaacaagguggugagcaccaccaccaacaucgucacgcgcugccucaaccgggugugcaccaacuacaugcccuacuucuucacccugcugcuccagcugugcaccuucacccgcuccacgaacagccggaucaaggccuccaugcccaccaccaucgcgaagaacaccgugaagagcgucggcaaguucugccuggaggccagcuucaacuaccucaagucccccaacuucagcaagcugaucaacaucaucaucugguuccugcuccuguccgugugccugggcagccucaucuacuccacggccgcccugggggugcugaugagcaaccucggcaugccguccuacugcaccggguaccgcgagggcuaccugaacagcaccaacgucaccaucgccacguacugcaccggcuccauccccugcagcgugugccuguccgggcucgacagccuggacaccuaccccucccuggagaccauccagaucacgaucagcuccuucaagugggaccucaccgcguucggccugguggccgagugguuccuggccuacauccucuucacccgguucuucuacguccuggggcuggccgccaucaugcagcucuucuucagcuacuucgcggugcacuucaucuccaacagcuggcugauguggcugaucaucaaccuggugcagauggcccccaucuccgccaugguccgcauguacaucuucuucgccagcuucuacuacguguggaagagcuacgugcacgucguggacggcugcaacuccagcaccugcaugaugugcuacaagcggaaccgcgcgacgcgggucgagugcaccaccaucgugaacggggugcgccgguccuucuacgucuacgccaacggcggcaagggguucugcaagcuccacaacuggaacugcgugaacugcgacaccuucugcgccggcagcacguucaucuccgacgagguggcccgcgaccugagccugcaguucaagcggccgaucaaccccaccgaccaguccagcuacaucgucgacuccgugaccgugaagaacgggagcauccaccucuacuucgacaaggccggccagaagaccuacgagcgccacucccugagccacuucgucaaccuggacaaccuccgggcgaacaacacgaaggggucccugcccaucaacgugaucguguucgacggcaagagcaagugcgaggaguccagcgccaaguccgccagcgucuacuacucccagcugaugugccagcccauccuccugcuggaccaggcccucgugagcgacgugggcgacagcgccgaggucgcggugaagauguucgacgccuacgugaacaccuucuccagcaccuucaacgucccgauggagaagcugaagacccugguggccacggccgaggccgagcucgcgaagaacgugucccuggacaacguccugagcaccuucaucuccgccgcccgccagggguucguggacagcgacguggagaccaaggacgucguggagugccucaagcugucccaccagagcgacaucgaggugaccggcgacuccugcaacaacuacaugcugacguacaacaaggucgagaacaugaccccccgggaccucggggccugcaucgacugcagcgcgcgccacaucaacgcccagguggccaagucccacaacaucgcccugaucuggaacgugaaggacuucaugagccuguccgagcagcuccggaagcagauccgcagcgccgcgaagaagaacaaccugcccuucaagcugaccugcgccaccacgcgccaggucgugaacguggucaccaccaagaucgcccucaagggcgggugaggacuaguuauaagacugacuagcccgaugggccucccaacgggcccuccuccccuccuugcaccgagauuaauaaaaaaaaaaaaaaaaaaaaaaaaaaaaaaaaaaaaaaaaaaaaaaaaaaaaaaaaaaaaaaaaugcaucccccccccccccccccccccccccccccccaaaggcucuuuucagagccaccagaauu

SEQ ID NO: 21372 - RNA, 6058 nt, Artificial Sequence
  SARS-CoV-2__MT919783.1__non-structural protein 3 (NSP3) mRNA gc
aggagaaagcuuaccauggcccccaccaaggugaccuucggcgacgacacggucaucgaggugcagggguacaagagcgugaacaucaccuucgagcuggacgagcgcaucgacaagguccucaacgagaagugcuccgccuacaccguggagcugggcaccgaggugaacgaguucgcgugcgucguggccgacgccgugaucaagacgcugcagccggucagcgagcuccugaccccccuggggaucgaccucgacgagugguccauggccaccuacuaccuguucgacgagagcggcgaguucaagcuggccucccacauguacugcagcuucuacccccccgacgaggacgaggaggagggggacugcgaggaggaggaguucgagccguccacccaguacgaguacggcacggaggacgacuaccagggcaagccccucgaguucggggcgaccagcgccgcccugcagcccgaggaggagcaggaggaggacuggcuggacgacgacucccagcagaccgugggccagcaggacgggagcgaggacaaccagaccacgaccauccagaccaucguggagguccagccccagcucgagauggagcugaccccgguggugcagacgaucgaggucaacuccuucagcggcuaccugaagcucaccgacaacguguacaucaagaacgccgacaucguggaggaggcgaagaaggucaagcccaccgugguggucaacgccgccaacguguaccugaagcacgggggcggcguggccggggcccugaacaaggcgaccaacaacgccaugcaggucgaguccgacgacuacaucgccacgaacggcccccucaagguggggggcagcugcguccuguccggccacaaccuggccaagcacugccuccacgugguggggcccaacgucaacaagggcgaggacauccagcugcugaagagcgccuacgagaacuucaaccagcacgaggugcuccuggcgccgcugcucuccgccgggaucuucggcgccgaccccauccacagccugcgggugugcgucgacaccgugcgcaccaacguguaccuggccgucuucgacaagaaccucuacgacaagcugguguccagcuuccuggagaugaagagcgagaagcagguggagcagaagaucgccgagauccccaaggaggaggucaagcccuucaucaccgaguccaagccgagcguggagcagcggaagcaggacgacaagaagaucaaggcgugcguggaggaggucacgaccacccucgaggagaccaaguuccugacggagaaccugcuccuguacaucgacaucaacgggaaccugcaccccgacuccgccacccucgugagcgacaucgacaucaccuuccugaagaaggacgcccccuacaucgugggcgacgucgugcaggagggcgugcugaccgccgucgugauccccacgaagaaggccgggggcaccaccgagaugcucgcgaaggcccugcgcaaggugccgaccgacaacuacaucacgaccuaccccgggcagggccugaacggguacaccgucgaggaggccaagaccgugcucaagaagugcaaguccgccuucuacauccugcccagcaucaucuccaacgagaagcaggagauccugggcaccgugagcuggaaccuccgggagaugcuggcgcacgccgaggagacgcgcaagcugaugcccgucugcguggagaccaaggccaucguguccaccauccagcggaaguacaagggcaucaagauccaggagggggucguggacuacggcgcccgcuucuacuucuacaccagcaagacgaccguggccucccugaucaacacccucaacgaccugaacgagacccuggucacgaugccgcucggguacgugacccacggccugaaccuggaggaggcggcccgguacaugcgcagccucaaggugcccgccaccgucuccgugagcucccccgacgccgugaccgccuacaacggguaccugacgagcuccagcaagacccccgaggagcacuucaucgagaccaucucccuggcgggcagcuacaaggacuggagcuacuccggccagagcacccagcucgggaucgaguuccugaagcggggcgacaaguccgucuacuacacgagcaacccgaccaccuuccaccuggacggggaggugaucaccuucgacaaccucaagacgcugcugucccuccgcgaggugcggaccaucaaggucuucaccaccguggacaacaucaaccugcacacgcagguggucgacaugagcaugaccuacggccagcaguucggccccaccuaccuggacggggccgacgugaccaagaucaagccccacaacucccacgagggcaagacguucuacgugcucccgaacgacgacacccugcgcgucgaggccuucgaguacuaccacaccaccgaccccagcuuccuggggcgguacauguccgcccucaaccacacgaagaaguggaaguacccccaggugaacggccugaccagcaucaagugggccgacaacaacugcuaccuggcgaccgcccuccugacccugcagcagaucgagcucaaguucaaccccccggcccugcaggacgccuacuaccgcgcgcgggccggggaggccgccaacuucugcgcccugauccucgcguacugcaacaagacggugggcgagcugggcgacguccgcgagaccauguccuaccuguuccagcacgccaaccucgacagcugcaagcgggugcugaacgucgugugcaagaccugcgggcagcagcagaccacccugaagggcguggaggccgucauguacauggggacgcucuccuacgagcaguucaagaagggcgugcagauccccugcaccugcgggaagcaggccaccaaguaccuggugcagcaggagagccccuucgucaugauguccgcccccccggcgcaguacgagcugaagcacggcaccuucacgugcgccagcgaguacaccggcaacuaccagugcgggcacuacaagcacaucaccuccaaggagacccucuacugcaucgacggcgcccugcugacgaagagcagcgaguacaaggggcccaucaccgacguguucuacaaggagaacuccuacaccaccacgaucaagcccgugaccuacaagcucgacggcaucgucugcaccgagaucgaccccaagcuggacaacuacuacaagaaggacaacagcuacuucaccgagcagccgaucgaccuggugcccaaccagcccuaccccaacgccuccuucgacaacuucaaguucgugugcgacaacaucaaguucgccgacgaccucaaccagcugacgggguacaagaagccggcgagccgcgagcugaaggucaccuucuuccccgaccucaacggcgacgugguggccaucgacuacaagcacuacacccccuccuucaagaagggcgccaagcugcugcacaagcccaucgucuggcacgugaacaacgccaccaacaaggcgacguacaagccgaacaccuggugcauccggugccucuggagcaccaagcccguggagaccuccaacagcuucgacguccugaaguccgaggacgcccaggggauggacaaccuggccugcgaggaccucaagcccgugagcgaggagguggucgagaaccccacgauccagaaggacgugcuggagugcaacgugaagaccaccgaggucgugggcgacaucauccugaagccggccaacaacucccucaagaucaccgaggagguggggcacacggaccugauggccgcguacgucgacaacagcucccugaccaucaagaagcccaacgagcucagccgcgugcugggccugaagacccucgccacccacgggcuggccgccgugaacuccguccccugggacacgaucgccaacuacgcgaagccguuccugaacaagguggugagcaccaccaccaacaucgucacgcgcugccucaaccgggugugcaccaacuacaugcccuacuucuucacccugcugcuccagcugugcaccuucacccgcuccacgaacagccggaucaaggccuccaugcccaccaccaucgccaagaacaccgugaagagcgucggcaaguucugccuggaggccagcuucaacuaccucaagucccccaacuucagcaagcugaucaacaucaucaucugguuccugcuccuguccgugugccugggcagccucaucuacuccacggccgcgcugggggugcugaugagcaaccucggcaugccguccuacugcaccggguaccgcgagggcuaccugaacagcaccaacgucaccaucgccacguacugcaccggcuccauccccugcagcgugugccuguccgggcucgacagccuggacaccuaccccucccuggagaccauccagaucacgaucagcuccuucaagugggaccucaccgccuucggccugguggccgagugguuccuggccuacauccucuucacccgguucuucuacguccuggggcuggcggccaucaugcagcucuucuucagcuacuucgccgugcacuucaucuccaacagcuggcugauguggcugaucaucaaccuggugcagauggcccccaucuccgcgaugguccgcauguacaucuucuucgccagcuucuacuacguguggaagagcuacgugcacgucguggacggcugcaacuccagcaccugcaugaugugcuacaagcggaaccgcgccacgcggguggagugcaccaccaucgucaacggggugcgccgguccuucuacgucuacgccaacggcggcaagggguucugcaagcuccacaacuggaacugcgugaacugcgacaccuucugcgccggcagcacguucaucuccgacgagguggcgcgcgaccugagccugcaguucaagcggccgaucaaccccaccgaccaguccagcuacaucgucgacuccgugaccgugaagaacgggagcauccaccucuacuucgacaaggccggccagaagaccuacgagcgccacucccugagccacuucgucaaccuggacaaccuccgggccaacaacacgaaggggucccugcccaucaacgugaucguguucgacggcaagagcaagugcgaggaguccagcgccaaguccgccagcgucuacuacucccagcugaugugccagcccauccuccugcuggaccaggcgcucgugagcgacgugggcgacagcgccgaggucgccgugaagauguucgacgccuacgugaacaccuucuccagcaccuucaacgucccgauggagaagcugaagacccugguggccacggcggaggccgagcucgccaagaacgugucccuggacaacguccugagcaccuucaucuccgccgcgcgccagggguucguggacagcgacguggagaccaaggacgucguggagugccucaagcugucccaccagagcgacaucgaggugaccggcgacuccugcaacaacuacaugcugacguacaacaaggucgagaacaugaccccccgggaccucggggccugcaucgacugcagcgcccgccacaucaacgcccagguggccaagucccacaacaucgcgcugaucuggaacgugaaggacuucaugagccuguccgagcagcuccggaagcagauccgcagcgccgccaagaagaacaaccugcccuucaagcugaccugcgccaccacgcgccaggucgugaacguggucaccaccaagaucgcccucaagggcgggugaggacuaguuauaagacugacuagcccgaugggccucccaacgggcccuccuccccuccuugcaccgagauuaauaaaaaaaaaaaaaaaaaaaaaaaaaaaaaaaaaaaaaaaaaaaaaaaaaaaaaaaaaaaaaaaaugcaucccccccccccccccccccccccccccccccaaaggcucuuuucagagccaccagaauu

SEQ ID NO: 21373 - RNA, 6058 nt, Artificial Sequence
  SARS-CoV-2__MT919784.1__non-structural protein 3 (NSP3) mRNA gc
aggagaaagcuuaccauggcccccaccaaggugaccuucggcgacgacacggucaucgaggugcagggguacaagagcgugaacaucaccuucgagcuggacgagcgcaucgacaagguccucaacgagaagugcuccgccuacaccguggagcugggcaccgaggugaacgaguucgcgugcgucguggccgacgccgugaucaagacgcugcagccggucagcgagcuccugaccccccuggggaucgaccucgacgagugguccauggugaccuacuaccuguucgacgagagcggcgaguucaagcuggccucccacauguacugcagcuucuacccccccgacgaggacgaggaggagggggacugcgaggaggaggaguucgagccguccacccaguacgaguacggcacggaggacgacuaccagggcaagccccucgaguucggggccaccagcgcggcccugcagcccgaggaggagcaggaggaggacuggcuggacgacgacucccagcagaccgugggccagcaggacgggagcgaggacaaccagaccacgaccauccagaccaucgucgaggugcagccccagcucgagauggagcugaccccggugguccagacgaucgaggugaacuccuucagcggcuaccugaagcucaccgacaacguguacaucaagaacgccgacaucgucgaggaggccaagaaggugaagcccaccguggucgugaacgcggccaacguguaccugaagcacgggggcggcgucgccggggcccugaacaaggccaccaacaacgcgaugcagguggaguccgacgacuacaucgccacgaacggcccccucaaggucgggggcagcugcgugcuguccggccacaaccuggccaagcacugccuccacguggucgggcccaacgugaacaagggcgaggacauccagcugcugaagagcgccuacgagaacuucaaccagcacgaggugcuccuggccccgcugcucuccgcggggaucuucggcgccgaccccauccacagccugcgggucugcguggacaccgugcgcaccaacgucuaccuggccguguucgacaagaaccucuacgacaagcugguguccagcuuccuggagaugaagagcgagaagcaggucgagcagaagaucgccgagauccccaaggaggaggugaagcccuucaucaccgaguccaagccgagcguggagcagcggaagcaggacgacaagaagaucaaggccugcgucgaggaggugacgaccacccucgaggagaccaaguuccugacggagaaccugcuccuguacaucgacaucaacgggaaccugcaccccgacuccgcgacccucgugagcgacaucgacaucaccuuccugaagaaggacgcccccuacaucgucggcgacguggugcaggagggcguccugaccgccguggugauccccacgaagaaggccgggggcaccaccgagaugcucgccaaggcgcugcgcaaggucccgaccgacaacuacaucacgaccuaccccgggcagggccugaacggguacaccguggaggaggccaagaccgugcucaagaagugcaaguccgccuucuacauccugcccagcaucaucuccaacgagaagcaggagauccugggcaccgucagcuggaaccuccgggagaugcuggcccacgcggaggagacgcgcaagcugaugcccgugugcguggagaccaaggccaucgucuccaccauccagcggaaguacaagggcaucaagauccaggagggggugguggacuacggcgcccgcuucuacuucuacaccagcaagacgaccgucgccucccugaucaacacccucaacgaccugaacgagacccuggugacgaugccgcucggguacgugacccacggccugaaccuggaggaggccgcgcgguacaugcgcagccucaagguccccgccaccguguccgugagcucccccgacgccgucaccgccuacaacggguaccugacgagcuccagcaagacccccgaggagcacuucaucgagaccaucucccuggccggcagcuacaaggacuggagcuacuccggccagagcacccagcucgggaucgaguuccugaagcggggcgacaaguccguguacuacacgagcaacccgaccaccuuccaccuggacggggaggugaucaccuucgacaaccucaagacgcugcugucccuccgcgagguccggaccaucaagguguucaccaccguggacaacaucaaccugcacacgcaggucguggacaugagcaugaccuacggccagcaguucggccccaccuaccuggacggggcggacgugaccaagaucaagccccacaacucccacgagggcaagacguucuacguccucccgaacgacgacacccugcgcguggaggccuucgaguacuaccacaccaccgaccccagcuuccuggggcgguacauguccgcccucaaccacacgaagaaguggaaguacccccaggugaacggccugaccagcaucaagugggccgacaacaacugcuaccuggccaccgcgcuccugacccugcagcagaucgagcucaaguucaaccccccggcccugcaggacgccuacuaccgcgcccgggcgggggaggccgccaacuucugcgcccugauccucgccuacugcaacaagacggucggcgagcugggcgacgugcgcgagaccauguccuaccuguuccagcacgcgaaccucgacagcugcaagcggguccugaacguggugugcaagaccugcgggcagcagcagaccacccugaagggcgucgaggccgugauguacauggggacgcucuccuacgagcaguucaagaagggcgugcagauccccugcaccugcgggaagcaggccaccaaguaccugguccagcaggagagccccuucgugaugauguccgcccccccggcccaguacgagcugaagcacggcaccuucacgugcgcgagcgaguacaccggcaacuaccagugcgggcacuacaagcacaucaccuccaaggagacccucuacugcaucgacggcgcccugcugacgaagagcagcgaguacaaggggcccaucaccgacguguucuacaaggagaacuccuacaccaccacgaucaagcccgucaccuacaagcucgacggcguggugugcaccgagaucgaccccaagcuggacaacuacuacaagaaggacaacagcuacuucaccgagcagccgaucgaccugguccccaaccagcccuaccccaacgccuccuucgacaacuucaaguucgugugcgacaacaucaaguucgccgacgaccucaaccagcugacgggguacaagaagccggccagccgcgagcugaaggugaccuucuuccccgaccucaacggcgacgucguggcgaucgacuacaagcacuacacccccuccuucaagaagggcgccaagcugcugcacaagcccaucguguggcacgucaacaacgccaccaacaaggccacguacaagccgaacaccuggugcauccggugccucuggagcaccaagcccguggagaccuccaacagcuucgacgugcugaaguccgaggacgcgcaggggauggacaaccuggccugcgaggaccucaagcccgucagcgaggaggugguggagaaccccacgauccagaaggacguccuggagugcaacgugaagaccaccgagguggucggcgacaucauccugaagccggccaacaacucccucaagaucaccgaggagguggggcacacggaccugauggccgccuacguggacaacagcucccugaccaucaagaagcccaacgagcucagccgcguccugggccugaagacccucgcgacccacgggcuggccgccgugaacuccgugcccugggacacgaucgccaacuacgccaagccguuccugaacaaggucgugagcaccaccaccaacaucgugacgcgcugccucaaccgggucugcaccaacuacaugcccuacuucuucacccugcugcuccagcugugcaccuucacccgcuccacgaacagccggaucaaggcguccaugcccaccaccaucgccaagaacaccgugaagagcgugggcaaguucugccuggaggccagcuucaacuaccucaagucccccaacuucagcaagcugaucaacaucaucaucugguuccugcuccuguccgucugccugggcagccucaucuacuccacggccgcccugggggugcugaugagcaaccucggcaugccguccuacugcaccggguaccgcgagggcuaccugaacagcaccaacgugaccaucgcgacguacugcaccggcuccauccccugcagcgucugccuguccgggcucgacagccuggacaccuaccccucccuggagaccauccagaucacgaucagcuccuucaagugggaccucaccgccuucggccugguggccgagugguuccuggccuacauccucuucacccgguucuucuacgugcuggggcuggccgcgaucaugcagcucuucuucagcuacuucgccguccacuucaucuccaacagcuggcugauguggcugaucaucaaccuggugcagauggcccccaucuccgccauggugcgcauguacaucuucuucgcgagcuucuacuacgucuggaagagcuacgugcacguggucgacggcugcaacuccagcaccugcaugaugugcuacaagcggaaccgcgccacgcggguggagugcaccaccaucgucaacggggugcgccgguccuucuacguguacgccaacggcggcaagggguucugcaagcuccacaacuggaacugcgucaacugcgacaccuucugcgccggcagcacguucaucuccgacgagguggcccgcgaccugagccugcaguucaagcggccgaucaaccccaccgaccaguccagcuacaucguggacuccgucaccgugaagaacgggagcauccaccucuacuucgacaaggcgggccagaagaccuacgagcgccacucccugagccacuucgugaaccuggacaaccuccgggccaacaacacgaaggggucccugcccaucaacgucaucguguucgacggcaagagcaagugcgaggaguccagcgccaaguccgccagcguguacuacucccagcugaugugccagcccauccuccugcuggaccaggcccucgucagcgacgugggcgacagcgcggagguggccgucaagauguucgacgccuacgugaacaccuucuccagcaccuucaacgugccgauggagaagcugaagacccuggucgccacggccgaggcggagcucgccaagaacgugucccuggacaacgugcugagcaccuucaucuccgccgcccgccagggguucgucgacagcgacguggagaccaaggacguggucgagugccucaagcugucccaccagagcgacaucgaggugaccggcgacuccugcaacaacuacaugcugacguacaacaagguggagaacaugaccccccgggaccucggggcgugcaucgacugcagcgcccgccacaucaacgcccaggucgccaagucccacaacaucgcccugaucuggaacgugaaggacuucaugagccuguccgagcagcuccggaagcagauccgcagcgcggccaagaagaacaaccugcccuucaagcugaccugcgccaccacgcgccagguggucaacguggugaccaccaagaucgcccucaagggcgggugaggacuaguuauaagacugacuagcccgaugggccucccaacgggcccuccuccccuccuugcaccgagauuaauaaaaaaaaaaaaaaaaaaaaaaaaaaaaaaaaaaaaaaaaaaaaaaaaaaaaaaaaaaaaaaaaugcaucccccccccccccccccccccccccccccccaaaggcucuuuucagagccaccagaauu

SEQ ID NO: 21374 - RNA, 6058 nt, Artificial Sequence
  SARS-CoV-2__MT919785.1__non-structural protein 3 (NSP3) mRNA gc
aggagaaagcuuaccauggcccccaccaaggugaccuucggcgacgacacggucaucgaggugcagggguacaagagcgugaacaucaccuucgagcuggacgagcgcaucgacaagguccucaacgagaagugcuccgccuacaccguggagcugggcaccgaggugaacgaguucgcgugcgucguggccgacgccgugaucaagacgcugcagccggucagcgagcuccugaccccccuggggaucgaccucgacgagugguccauggccaccuacuaccuguucgacgagagcggcgaguucaagcuggccucccacauguacugcagcuucuacccccccgacgaggacgaggaggagggggacugcgaggaggaggaguucgagccguccacccaguacgaguacggcacggaggacgacuaccagggcaagccccucgaguucggggcgaccagcgccgcccugcagcccgaggaggagcaggaggaggacuggcuggacgacgacucccagcagaccgugggccagcaggacgggagcgaggacaaccagaccacgaccauccagaccaucguggagguccagccccagcucgagauggagcugaccccgguggugcagacgaucgaggucaacuccuucagcggcuaccugaagcucaccgacaacguguacaucaagaacgccgacaucguggaggaggcgaagaaggucaagcccaccgugguggucaacgccgccaacguguaccugaagcacgggggcggcguggccggggcccugaacaaggcgaccaacaacgccaugcaggucgaguccgacgacuacaucgccacgaacggcccccucaagguggggggcagcugcguccuguccggccacaaccuggccaagcacugccuccacgugguggggcccaacgucaacaagggcgaggacauccagcugcugaagagcgccuacgagaacuucaaccagcacgaggugcuccuggcgccgcugcucuccgccgggaucuucggcgccgaccccauccacagccugcgggugugcgucgacaccgugcgcaccaacguguaccuggccgucuucgacaagaaccucuacgacaagcugguguccagcuuccuggagaugaagagcgagaagcagguggagcagaagaucgccgagauccccaaggaggaggucaagcccuucaucaccgaguccaagccgagcguggagcagcggaagcaggacgacaagaagaucaaggcgugcguggaggaggucacgaccacccucgaggagaccaaguuccugacggagaaccugcuccuguacaucgacaucaacgggaaccugcaccccgacuccgccacccucgugagcgacaucgacaucaccuuccugaagaaggacgcccccuacaucgugggcgacgucgugcaggagggcgugcugaccgccgucgugauccccacgaagaaggccgggggcaccaccgagaugcucgcgaaggcccugcgcaaggugccgaccgacaacuacaucacgaccuaccccgggcagggccugaacggguacaccgucgaggaggccaagaccgugcucaagaagugcaaguccgccuucuacauccugcccagcaucaucuccaacgagaagcaggagauccugggcaccgugagcuggaaccuccgggagaugcuggcgcacgccgaggagacgcgcaagcugaugcccgucugcguggagaccaaggccaucguguccaccauccagcggaaguacaagggcaucaagauccaggagggggucguggacuacggcgcccgcuucuacuucuacaccagcaagacgaccguggccucccugaucaacacccucaacgaccugaacgagacccuggucacgaugccgcucggguacgugacccacggccugaaccuggaggaggcggcccgguacaugcgcagccucaaggugcccgccaccgucuccgugagcucccccgacgccgugaccgccuacaacggguaccugacgagcuccagcaagacccccgaggagcacuucaucgagaccaucucccuggcgggcagcuacaaggacuggagcuacuccggccagagcacccagcucgggaucgaguuccugaagcggggcgacaaguccgucuacuacacgagcaacccgaccaccuuccaccuggacggggaggugaucaccuucgacaaccucaagacgcugcugucccuccgcgaggugcggaccaucaaggucuucaccaccguggacaacaucaaccugcacacgcagguggucgacaugagcaugaccuacggccagcaguucggccccaccuaccuggacggggccgacgugaccaagaucaagccccacaacucccacgagggcaagacguucuacgugcucccgaacgacgacacccugcgcgucgaggccuucgaguacuaccacaccaccgaccccagcuuccuggggcgguacauguccgcccucaaccacacgaagaaguggaaguacccccaggugaacggccugaccagcaucaagugggccgacaacaacugcuaccuggcgaccgcccuccugacccugcagcagaucgagcucaaguucaaccccccggcccugcaggacgccuacuaccgcgcgcgggccggggaggccgccaacuucugcgcccugauccucgcguacugcaacaagacggugggcgagcugggcgacguccgcgagaccauguccuaccuguuccagcacgccaaccucgacagcugcaagcgggugcugaacgucgugugcaagaccugcgggcagcagcagaccacccugaagggcguggaggccgucauguacauggggacgcucuccuacgagcaguucaagaagggcgugcagauccccugcaccugcgggaagcaggccaccaaguaccuggugcagcaggagagccccuucgucaugauguccgcccccccggcgcaguacgagcugaagcacggcaccuucacgugcgccagcgaguacaccggcaacuaccagugcgggcacuacaagcacaucaccuccaaggagacccucuacugcaucgacggcgcccugcugacgaagagcagcgaguacaaggggcccaucaccgacguguucuacaaggagaacuccuacaccaccacgaucaagcccgugaccuacaagcucgacggcaucgucugcaccgagaucgaccccaagcuggacaacuacuacaagaaggacaacagcuacuucaccgagcagccgaucgaccuggugcccaaccagcccuaccccaacgccuccuucgacaacuucaaguucgugugcgacaacaucaaguucgccgacgaccucaaccagcugacgggguacaagaagccggcgagccgcgagcugaaggucaccuucuuccccgaccucaacggcgacgugguggccaucgacuacaagcacuacacccccuccuucaagaagggcgccaagcugcugcacaagcccaucgucuggcacgugaacaacgccaccaacaaggcgacguacaagccgaacaccuggugcauccggugccucuggagcaccaagcccguggagaccuccaacagcuucgacguccugaaguccgaggacgcccaggggauggacaaccuggccugcgaggaccucaagcccgugagcgaggagguggucgagaaccccacgauccagaaggacgugcuggagugcaacgugaagaccaccgaggucgugggcgacaucauccugaagccggccaacaacucccucaagaucaucgaggagguggggcacaccgaccugauggccgcguacgucgacaacagcucccugacgaucaagaagcccaacgagcucagccgcgugcugggccugaagacccucgccacccacgggcuggccgccgugaacuccguccccugggacaccaucgccaacuacgcgaagccguuccugaacaagguggugagcacgaccaccaacaucgucacccgcugccucaaccgggugugcacgaacuacaugcccuacuucuucacccugcugcuccagcugugcaccuucacccgcuccaccaacagccggaucaaggccuccaugcccacgaccaucgccaagaacaccgugaagagcgucggcaaguucugccuggaggccagcuucaacuaccucaagucccccaacuucagcaagcugaucaacaucaucaucugguuccugcuccuguccgugugccugggcagccucaucuacuccaccgccgcgcugggggugcugaugagcaaccucggcaugccguccuacugcacgggguaccgcgagggcuaccugaacagcaccaacgucaccaucgccaccuacugcacgggcuccauccccugcagcgugugccuguccgggcucgacagccuggacaccuaccccucccuggagaccauccagaucaccaucagcuccuucaagugggaccucacggccuucggccugguggccgagugguuccuggccuacauccucuucacccgguucuucuacguccuggggcuggcggccaucaugcagcucuucuucagcuacuucgccgugcacuucaucuccaacagcuggcugauguggcugaucaucaaccuggugcagauggcccccaucuccgcgaugguccgcauguacaucuucuucgccagcuucuacuacguguggaagagcuacgugcacgucguggacggcugcaacuccagcaccugcaugaugugcuacaagcggaaccgcgccacccggguggagugcacgaccaucgucaacggggugcgccgguccuucuacgucuacgccaacggcggcaagggguucugcaagcuccacaacuggaacugcgugaacugcgacaccuucugcgccggcagcaccuucaucuccgacgagguggcgcgcgaccugagccugcaguucaagcggccgaucaaccccacggaccaguccagcuacaucgucgacuccgugaccgugaagaacgggagcauccaccucuacuucgacaaggccggccagaagaccuacgagcgccacucccugagccacuucgucaaccuggacaaccuccgggccaacaacaccaaggggucccugcccaucaacgugaucguguucgacggcaagagcaagugcgaggaguccagcgccaaguccgccagcgucuacuacucccagcugaugugccagcccauccuccugcuggaccaggcgcucgugagcgacgugggcgacagcgccgaggucgccgugaagauguucgacgccuacgugaacacguucuccagcaccuucaacgucccgauggagaagcugaagacccugguggccaccgcggaggccgagcucgccaagaacgugucccuggacaacguccugagcacguucaucuccgccgcgcgccagggguucguggacagcgacguggagaccaaggacgucguggagugccucaagcugucccaccagagcgacaucgaggugaccggcgacuccugcaacaacuacaugcugaccuacaacaaggucgagaacaugacgccccgggaccucggggccugcaucgacugcagcgcccgccacaucaacgcccagguggccaagucccacaacaucgcgcugaucuggaacgugaaggacuucaugagccuguccgagcagcuccggaagcagauccgcagcgccgccaagaagaacaaccugcccuucaagcugaccugcgccaccacccgccaggucgugaacguggucacgaccaagaucgcccucaagggcgggugaggacuaguuauaagacugacuagcccgaugggccucccaacgggcccuccuccccuccuugcaccgagauuaauaaaaaaaaaaaaaaaaaaaaaaaaaaaaaaaaaaaaaaaaaaaaaaaaaaaaaaaaaaaaaaaaugcaucccccccccccccccccccccccccccccccaaaggcucuuuucagagccaccagaauu

SEQ ID NO: 21375 - RNA, 6058 nt, Artificial Sequence
  SARS-CoV-2__MT919788.1__non-structural protein 3 (NSP3) mRNA gc
aggagaaagcuuaccauggcccccaccaaggugaccuucggcgacgacacggucaucgaggugcagggguacaagagcgugaacaucaccuucgagcuggacgagcgcaucgacaagguccucaacgagaagugcuccgccuacaccguggagcugggcaccgaggugaacgaguucgcgugcgucguggccgacgccgugaucaagacgcugcagccggucagcgagcuccugaccccccuggggaucgaccucgacgagugguccauggccaccuacuaccuguucgacgagagcggcgaguucaagcuggccucccacauguacugcagcuucuacccccccgacgaggacgaggaggagggggacugcgaggaggaggaguucgagccguccacccaguacgaguacggcacggaggacgacuaccagggcaagccccucgaguucggggcgaccagcgccgcccugcagcccgaggaggagcaggaggaggacuggcuggacgacgacucccagcagaccgugggccagcaggacgggagcgaggacaaccagaccacgaccauccagaccaucguggagguccagccccagcucgagauggagcugaccccgguggugcagacgaucgaggucaacuccuucagcggcuaccugaagcucaccgacaacguguacaucaagaacgccgacaucguggaggaggcgaagaaggucaagcccaccgugguggucaacgccgccaacguguaccugaagcacgggggcggcguggccggggcccugaacaaggcgaccaacaacgccaugcaggucgaguccgacgacuacaucgccacgaacggcccccucaagguggggggcagcugcguccuguccggccacaaccuggccaagcacugccuccacgugguggggcccaacgucaacaagggcgaggacauccagcugcugaagagcgccuacgagaacuucaaccagcacgaggugcuccuggcgccgcugcucuccgccgggaucuucggcgccgaccccauccacagccugcgggugugcgucgacaccgugcgcaccaacguguaccuggccgucuucgacaagaaccucuacgacaagcugguguccagcuuccuggagaugaagagcgagaagcagguggagcagaagaucgccgagauccccaaggaggaggucaagcccuucaucaccgaguccaagccgagcguggagcagcggaagcaggacgacaagaagaucaaggcgugcguggaggaggucacgaccacccucgaggagaccaaguuccugacggagaaccugcuccuguacaucgacaucaacgggaaccugcaccccgacuccgccacccucgugagcgacaucgacaucaccuuccugaagaaggacgcccccuacaucgugggcgacgucgugcaggagggcgugcugaccgccgucgugauccccacgaagaaggccgggggcaccaccgagaugcucgcgaaggcccugcgcaaggugccgaccgacaacuacaucacgaccuaccccgggcagggccugaacggguacaccgucgaggaggccaagaccgugcucaagaagugcaaguccgccuucuacauccugcccagcaucaucuccaacgagaagcaggagauccugggcaccgugagcuggaaccuccgggagaugcuggcgcacgccgaggagacgcgcaagcugaugcccgucugcguggagaccaaggccaucguguccaccauccagcggaaguacaagggcaucaagauccaggagggggucguggacuacggcgcccgcuucuacuucuacaccagcaagacgaccguggccucccugaucaacacccucaacgaccugaacgagacccuggucacgaugccgcucggguacgugacccacggccugaaccuggaggaggcggcccgguacaugcgcagccucaaggugcccgccaccgucuccgugagcucccccgacgccgugaccgccuacaacggguaccugacgagcuccagcaagacccccgaggagcacuucaucgagaccaucucccuggcgggcagcuacaaggacuggagcuacuccggccagagcacccagcucgggaucgaguuccugaagcggggcgacaaguccgucuacuacacgagcaacccgaccaccuuccaccuggacggggaggugaucaccuucgacaaccucaagacgcugcugucccuccgcgaggugcggaccaucaaggucuucaccaccguggacaacaucaaccugcacacgcagguggucgacaugagcaugaccuacggccagcaguucggccccaccuaccuggacggggccgacgugaccaagaucaagccccacaacucccacgagggcaagacguucuacgugcucccgaacgacgacacccugcgcgucgaggccuucgaguacuaccacaccaccgaccccagcuuccuggggcgguacauguccgcccucaaccacacgaagaaguggaaguacccccaggugaacggccugaccagcaucaagugggccgacaacaacugcuaccuggcgaccgcccuccugacccugcagcagaucgagcucaaguucaaccccccggcccugcaggacgccuacuaccgcgcgcgggccggggaggccgccaacuucugcgcccugauccucgcguacugcaacaagacggugggcgagcugggcgacguccgcgagaccauguccuaccuguuccagcacgccaaccucgacagcugcaagcgggugcugaacgucgugugcaagaccugcgggcagcagcagaccacccugaagggcguggaggccgucauguacauggggacgcucuccuacgagcaguucaagaagggcgugcagauccccugcaccugcgggaagcaggccaccaaguaccuggugcagcaggagagccccuucgucaugauguccgcccccccggcgcaguacgagcugaagcacggcaccuucacgugcgccagcgaguacaccggcaacuaccagugcgggcacuacaagcacaucaccuccaaggagacccucuacugcaucgacggcgcccugcugacgaagagcagcgaguacaaggggcccaucaccgacguguucuacaaggagaacuccuacaccaccacgaucaagcccgugaccuacaagcucgacggcgucgugugcaccgagaucgaccccaagcuggacaacuacuacaagaaggacaacagcuacuucaccgagcagccgaucgaccuggugcccaaccagcccuaccccaacgccuccuucgacaacuucaaguucgucugcgacaacaucaaguucgccgacgaccucaaccagcugacgggguacaagaagccggcgagccgcgagcugaaggugaccuucuuccccgaccucaacggcgacguggucgccaucgacuacaagcacuacacccccuccuucaagaagggcgccaagcugcugcacaagcccaucguguggcacgugaacaacgccaccaacaaggcgacguacaagccgaacaccuggugcauccggugccucuggagcaccaagcccgucgagaccuccaacagcuucgacgugcugaaguccgaggacgcccaggggauggacaaccuggccugcgaggaccucaagcccgugagcgaggaggucguggagaaccccacgauccagaaggacgugcuggagugcaacgucaagaccaccgagguggugggcgacaucauccugaagccggccaacaacucccucaagaucaccgaggaggucgggcacacggaccugauggccgcguacguggacaacagcucccugaccaucaagaagcccaacgagcucagccgcgugcugggccugaagacccucgccacccacgggcuggccgccgucaacuccgugcccugggacacgaucgccaacuacgcgaagccguuccugaacaagguggucagcaccaccaccaacaucgugacgcgcugccucaaccgggugugcaccaacuacaugcccuacuucuucacccugcugcuccagcugugcaccuucacccgcuccacgaacagccggaucaaggccuccaugcccaccaccaucgccaagaacaccgucaagagcgugggcaaguucugccuggaggccagcuucaacuaccucaagucccccaacuucagcaagcugaucaacaucaucaucugguuccugcuccuguccgugugccugggcagccucaucuacuccacggccgcgcuggggguccugaugagcaaccucggcaucccguccuacugcaccggguaccgcgagggcuaccugaacagcaccaacgugaccaucgccacguacugcaccggcuccauccccugcagcgugugccuguccgggcucgacagccuggacaccuaccccucccuggagaccauccagaucacgaucagcuccuucaagugggaccucaccgccuucggccuggucgccgagugguuccuggccuacauccucuucacccgguucuucuacgugcuggggcuggcggccaucaugcagcucuucuucagcuacuucgccgugcacuucaucuccaacagcuggcugauguggcugaucaucaaccugguccagauggcccccaucuccgcgauggugcgcauguacaucuucuucgccagcuucuacuacguguggaagagcuacguccacgugguggacggcugcaacuccagcaccugcaugaugugcuacaagcggaaccgcgccacgcgggucgagugcaccaccaucgugaacgggguccgccgguccuucuacguguacgccaacggcggcaagggguucugcaagcuccacaacuggaacugcgugaacugcgacaccuucugcgccggcagcacguucaucuccgacgaggucgcgcgcgaccugagccugcaguucaagcggccgaucaaccccaccgaccaguccagcuacaucguggacuccgugaccgucaagaacgggagcauccaccucuacuucgacaaggccggccagaagaccuacgagcgccacucccugagccacuucgugaaccuggacaaccuccgggccaacaacacgaaggggucccugcccaucaacgugaucgucuucgacggcaagagcaagugcgaggaguccagcgccaaguccgccagcguguacuacucccagcugaugugccagcccauccuccugcuggaccaggcgcucgugagcgacgucggcgacagcgccgagguggccgugaagauguucgacgccuacgucaacaccuucuccagcaccuucaacgugccgauggagaagcugaagacccugguggccacggcggaggccgagcucgccaagaacgucucccuggacaacgugcugagcaccuucaucuccgccgcgcgccagggguucguggacagcgacgucgagaccaaggacgugguggagugccucaagcugucccaccagagcgacaucgaggucaccggcgacuccugcaacaacuacaugcugacguacaacaagguggagaacaugaccccccgggaccucggggccugcaucgacugcagcgcccgccacaucaacgcccagguggccaagucccacaacaucgcgcugaucuggaacgucaaggacuucaugagccuguccgagcagcuccggaagcagauccgcagcgccgccaagaagaacaaccugcccuucaagcugaccugcgccaccacgcgccagguggugaacgucgugaccaccaagaucgcccucaagggcgggugaggacuaguuauaagacugacuagcccgaugggccucccaacgggcccuccuccccuccuugcaccgagauuaauaaaaaaaaaaaaaaaaaaaaaaaaaaaaaaaaaaaaaaaaaaaaaaaaaaaaaaaaaaaaaaaaugcaucccccccccccccccccccccccccccccccaaaggcucuuuucagagccaccagaauu

SEQ ID NO: 21376 - RNA, 6058 nt, Artificial Sequence
  SARS-CoV-2__MT919996.1__non-structural protein 3 (NSP3) mRNA gc
aggagaaagcuuaccauggcccccaccaaggugaccuucggcgacgacacggucaucgaggugcagggguacaagagcgugaacaucaccuucgagcuggacgagcgcaucgacaagguccucaacgagaagugcuccgccuacaccguggagcugggcaccgaggugaacgaguucgcgugcgucguggccgacgccgugaucaagacgcugcagccggucagcgagcuccugaccccccuggggaucgaccucgacgagugguccauggccaccuacuaccuguucgacgagagcggcgaguucaagcuggccucccacauguacugcagcuucuacccccccgacgaggacgaggaggagggggacugcgaggaggaggaguucgagccguccacccaguacgaguacggcacggaggacgacuaccagggcaagccccucgaguucggggcgaccagcgccgcccugcagcccgaggaggagcaggaggaggacuggcuggacgacgacucccagcagaccgugggccagcaggacgggagcgaggacaaccagaccacgaccauccagaccaucguggagguccagccccagcucgagauggagcugaccccgguggugcagacgaucgaggucaacuccuucagcggcuaccugaagcucaccgacaacguguacaucaagaacgccgacaucguggaggaggcgaagaaggucaagcccaccgugguggucaacgccgccaacguguaccugaagcacgggggcggcguggccggggcccugaacaaggcgaccaacaacgccaugcaggucgaguccgacgacuacaucgccacgaacggcccccucaagguggggggcagcugcguccuguccggccacaaccuggccaagcacugccuccacgugguggggcccaacgucaacaagggcgaggacauccagcugcugaagagcgccuacgagaacuucaaccagcacgaggugcuccuggcgccgcugcucuccgccgggaucuucggcgccgaccccauccacagccugcgggugugcgucgacaccgugcgcaccaacguguaccuggccgucuucgacaagaaccucuacgacaagcugguguccagcuuccuggagaugaagagcgagaagcagguggagcagaagaucgccgagauccccaaggaggaggucaagcccuucaucaccgaguccaagccgagcguggagcagcggaagcaggacgacaagaagaucaaggcgugcguggaggaggucacgaccacccucgaggagaccaaguuccugacggagaaccugcuccuguacaucgacaucaacgggaaccugcaccccgacuccgccacccucgugagcgacaucgacaucaccuuccugaagaaggacgcccccuacaucgugggcgacgucgugcaggagggcgugcugaccgccgucgugauccccacgaagaaggccgggggcaccaccgagaugcucgcgaaggcccugcgcaaggugccgaccgacaacuacaucacgaccuaccccgggcagggccugaacggguacaccgucgaggaggccaagaccgugcucaagaagugcaaguccgccuucuacauccugcccagcaucaucuccaacgagaagcaggagauccugggcaccgugagcuggaaccuccgggagaugcuggcgcacgccgaggagacgcgcaagcugaugcccgucugcguggagaccaaggccaucguguccaccauccagcggaaguacaagggcaucaagauccaggagggggucguggacuacggcgcccgcuucuacuucuacaccagcaagacgaccguggccucccugaucaacacccucaacgaccugaacgagacccuggucacgaugccgcucggguacgugacccacggccugaaccuggaggaggcggcccgguacaugcgcagccucaaggugcccgccaccgucuccgugagcucccccgacgccgugaccgccuacaacggguaccugacgagcuccagcaagacccccgaggagcacuucaucgagaccaucucccuggcgggcagcuacaaggacuggagcuacuccggccagagcacccagcucgggaucgaguuccugaagcggggcgacaaguccgucuacuacacgagcaacccgaccaccuuccaccuggacggggaggugaucaccuucgacaaccucaagacgcugcugucccuccgcgaggugcggaccaucaaggucuucaccaccguggacaacaucaaccugcacacgcagguggucgacaugagcaugaccuacggccagcaguucggccccaccuaccuggacggggccgacgugaccaagaucaagccccacaacucccacgagggcaagacguucuacgugcucccgaacgacgacacccugcgcgucgaggccuucgaguacuaccacaccaccgaccccagcuuccuggggcgguacauguccgcccucaaccacacgaagaaguggaaguacccccaggugaacggccugaccagcaucaagugggccgacaacaacugcuaccuggcgaccgcccuccugacccugcagcagaucgagcucaaguucaaccccccggcccugcaggacgccuacuaccgcgcgcgggccggggaggccgccaacuucugcgcccugauccucgcguacugcaacaagacggugggcgagcugggcgacguccgcgagaccauguccuaccuguuccagcacgccaaccucgacagcugcaagcgggugcugaacgucgugugcaagaccugcgggcagcagcagaccacccugaagggcguggaggccgucauguacauggggacgcucuccuacgagcaguucaagaagggcgugcagauccccugcaccugcgggaagcaggccaccaaguaccuggugcagcaggagagccccuucgucaugauguccgcccccccggcgcaguacgagcugaagcacggcaccuucacgugcgccagcgaguacaccggcaacuaccagugcgggcacuacaagcacaucaccuccaaggagacccucuacugcaucgacggcgcccugcugacgaagagcagcgaguacaaggggcccaucaccgacguguucuacaaggagaacuccuacaccaccacgaucaagcccgugaccuacaagcucgacggcgucgugugcaccgagaucgaccccaagcuggacaacuacuacaagaaggacaacagcuacuucaccgagcagccgaucgaccuggugcccaaccagcccuaccccaacgccuccuucgacaacuucaaguucgucugcgacaacaucaaguucgccgacgaccucaaccagcugacgggguacaagaagccggcgagccgcgagcugaaggugaccuucuuccccgaccucaacggcgacguggucgccaucgacuacaagcacuacacccccuccuucaagaagggcgccaagcugcugcacaagcccaucguguggcacgugaacaacgccaccaacaaggcgacguacaagccgaacaccuggugcauccggugccucuggagcaccaagcccgucgagaccuccaacagcuucgacgugcugaaguccgaggacgcccaggggauggacaaccuggccugcgaggaccucaagcccgugagcgaggaggucguggagaaccccacgauccagaaggacgugcuggagugcaacgucaagaccaccgagguggugggcgacaucauccugaagccggccaacaacucccucaagaucaccgaggaggucgggcacacggaccugauggccgcguacguggacaacagcucccugaccaucaagaagcccaacgagcucuuccgcgugcugggccugaagacccucgccacccacgggcuggccgccgucaacagcgugcccugggacacgaucgccaacuacgcgaagccguuccugaacaagguggucuccaccaccaccaacaucgugacgcgcugccucaaccgggugugcaccaacuacaugcccuacuucuucacccugcugcuccagcugugcaccuucacccgcagcacgaacucccggaucaaggccagcaugcccaccaccaucgccaagaacaccgucaaguccgugggcaaguucugccuggaggccagcuucaacuaccucaagagccccaacuucuccaagcugaucaacaucaucaucugguuccugcuccugagcgugugccugggcucccucaucuacagcacggccgcgcuggggguccugauguccaaccucggcaugccgagcuacugcaccggguaccgcgagggcuaccugaacuccaccaacgugaccaucgccacguacugcaccggcagcauccccugcuccgugugccugagcgggcucgacucccuggacaccuaccccagccuggagaccauccagaucacgaucuccagcuucaagugggaccucaccgccuucggccuggucgccgagugguuccuggccuacauccucuucacccgguucuucuacgugcuggggcuggcggccaucaugcagcucuucuucuccuacuucgccgugcacuucaucagcaacuccuggcugauguggcugaucaucaaccugguccagauggcccccaucagcgcgauggugcgcauguacaucuucuucgccuccuucuacuacguguggaagagcuacguccacgugguggacggcugcaacagcuccaccugcaugaugugcuacaagcggaaccgcgccacgcgggucgagugcaccaccaucgugaacgggguccgccggagcuucuacguguacgccaacggcggcaagggguucugcaagcuccacaacuggaacugcgugaacugcgacaccuucugcgccggcuccacguucaucagcgacgaggucgcgcgcgaccugucccugcaguucaagcggccgaucaaccccaccgaccagagcuccuacaucguggacagcgugaccgucaagaacggguccauccaccucuacuucgacaaggccggccagaagaccuacgagcgccacagccugucccacuucgugaaccuggacaaccuccgggccaacaacacgaaggggagccugcccaucaacgugaucgucuucgacggcaaguccaagugcgaggagagcuccgccaagagcgccuccguguacuacagccagcugaugugccagcccauccuccugcuggaccaggcgcucguguccgacgucggcgacagcgccgagguggccgugaagauguucgacgccuacgucaacaccuucagcuccaccuucaacgugccgauggagaagcugaagacccugguggccacggcggaggccgagcucgccaagaacgucagccuggacaacgugcuguccaccuucaucagcgccgcgcgccagggguucguggacuccgacgucgagaccaaggacgugguggagugccucaagcugagccaccaguccgacaucgaggucaccggcgacagcugcaacaacuacaugcugacguacaacaagguggagaacaugaccccccgggaccucggggccugcaucgacugcuccgcccgccacaucaacgcccagguggccaagagccacaacaucgcgcugaucuggaacgucaaggacuucaugucccugagcgagcagcuccggaagcagauccgcuccgccgccaagaagaacaaccugcccuucaagcugaccugcgccaccacgcgccagguggugaacgucgugaccaccaagaucgcccucaagggcgggugaggacuaguuauaagacugacuagcccgaugggccucccaacgggcccuccuccccuccuugcaccgagauuaauaaaaaaaaaaaaaaaaaaaaaaaaaaaaaaaaaaaaaaaaaaaaaaaaaaaaaaaaaaaaaaaaugcaucccccccccccccccccccccccccccccccaaaggcucuuuucagagccaccagaauu

SEQ ID NO: 21377 - RNA, 6058 nt, Artificial Sequence
  SARS-CoV-2__MT919997.1__non-structural protein 3 (NSP3) mRNA gc
aggagaaagcuuaccauggcccccaccaaggugaccuucggcgacgacacggucaucgaggugcagggguacaagagcgugaacaucaccuucgagcuggacgagcgcaucgacaagguccucaacgagaagugcuccgccuacaccguggagcugggcaccgaggugaacgaguucgcgugcgucguggccgacgccgugaucaagacgcugcagccggucagcgagcuccugaccccccuggggaucgaccucgacgagugguccauggccaccuacuaccuguucgacgagagcggcgaguucaagcuggccucccacauguacugcagcuucuaccccuccgacgaggacgaggaggagggggacugcgaggaggaggaguucgagcccagcacccaguacgaguacggcacggaggacgacuaccagggcaagccgcucgaguucggggcgaccuccgccgcccugcagcccgaggaggagcaggaggaggacuggcuggacgacgacagccagcagaccgugggccagcaggacggguccgaggacaaccagaccacgaccauccagaccaucguggagguccagccccagcucgagauggagcugacccccguggugcagacgaucgaggucaacagcuucuccggcuaccugaagcucaccgacaacguguacaucaagaacgccgacaucguggaggaggcgaagaaggucaagccgaccgugguggucaacgccgccaacguguaccugaagcacgggggcggcguggccggggcccugaacaaggcgaccaacaacgccaugcaggucgagagcgacgacuacaucgccacgaacggcccccucaagguggggggcuccugcguccugagcggccacaaccuggccaagcacugccuccacgugguggggcccaacgucaacaagggcgaggacauccagcugcugaaguccgccuacgagaacuucaaccagcacgaggugcuccuggcgccccugcucagcgccgggaucuucggcgccgacccgauccacucccugcgggugugcgucgacaccgugcgcaccaacguguaccuggccgucuucgacaagaaccucuacgacaagcuggugagcagcuuccuggagaugaaguccgagaagcagguggagcagaagaucgccgagauccccaaggaggaggucaagcccuucaucaccgagagcaagcccuccguggagcagcggaagcaggacgacaagaagaucaaggcgugcguggaggaggucacgaccacccucgaggagaccaaguuccugacggagaaccugcuccuguacaucgacaucaacgggaaccugcacccggacagcgccacccucguguccgacaucgacaucaccuuccugaagaaggacgcccccuacaucgugggcgacgucgugcaggagggcgugcugaccgccgucgugauccccacgaagaaggccgggggcaccaccgagaugcucgcgaaggcccugcgcaaggugcccaccgacaacuacaucacgaccuacccggggcagggccugaacggguacaccgucgaggaggccaagaccgugcucaagaagugcaagagcgccuucuacauccugcccuccaucaucagcaacgagaagcaggagauccugggcaccguguccuggaaccuccgggagaugcuggcgcacgccgaggagacgcgcaagcugaugcccgucugcguggagaccaaggccaucgugagcaccauccagcggaaguacaagggcaucaagauccaggagggggucguggacuacggcgcccgcuucuacuucuacaccuccaagacgaccguggccagccugaucaacacccucaacgaccugaacgagacccuggucacgaugccccucggguacgugacccacggccugaaccuggaggaggcggcccgguacaugcgcucccucaaggugccggccaccgucagcguguccagccccgacgccgugaccgccuacaacggguaccugacguccagcuccaagacccccgaggagcacuucaucgagaccaucagccuggcgggcagcuacaaggacugguccuacagcggccaguccacccagcucgggaucgaguuccugaagcggggcgacaagagcgucuacuacacguccaaccccaccaccuuccaccuggacggggaggugaucaccuucgacaaccucaagacgcugcugagccuccgcgaggugcggaccaucaaggucuucaccaccguggacaacaucaaccugcacacgcagguggucgacauguccaugaccuacggccagcaguucggcccgaccuaccuggacggggccgacgugaccaagaucaagccccacaacagccacgagggcaagacguucuacgugcuccccaacgacgacacccugcgcgucgaggccuucgaguacuaccacaccaccgacccguccuuccuggggcgguacaugagcgcccucaaccacacgaagaaguggaaguacccccaggugaacggccugaccuccaucaagugggccgacaacaacugcuaccuggcgaccgcccuccugacccugcagcagaucgagcucaaguucaacccccccgcccugcaggacgccuacuaccgcgcgcgggccggggaggccgccaacuucugcgcccugauccucgcguacugcaacaagacggugggcgagcugggcgacguccgcgagaccaugagcuaccuguuccagcacgccaaccucgacuccugcaagcgggugcugaacgucgugugcaagaccugcgggcagcagcagaccacccugaagggcguggaggccgucauguacauggggacgcucagcuacgagcaguucaagaagggcgugcagaucccgugcaccugcgggaagcaggccaccaaguaccuggugcagcaggagucccccuucgucaugaugagcgccccccccgcgcaguacgagcugaagcacggcaccuucacgugcgccuccgaguacaccggcaacuaccagugcgggcacuacaagcacaucaccagcaaggagacccucuacugcaucgacggcgcccugcugacgaagagcuccgaguacaaggggccgaucaccgacguguucuacaaggagaacagcuacaccaccacgaucaagcccgugaccuacaagcucgacggcgucgugugcaccgagaucgaccccaagcuggacaacuacuacaagaaggacaacuccuacuucaccgagcagcccaucgaccuggugccgaaccagcccuaccccaacgccagcuucgacaacuucaaguucgucugcgacaacaucaaguucgccgacgaccucaaccagcugacgggguacaagaagcccgcgucccgcgagcugaaggugaccuucuucccggaccucaacggcgacguggucgccaucgacuacaagcacuacacccccagcuucaagaagggcgccaagcugcugcacaagcccaucguguggcacgugaacaacgccaccaacaaggcgacguacaagcccaacaccuggugcauccggugccucugguccaccaagccggucgagaccagcaacuccuucgacgugcugaagagcgaggacgcccaggggauggacaaccuggccugcgaggaccucaagcccguguccgaggaggucguggagaaccccacgauccagaaggacgugcuggagugcaacgucaagaccaccgagguggugggcgacaucauccugaagcccgccaacaacagccucaagaucaccgaggaggucgggcacacggaccugauggccgcguacguggacaacuccagccugaccaucaagaagccgaacgagcucucccgcgugcugggccugaagacccucgccacccacgggcuggccgccgucaacagcgugcccugggacacgaucgccaacuacgcgaagcccuuccugaacaagguggucuccaccaccaccaacaucgugacgcgcugccucaaccgggugugcaccaacuacaugccguacuucuucacccugcugcuccagcugugcaccuucacccgcagcacgaacucccggaucaaggccagcaugcccaccaccaucgccaagaacaccgucaagagcgugggcaaguucugccuggaggccuccuucaacuaccucaagagccccaacuucuccaagcugaucaacaucaucaucugguuccugcuccugagcgugugccugggcucccucaucuacagcacggccgcgcuggggguccugauguccaaccucggcaugcccagcuacugcaccggguaccgcgagggcuaccugaacuccaccaacgugaccaucgccacguacugcaccggcagcaucccgugcuccgugugccugagcgggcucgacucccuggacaccuaccccagccuggagaccauccagaucacgaucuccagcuucaagugggaccucaccgccuucggccuggucgccgagugguuccuggccuacauccucuucacccgguucuucuacgugcuggggcuggcggccaucaugcagcucuucuucuccuacuucgccgugcacuucaucagcaacuccuggcugauguggcugaucaucaaccugguccagauggcccccaucagcgcgauggugcgcauguacaucuucuucgccagcuucuacuacguguggaaguccuacguccacgugguggacggcugcaacagcuccaccugcaugaugugcuacaagcggaaccgcgccacgcgggucgagugcaccaccaucgugaacgggguccgccggagcuucuacguguacgccaacggcggcaagggguucugcaagcuccacaacuggaacugcgugaacugcgacaccuucugcgccggcuccacguucaucagcgacgaggucgcgcgcgaccugucccugcaguucaagcggcccaucaacccgaccgaccagagcuccuacaucguggacagcgugaccgucaagaacggguccauccaccucuacuucgacaaggccggccagaagaccuacgagcgccacagccugucccacuucgugaaccuggacaaccuccgggccaacaacacgaaggggagccugcccaucaacgugaucgucuucgacggcaaguccaagugcgaggagagcuccgccaagagcgccuccguguacuacagccagcugaugugccagcccauccuccugcuggaccaggcgcucgugagcgacgucggcgacuccgccgagguggccgugaagauguucgacgccuacgucaacaccuucagcuccaccuucaacgugcccauggagaagcugaagacccugguggccacggcggaggccgagcucgccaagaacgucagccuggacaacgugcuguccaccuucaucagcgccgcgcgccagggguucguggacuccgacgucgagaccaaggacgugguggagugccucaagcugagccaccaguccgacaucgaggucaccggcgacagcugcaacaacuacaugcugacguacaacaagguggagaacaugaccccgcgggaccucggggccugcaucgacugcuccgcccgccacaucaacgcccagguggccaagagccacaacaucgcgcugaucuggaacgucaaggacuucaugucccugagcgagcagcuccggaagcagauccgcuccgccgccaagaagaacaaccugcccuucaagcugaccugcgccaccacgcgccagguggugaacgucgugaccaccaagaucgcccucaagggcgggugaggacuaguuauaagacugacuagcccgaugggccucccaacgggcccuccuccccuccuugcaccgagauuaauaaaaaaaaaaaaaaaaaaaaaaaaaaaaaaaaaaaaaaaaaaaaaaaaaaaaaaaaaaaaaaaaugcaucccccccccccccccccccccccccccccccaaaggcucuuuucagagccaccagaauu

SEQ ID NO: 21378 - RNA, 6058 nt, Artificial Sequence
  SARS-CoV-2__MT919999.1__non-structural protein 3 (NSP3) mRNA gc
aggagaaagcuuaccauggcccccaccaaggugaccuucggcgacgacacggucaucgaggugcagggguacaagagcgugaacaucaccuucgagcuggacgagcgcaucgacaagguccucaacgagaagugcuccgccuacaccguggagcugggcaccgaggugaacgaguucgcgugcgucguggccgacgccgugaucaagacgcugcagccggucagcgagcuccugaccccccuggggaucgaccucgacgagugguccauggccaccuacuaccuguucgacgagagcggcgaguucaagcuggccucccacauguacugcagcuucuacccccccgacgaggacgaggaggagggggacugcgaggaggaggaguucgagccguccacccaguacgaguacggcacggaggacgacuaccagggcaagccccucgaguucggggcgaccagcgccgcccugcagcuggaggaggagcaggaggaggacuggcucgacgacgacucccagcagaccgugggccagcaggacgggagcgaggacaaccagaccacgaccauccagaccaucguggagguccagccccagcuggagauggagcugacccccguggugcagacgaucgaggucaacuccuucagcggcuaccucaagcugaccgacaacguguacaucaagaacgccgacaucguggaggaggcgaagaaggucaagccgaccgugguggucaacgccgccaacguguaccugaagcacgggggcggcguggccggggcccucaacaaggcgaccaacaacgccaugcaggucgaguccgacgacuacaucgccacgaacggcccccugaagguggggggcagcugcguccuguccggccacaaccucgccaagcacugccugcacgugguggggcccaacgucaacaagggcgaggacauccagcugcucaagagcgccuacgagaacuucaaccagcacgaggugcugcuggcgccccuccuguccgccgggaucuucggcgccgacccgauccacagccugcgggugugcgucgacaccgugcgcaccaacguguaccucgccgucuucgacaagaaccuguacgacaagcugguguccagcuuccucgagaugaagagcgagaagcagguggagcagaagaucgccgagauccccaaggaggaggucaagcccuucaucaccgaguccaagcccagcguggagcagcggaagcaggacgacaagaagaucaaggcgugcguggaggaggucacgaccacccuggaggagaccaaguuccugacggagaaccuccugcuguacaucgacaucaacgggaaccuccacccggacuccgccacccuggugagcgacaucgacaucaccuuccugaagaaggacgcccccuacaucgugggcgacgucgugcaggagggcgugcucaccgccgucgugauccccacgaagaaggccgggggcaccaccgagaugcuggcgaaggcccugcgcaaggugcccaccgacaacuacaucacgaccuacccggggcagggccucaacggguacaccgucgaggaggccaagaccgugcugaagaagugcaaguccgccuucuacauccugcccagcaucaucuccaacgagaagcaggagauccucggcaccgugagcuggaaccugcgggagaugcuggcgcacgccgaggagacgcgcaagcugaugcccgucugcguggagaccaaggccaucguguccaccauccagcggaaguacaagggcaucaagauccaggagggggucguggacuacggcgcccgcuucuacuucuacaccagcaagacgaccguggccucccucaucaacacccugaacgaccugaacgagacccucgucacgaugccccugggguacgugacccacggccugaaccucgaggaggcggcccgguacaugcgcagccugaaggugccggccaccgucuccgugagcucccccgacgccgugaccgccuacaacggguaccugacgagcuccagcaagacccccgaggagcacuucaucgagaccaucucccucgcgggcagcuacaaggacuggagcuacuccggccagagcacccagcuggggaucgaguuccugaagcggggcgacaaguccgucuacuacacgagcaaccccaccaccuuccaccucgacggggaggugaucaccuucgacaaccugaagacgcugcucucccugcgcgaggugcggaccaucaaggucuucaccaccguggacaacaucaaccugcacacgcagguggucgacaugagcaugaccuacggccagcaguucggcccgaccuaccucgacggggccgacgugaccaagaucaagccccacaacucccacgagggcaagacguucuacgugcugcccaacgacgacacccugcgcgucgaggccuucgaguacuaccacaccaccgacccgagcuuccucgggcgguacauguccgcccugaaccacacgaagaaguggaaguacccccaggugaacggccugaccagcaucaagugggccgacaacaacugcuaccucgcgaccgcccugcugacccuccagcagaucgagcugaaguucaacccccccgcccugcaggacgccuacuaccgcgcgcgggccggggaggccgccaacuucugcgcccucauccuggcguacugcaacaagacggugggcgagcugggcgacguccgcgagaccauguccuaccucuuccagcacgccaaccuggacagcugcaagcgggugcugaacgucgugugcaagaccugcgggcagcagcagaccacccucaagggcguggaggccgucauguacauggggacgcuguccuacgagcaguucaagaagggcgugcagaucccgugcaccugcgggaagcaggccaccaaguaccuggugcagcaggagagccccuucgucaugauguccgccccccccgcgcaguacgagcucaagcacggcaccuucacgugcgccagcgaguacaccggcaacuaccagugcgggcacuacaagcacaucaccuccaaggagacccuguacugcaucgacggcgcccugcucacgaagagcagcgaguacaaggggccgaucaccgacguguucuacaaggagaacuccuacaccaccacgaucaagcccgugaccuacaagcuggacggcgucgugugcaccgagaucgaccccaagcuggacaacuacuacaagaaggacaacagcuacuucaccgagcagcccaucgaccucgugccgaaccagcccuaccccaacgccuccuucgacaacuucaaguucgucugcgacaacaucaaguucgccgacgaccugaaccagcugacgggguacaagaagcccgcgagccgcgagcucaaggugaccuucuucccggaccugaacggcgacguggucgccaucgacuacaagcacuacacccccuccuucaagaagggcgccaagcugcuccacaagcccaucguguggcacgugaacaacgccaccaacaaggcgacguacaagcccaacaccuggugcauccggugccuguggagcaccaagccggucgagaccuccaacagcuucgacgugcugaaguccgaggacgcccaggggauggacaaccucgccugcgaggaccugaagcccgugagcgaggaggucguggagaaccccacgauccagaaggacgugcuggagugcaacgucaagaccaccgagguggugggcgacaucauccucaagcccgccaacaacucccugaagaucaccgaggaggucgggcacacggaccugauggccgcguacguggacaacagcucccucaccaucaagaagccgaacgagcugagccgcgugcugggccucaagacccuggccacccacgggcuggccgccgucaacuccgugcccugggacacgaucgccaacuacgcgaagcccuuccucaacaagguggucagcaccaccaccaacaucgugacgcgcugccugaaccgggugugcaccaacuacaugccguacuucuucacccugcuccugcagcugugcaccuucacccgcuccacgaacagccggaucaaggccuccaugcccaccaccaucgccaagaacaccgucaagagcgugggcaaguucugccucgaggccagcuucaacuaccugaagucccccaacuucagcaagcugaucaacaucaucaucugguuccuccugcuguccgugugccucggcagccugaucuacuccacggccgcgcuggggguccucaugagcaaccugggcaugcccuccuacugcaccggguaccgcgagggcuaccugaacagcaccaacgugaccaucgccacguacugcaccggcuccaucccgugcagcgugugccucuccgggcuggacagccuggacaccuaccccucccucgagaccauccagaucacgaucagcuccuucaagugggaccugaccgccuucggccuggucgccgagugguuccucgccuacauccuguucacccgguucuucuacgugcuggggcucgcggccaucaugcagcuguucuucagcuacuucgccgugcacuucaucuccaacagcuggcugauguggcugaucaucaaccucguccagauggcccccaucuccgcgauggugcgcauguacaucuucuucgccagcuucuacuacguguggaagagcuacguccacgugguggacggcugcaacuccagcaccugcaugaugugcuacaagcggaaccgcgccacgcgggucgagugcaccaccaucgugaacgggguccgccgguccuucuacguguacgccaacggcggcaagggguucugcaagcugcacaacuggaacugcgugaacugcgacaccuucugcgccggcagcacguucaucuccgacgaggucgcgcgcgaccugagccuccaguucaagcggcccaucaacccgaccgaccaguccagcuacaucguggacuccgugaccgucaagaacgggagcauccaccuguacuucgacaaggccggccagaagaccuacgagcgccacucccugagccacuucgugaaccucgacaaccugcgggccaacaacacgaaggggucccugcccaucaacgugaucgucuucgacggcaagagcaagugcgaggaguccagcgccaaguccgccagcguguacuacucccagcucaugugccagcccauccugcugcucgaccaggcgcuggugagcgacgucggcgacagcgccgagguggccgugaagauguucgacgccuacgucaacaccuucuccagcaccuucaacgugcccauggagaagcugaagacccucguggccacggcggaggccgagcuggccaagaacgucucccuggacaacgugcucagcaccuucaucuccgccgcgcgccagggguucguggacagcgacgucgagaccaaggacgugguggagugccugaagcugucccaccagagcgacaucgaggucaccggcgacuccugcaacaacuacaugcucacguacaacaagguggagaacaugaccccgcgggaccugggggccugcaucgacugcagcgcccgccacaucaacgcccagguggccaagucccacaacaucgcgcugaucuggaacgucaaggacuucaugagccucuccgagcagcugcggaagcagauccgcagcgccgccaagaagaacaaccugcccuucaagcucaccugcgccaccacgcgccagguggugaacgucgugaccaccaagaucgcccugaagggcgggugaggacuaguuauaagacugacuagcccgaugggccucccaacgggcccuccuccccuccuugcaccgagauuaauaaaaaaaaaaaaaaaaaaaaaaaaaaaaaaaaaaaaaaaaaaaaaaaaaaaaaaaaaaaaaaaaugcaucccccccccccccccccccccccccccccccaaaggcucuuuucagagccaccagaauu

SEQ ID NO: 21379 - RNA, 6058 nt, Artificial Sequence
  SARS-CoV-2__MT920003.1__non-structural protein 3 (NSP3) mRNA gc
aggagaaagcuuaccauggcccccaccaaggugaccuucggcgacgacacggucaucgaggugcagggguacaagagcgugaacaucaccuucgagcuggacgagcgcaucgacaagguccucaacgagaagugcuccgccuacaccguggagcugggcaccgaggugaacgaguucgcgugcgucguggccgacgccgugaucaagacgcugcagccggucagcgagcuccugaccccccuggggaucgaccucgacgagugguccauggccaccuacuaccuguucgacgagagcggcgaguucaagcuggccucccacauguacugcagcuucuacccccccgacgaggacgaggaggagggggacugcgaggaggaggaguucgagccguccacccaguacgaguacggcacggaggacgacuaccagggcaagccccucgaguucggggcgaccagcgccgcccugcagcccgaggaggagcaggaggaggacuggcuggacgacgacucccagcagaccgugggccagcaggacgggagcgaggacaaccagaccacgaccauccagaccaucguggagguccagccccagcucgagauggagcugaccccgguggugcagacgaucgaggucaacuccuucagcggcuaccugaagcucaccgacaacguguacaucaagaacgccgacaucguggaggaggcgaagaaggucaagcccaccgugguggucaacgccgccaacguguaccugaagcacgggggcggcguggccggggcccugaacaaggcgaccaacaacgccaugcaggucgaguccgacgacuacaucgccacgaacggcccccucaagguggggggcagcugcguccuguccggccacaaccuggccaagcacugccuccacgugguggggcccaacgucaacaagggcgaggacauccagcugcugaagagcgccuacgagaacuucaaccagcacgaggugcuccuggcgccgcugcucuccgccgggaucuucggcgccgaccccauccacagccugcgggugugcgucgacaccgugcgcaccaacguguaccuggccgucuucgacaagaaccucuacgacaagcugguguccagcuuccuggagaugaagagcgagaagcagguggagcagaagaucgccgagauccccaaggaggaggucaagcccuucaucaccgaguccaagccgagcguggagcagcggaagcaggacgacaagaagaucaaggcgugcguggaggaggucacgaccacccucgaggagaccaaguuccugacggagaaccugcuccuguacaucgacaucaacgggaaccugcaccccgacuccgccacccucgugagcgacaucgacaucaccuuccugaagaaggacgcccccuacaucgugggcgacgucgugcaggagggcgugcugaccgccgucgugauccccacgaagaaggccgggggcaccaccgagaugcucgcgaaggcccugcgcaaggugccgaccgacaacuacaucacgaccuaccccgggcagggccugaacggguacaccgucgaggaggccaagaccgugcucaagaagugcaaguccgccuucuacauccugcccagcaucaucuccaacgagaagcaggagauccugggcaccgugagcuggaaccuccgggagaugcuggcgcacgccgaggagacgcgcaagcugaugcccgucugcguggagaccaaggccaucguguccaccauccagcggaaguacaagggcaucaagauccaggagggggucguggacuacggcgcccgcuucuacuucuacaccagcaagacgaccguggccucccugaucaacacccucaacgaccugaacgagacccuggucacgaugccgcucggguacgugacccacggccugaaccuggaggaggcggcccgguacaugcgcagccucaaggugcccgccaccgucuccgugagcucccccgacgccgugaccgccuacaacggguaccugacgagcuccagcaagacccccgaggagcacuucaucgagaccaucucccuggcgggcagcuacaaggacuggagcuacuccggccagagcacccagcucgggaucgaguuccugaagcggggcgacaaguccgucuacuacacgagcaacccgaccaccuuccaccuggacggggaggugaucaccuucgacaaccucaagacgcugcugucccuccgcgaggugcggaccaucaaggucuucaccaccguggacaacaucaaccugcacacgcagguggucgacaugagcaugaccuacggccagcaguucggccccaccuaccuggacggggccgacgugaccaagaucaagccccacaacucccacgagggcaagacguucuacgugcucccgaacgacgacacccugcgcgucgaggccuucgaguacuaccacaccaccgaccccagcuuccuggggcgguacauguccgcccucaaccacacgaagaaguggaaguacccccaggugaacggccugaccagcaucaagugggccgacaacaacugcuaccuggcgaccgcccuccugacccugcagcagaucgagcucaaguucaaccccccggcccugcaggacgccuacuaccgcgcgcgggccggggaggccgccaacuucugcgcccugauccucgcguacugcaacaagacggugggcgagcugggcgacguccgcgagaccauguccuaccuguuccagcacgccaaccucgacagcugcaagcgggugcugaacgucgugugcaagaccugcgggcagcagcagaccacccugaagggcguggaggccgucauguacauggggacgcucuccuacgagcaguucaagaagggcgugcagauccccugcaccugcgggaagcaggccaccaaguaccuggugcagcaggagagccccuucgucaugauguccgcccccccggcgcaguacgagcugaagcacggcaccuucacgugcgccagcgaguacaccggcaacuaccagugcgggcacuacaagcacaucaccuccaaggagacccucuacugcaucgacggcacgcugcugaccaagagcagcgaguacaaggggcccaucaccgacguguucuacaaggagaacuccuacaccacgaccaucaagcccgugaccuacaagcucgacggcgucgugugcaccgagaucgaccccaagcuggacaacuacuacaagaaggacaacagcuacuucacggagcagccgaucgaccuggugcccaaccagcccuaccccaacgccuccuucgacaacuucaaguucgucugcgacaacaucaaguucgccgacgaccucaaccagcugaccggguacaagaagccggccagccgcgagcugaaggugaccuucuuccccgaccucaacggcgacguggucgcgaucgacuacaagcacuacacccccuccuucaagaagggcgccaagcugcugcacaagcccaucguguggcacgugaacaacgccacgaacaaggccaccuacaagccgaacaccuggugcauccggugccucuggagcaccaagcccgucgagacguccaacagcuucgacgugcugaaguccgaggacgcgcaggggauggacaaccuggccugcgaggaccucaagcccgugagcgaggaggucguggagaaccccaccauccagaaggacgugcuggagugcaacgucaagaccaccgagguggugggcgacaucauccugaagccggccaacaacucccucaagaucacggaggaggucgggcacaccgaccugauggccgccuacguggacaacagcucccugaccaucaagaagcccaacgagcucagccgcgugcugggccugaagacccucgcgacgcacgggcuggccgccgucaacuccgugcccugggacaccaucgccaacuacgccaagccguuccugaacaagguggucagcaccaccacgaacaucgugacccgcugccucaaccgggugugcaccaacuacaugcccuacuucuucacccugcugcuccagcugugcaccuucacgcgcuccaccaacagccggaucaaggcguccaugcccaccaccaucgccaagaacacggucaagagcgugggcaaguucugccuggaggccagcuucaacuaccucaagucccccaacuucagcaagcugaucaacaucaucaucugguuccugcuccuguccgugugccugggcagccucaucuacuccaccgccgcccuggggguccugaugagcaaccucggcaugccguccuacugcaccggguaccgcgagggcuaccugaacagcaccaacgugacgaucgcgaccuacugcaccggcuccauccccugcagcgugugccuguccgggcucgacagccuggacaccuaccccucccuggagacgauccagaucaccaucagcuccuucaagugggaccucaccgccuucggccuggucgccgagugguuccuggccuacauccucuucacccgguucuucuacgugcuggggcuggccgcgaucaugcagcucuucuucagcuacuucgccgugcacuucaucuccaacagcuggcugauguggcugaucaucaaccugguccagauggcccccaucuccgccauggugcgcauguacaucuucuucgcgagcuucuacuacguguggaagagcuacguccacgugguggacggcugcaacuccagcacgugcaugaugugcuacaagcggaaccgcgccacccgggucgagugcaccaccaucgugaacgggguccgccgguccuucuacguguacgccaacggcggcaagggguucugcaagcuccacaacuggaacugcgugaacugcgacacguucugcgccggcagcaccuucaucuccgacgaggucgcccgcgaccugagccugcaguucaagcggccgaucaaccccaccgaccaguccagcuacaucguggacuccgugaccgucaagaacgggagcauccaccucuacuucgacaaggcgggccagaagacguacgagcgccacucccugagccacuucgugaaccuggacaaccuccgggccaacaacaccaaggggucccugcccaucaacgugaucgucuucgacggcaagagcaagugcgaggaguccagcgccaaguccgccagcguguacuacucccagcugaugugccagcccauccuccugcuggaccaggcccucgugagcgacgucggcgacagcgcggagguggccgugaagauguucgacgccuacgucaacaccuucuccagcaccuucaacgugccgauggagaagcugaagacgcugguggccaccgccgaggcggagcucgccaagaacgucucccuggacaacgugcugagcaccuucaucuccgccgcccgccagggguucguggacagcgacgucgagaccaaggacgugguggagugccucaagcugucccaccagagcgacaucgaggucacgggcgacuccugcaacaacuacaugcugaccuacaacaagguggagaacaugaccccccgggaccucggggcgugcaucgacugcagcgcccgccacaucaacgcccagguggccaagucccacaacaucgcccugaucuggaacgucaaggacuucaugagccuguccgagcagcuccggaagcagauccgcagcgcggccaagaagaacaaccugcccuucaagcugaccugcgccacgacccgccagguggugaacgucgugaccaccaagaucgcccucaagggcgggugaggacuaguuauaagacugacuagcccgaugggccucccaacgggcccuccuccccuccuugcaccgagauuaauaaaaaaaaaaaaaaaaaaaaaaaaaaaaaaaaaaaaaaaaaaaaaaaaaaaaaaaaaaaaaaaaugcaucccccccccccccccccccccccccccccccaaaggcucuuuucagagccaccagaauu

SEQ ID NO: 21380 - RNA, 6058 nt, Artificial Sequence
  SARS-CoV-2__MT920013.1__non-structural protein 3 (NSP3) mRNA gc
aggagaaagcuuaccauggcccccaccaaggugaccuucggcgacgacacggucaucgaggugcagggguacaagagcgugaacaucaccuucgagcuggacgagcgcaucgacaagguccucaacgagaagugcuccgccuacaccguggagcugggcaccgaggugaacgaguucgcgugcgucguggccgacgccgugaucaagacgcugcagccggucagcgagcuccugaccccccuggggaucgaccucgacgagugguccauggccaccuacuaccuguucgacgagagcggcgaguucaagcuggccucccacauguacugcagcuucuacccccccgacgaggacgaggaggagggggacugcgaggaggaggaguucgagccguccacccaguacgaguacggcacggaggacgacuaccagggcaagccccucgaguucggggcgaccagcgccgcccugcagcccgaggaggagcaggaggaggacuggcuggacgacgacucccagcagaccgugggccagcaggacgggagcgaggacaaccagaccacgaccauccagaccaucguggagguccagccccagcucgagauggagcugaccccgguggugcagacgaucgaggucaacuccuucagcggcuaccugaagcucaccgacaacguguacaucaagaacgccgacaucguggaggaggcgaagaaggucaagcccaccgugguggucaacgccgccaacguguaccugaagcacgggggcggcguggccggggcccugaacaaggcgaccaacaacgccaugcaggucgaguccgacgacuacaucgccacgaacggcccccucaagguggggggcagcugcguccuguccggccacaaccuggccaagcacugccuccacgugguggggcccaacgucaacaagggcgaggacauccagcugcugaagagcgccuacgagaacuucaaccagcacgaggugcuccuggcgccgcugcucuccgccgggaucuucggcgccgaccccauccacagccugcgggugugcgucgacaccgugcgcaccaacguguaccuggccgucuucgacaagaaccucuacgacaagcugguguccagcuuccuggagaugaagagcgagaagcagguggagcagaagaucgccgagauccccaaggaggaggucaagcccuucaucaccgaguccaagccgagcguggagcagcggaagcaggacgacaagaagaucaaggcgugcguggaggaggucacgaccacccucgaggagaccaaguuccugacggagaaccugcuccuguacaucgacaucaacgggaaccugcaccccgacuccgccacccucgugagcgacaucgacaucaccuuccugaagaaggacgcccccuacaucgugggcgacgucgugcaggagggcgugcugaccgccgucgugauccccacgaagaaggccgggggcaccaccgagaugcucgcgaaggcccugcgcaaggugccgaccgacaacuacaucacgaccuaccccgggcagggccugaacggguacaccgucgaggaggccaagaccgugcucaagaagugcaaguccgccuucuacauccugcccagcaucaucuccaacgagaagcaggagauccugggcaccgugagcuggaaccuccgggagaugcuggcgcacgccgaggagacgcgcaagcugaugcccgucugcguggagaccaaggccaucguguccaccauccagcggaaguacaagggcaucaagauccaggagggggucguggacuacggcgcccgcuucuacuucuacaccagcaagacgaccguggccucccugaucaacacccucaacgaccugaacgagacccuggucacgaugccgcucggguacgugacccacggccugaaccuggaggaggcggcccgguacaugcgcagccucaaggugcccgccaccgucuccgugagcucccccgacgccgugaccgccuacaacggguaccugacgagcuccagcaagacccccgaggagcacuucaucgagaccaucucccuggcgggcagcuacaaggacuggagcuacuccggccagagcacccagcucgggaucgaguuccugaagcggggcgacaaguccgucuacuacacgagcaacccgaccaccuuccaccuggacggggaggugaucaccuucgacaaccucaagacgcugcugucccuccgcgaggugcggaccaucaaggucuucaccaccguggacaacaucaaccugcacacgcagguggucgacaugagcaugaccuacggccagcaguucggccccaccuaccuggacggggccgacgugaccaagaucaagccccacaacucccacgagggcaagacguucuacgugcucccgaacgacgacacccugcgcgucgaggccuucgaguacuaccacaccaccgacagcuccuuccuggggcgguacaugagcgcccucaaccacacgaagaaguggaaguacccccaggugaacggccugaccuccaucaagugggccgacaacaacugcuaccuggcgaccgcccuccugacccugcagcagaucgagcucaaguucaacccccccgcccugcaggacgccuacuaccgcgcgcgggccggggaggccgccaacuucugcgcccugauccucgcguacugcaacaagacggugggcgagcugggcgacguccgcgagaccaugagcuaccuguuccagcacgccaaccucgacuccugcaagcgggugcugaacgucgugugcaagaccugcgggcagcagcagaccacccugaagggcguggaggccgucauguacauggggacgcucagcuacgagcaguucaagaagggcgugcagaucccgugcaccugcgggaagcaggccaccaaguaccuggugcagcaggagucccccuucgucaugaugagcgccccccccgcgcaguacgagcugaagcacggcaccuucacgugcgccuccgaguacaccggcaacuaccagugcgggcacuacaagcacaucaccagcaaggagacccucuacugcaucgacggcgcccugcugacgaagagcuccgaguacaaggggccgaucaccgacguguucuacaaggagaacagcuacaccaccacgaucaagcccgugaccuacaagcucgacggcgucgugugcaccgagaucgaccccaagcuggacaacuacuacaagaaggacaacuccuacuucaccgagcagcccaucgaccuggugccgaaccagcccuaccccaacgccagcuucgacaacuucaaguucgucugcgacaacaucaaguucgccgacgaccucaaccagcugacgggguacaagaagcccgcgucccgcgagcugaaggugaccuucuucccggaccucaacggcgacguggucgccaucgacuacaagcacuacacccccagcuucaagaagggcgccaagcugcugcacaagcccaucguguggcacgugaacaacgccaccaacaaggcgacguacaagcccaacaccuggugcauccggugccucugguccaccaagccggucgagaccagcaacuccuucgacgugcugaagagcgaggacgcccaggggauggacaaccuggccugcgaggaccucaagcccguguccgaggaggucguggagaaccccacgauccagaaggacgugcuggagugcaacgucaagaccaccgagguggugggcgacaucauccugaagcccgccaacaacagccucaagaucaccgaggaggucgggcacacggaccugauggccgcguacguggacaacuccagccugaccaucaagaagccgaacgagcucucccgcgugcugggccugaagacccucgccacccacgggcuggccgccgucaacagcgugcccugggacacgaucgccaacuacgcgaagcccuuccugaacaagguggucuccaccaccaccaacaucgugacgcgcugccucaaccgggugugcaccaacuacaugccguacuucuucacccugcugcuccagcugugcaccuucacccgcagcacgaacucccggaucaaggccagcaugcccaccaccaucgccaagaacaccgucaagagcgugggcaaguucugccuggaggccuccuucaacuaccucaagagccccaacuucuccaagcugaucaacaucaucaucugguuccugcuccugagcgugugccugggcucccucaucuacagcacggccgcgcuggggguccugauguccaaccucggcaugcccagcuacugcaccggguaccgcgagggcuaccugaacuccaccaacgugaccaucgccacguacugcaccggcagcaucccgugcuccgugugccugagcgggcucgacucccuggacaccuaccccagccuggagaccauccagaucacgaucuccagcuucaagugggaccucaccgccuucggccuggucgccgagugguuccuggccuacauccucuucacccgguucuucuacgugcuggggcuggcggccaucaugcagcucuucuucuccuacuucgccgugcacuucaucagcaacuccuggcugauguggcugaucaucaaccugguccagauggcccccaucagcgcgauggugcgcauguacaucuucuucgccagcuucuacuacguguggaaguccuacguccacgugguggacggcugcaacagcuccaccugcaugaugugcuacaagcggaaccgcgccacgcgggucgagugcaccaccaucgugaacgggguccgccggagcuucuacguguacgccaacggcggcaagggguucugcaagcuccacaacuggaacugcgugaacugcgacaccuucugcgccggcuccacguucaucagcgacgaggucgcgcgcgaccugucccugcaguucaagcggcccaucaacccgaccgaccagagcuccuacaucguggacagcgugaccgucaagaacggguccauccaccucuacuucgacaaggccggccagaagaccuacgagcgccacagccugucccacuucgugaaccuggacaaccuccgggccaacaacacgaaggggagccugcccaucaacgugaucgucuucgacggcaaguccaagugcgaggagagcuccgccaagagcgccuccguguacuacagccagcugaugugccagcccauccuccugcuggaccaggcgcucgugagcgacgucggcgacuccgccgagguggccgugaagauguucgacgccuacgucaacaccuucagcuccaccuucaacgugcccauggagaagcugaagacccugguggccacggcggaggccgagcucgccaagaacgucagccuggacaacgugcuguccaccuucaucagcgccgcgcgccagggguucguggacuccgacgucgagaccaaggacgugguggagugccucaagcugagccaccaguccgacaucgaggucaccggcgacagcugcaacaacuacaugcugacguacaacaagguggagaacaugaccccgcgggaccucggggccugcaucgacugcuccgcccgccacaucaacgcccagguggccaagagccacaacaucgcgcugaucuggaacgucaaggacuucaugucccugagcgagcagcuccggaagcagauccgcuccgccgccaagaagaacaaccugcccuucaagcugaccugcgccaccacgcgccagguggugaacgucgugaccaccaagaucgcccucaagggcgggugaggacuaguuauaagacugacuagcccgaugggccucccaacgggcccuccuccccuccuugcaccgagauuaauaaaaaaaaaaaaaaaaaaaaaaaaaaaaaaaaaaaaaaaaaaaaaaaaaaaaaaaaaaaaaaaaugcaucccccccccccccccccccccccccccccccaaaggcucuuuucagagccaccagaauu

SEQ ID NO: 21381 - RNA, 6058 nt, Artificial Sequence
  SARS-CoV-2__MT920018.1__non-structural protein 3 (NSP3) mRNA gc
aggagaaagcuuaccauggcccccaccaaggugaccuucggcgacgacacggucaucgaggugcagggguacaagagcgugaacaucaccuucgagcuggacgagcgcaucgacaagguccucaacgagaagugcuccgccuacaccguggagcugggcaccgaggugaacgaguucgcgugcgucguggccgacgccgugaucaagacgcugcagccggucagcgagcuccugaccccccuggggaucgaccucgacgagugguccauggccaccuacuaccuguucgacgagagcggcgaguucaagcuggccucccacauguacugcagcuucuacccccccgacgaggacgaggaggagggggacugcgaggaggaggaguucgagccguccacccaguacgaguacggcacggaggacgacuaccagggcaagccccucgaguucggggcgaccagcgccgcccugcagcccgaggaggagcaggaggaggacuggcuggacgacgacucccagcagaccgugggccagcaggacgggagcgaggacaaccagaccacgaccauccagaccaucguggagguccagccccagcucgagauggagcugaccccgguggugcagacgaucgaggucaacuccuucagcggcuaccugaagcucaccgacaacguguacaucaagaacgccgacaucguggaggaggcgaagaaggucaagcccaccgugguggucaacgccgccaacguguaccugaagaacgggggcggcguggccggggcccugaacaaggcgaccaacaacgccaugcaggucgaguccgacgacuacaucgccacgaacggcccccucaagguggggggcagcugcguccuguccggccacaaccuggccaagcacugccuccacgugguggggcccaacgucaacaagggcgaggacauccagcugcugaagagcgccuacgagaacuucaaccagcacgaggugcuccuggcgccgcugcucuccgccgggaucuucggcgccgaccccauccacagccugcgggugugcgucgacaccgugcgcaccaacguguaccuggccgucuucgacaagaaccucuacgacaagcugguguccagcuuccuggagaugaagagcgagaagcagguggagcagaagaucgccgagauccccaaggaggaggucaagcccuucaucaccgaguccaagccgagcguggagcagcggaagcaggacgacaagaagaucaaggcgugcguggaggaggucacgaccacccucgaggagaccaaguuccugacggagaaccugcuccuguacaucgacaucaacgggaaccugcaccccgacuccgccacccucgugagcgacaucgacaucaccuuccugaagaaggacgcccccuacaucgugggcgacgucgugcaggagggcgugcugaccgccgucgugauccccacgaagaaggccgggggcaccaccgagaugcucgcgaaggcccugcgcaaggugccgaccgacaacuacaucacgaccuaccccgggcagggccugaacggguacaccgucgaggaggccaagaccgugcucaagaagugcaaguccgccuucuacauccugcccagcaucaucuccaacgagaagcaggagauccugggcaccgugagcuggaaccuccgggagaugcuggcgcacgccgaggagacgcgcaagcugaugcccgucugcguggagaccaaggccaucguguccaccauccagcggaaguacaagggcaucaagauccaggagggggucguggacuacggcgcccgcuucuacuucuacaccagcaagacgaccguggccucccugaucaacacccucaacgaccugaacgagacccuggucacgaugccgcucggguacgugacccacggccugaaccuggaggaggcggcccgguacaugcgcagccucaaggugcccgccaccgucuccgugagcucccccgacgccgugaccgccuacaacggguaccugacgagcuccagcaagacccccgaggagcacuucaucgagaccaucucccuggcgggcagcuacaaggacuggagcuacuccggccagagcacccagcucgggaucgaguuccugaagcggggcgacaaguccgucuacuacacgagcaacccgaccaccuuccaccuggacggggaggugaucaccuucgacaaccucaagacgcugcugucccuccgcgaggugcggaccaucaaggucuucaccaccguggacaacaucaaccugcacacgcagguggucgacaugagcaugaccuacggccagcaguucggccccaccuaccuggacggggccgacgugaccaagaucaagccccacaacucccacgagggcaagacguucuacgugcucccgaacgacgacacccugcgcgucgaggccuucgaguacuaccacaccaccgaccccagcuuccuggggcgguacauguccgcccucaaccacacgaagaaguggaaguacccccaggugaacggccugaccagcaucaagugggccgacaacaacugcuaccuggcgaccgcccuccugacccugcagcagaucgagcucaaguucaaccccccggcccugcaggacgccuacuaccgcgcgcgggccggggaggccgccaacuucugcgcccugauccucgcguacugcaacaagacggugggcgagcugggcgacguccgcgagaccauguccuaccuguuccagcacgccaaccucgacagcugcaagcgggugcugaacgucgugugcaagaccugcgggcagcagcagaccacccugaagggcguggaggccgucauguacauggggacgcucuccuacgagcaguucaagaagggcgugcagauccccugcaccugcgggaagcaggccaccaaguaccuggugcagcaggagagccccuucgucaugauguccgcccccccggcgcaguacgagcugaagcacggcaccuucacgugcgccagcgaguacaccggcaacuaccagugcgggcacuacaagcacaucaccuccaaggagacccucuacugcaucgacggcgcccugcugacgaagagcagcgaguacaaggggcccaucaccgacguguucuacaaggagaacuccuacaccaccacgaucaagcccgugaccuacaagcucgacggcgucgugugcaccgagaucgaccccaagcuggacaacuacuacaagaaggacaacagcuacuucaccgagcagccgaucgaccuggugcccaaccagcccuaccccaacgccuccuucgacaacuucaaguucgucugcgacaacaucaaguucgccgacgaccucaaccagcugacgggguacaagaagccggcgagccgcgagcugaaggugaccuucuuccccgaccucaacggcgacguggucgccaucgacuacaagcacuacacccccuccuucaagaagggcgccaagcugcugcacaagcccaucguguggcacgugaacaacgccaccaacaaggcgacguacaagccgaacaccuggugcauccggugccucuggagcaccaagcccgucgagaccuccaacagcuucgacgugcugaaguccgaggacgcccaggggauggacaaccuggccugcgaggaccucaagcccgugagcgaggaggucguggagaaccccacgauccagaaggacgugcuggagugcaacgucaagaccaccgagguggugggcgacaucauccugaagccggccaacaacucccucaagaucaccgaggaggucgggcacacggaccugauggccgcguacguggacaacagcucccugaccaucaagaagcccaacgagcucagccgcgugcugggccugaagacccucgccacccacgggcuggccgccgucaacuccgugcccugggacacgaucgccaacuacgcgaagccguuccugaacaagguggucagcaccaccaccaacaucgugacgcgcugccucaaccgggugugcaccaacuacaugcccuacuucuucacccugcugcuccagcugugcaccuucacccgcuccacgaacagccggaucaaggccuccaugcccaccaccaucgccaagaacaccgucaagagcgugggcaaguucugccuggaggccagcuucaacuaccucaagucccccaacuucagcaagcugaucaacaucaucaucugguuccugcuccuguccgugugccugggcagccucaucuacuccacggccgcgcuggggguccugaugagcaaccucggcaugccguccuacugcaccggguaccgcgagggcuaccugaacagcaccaacgugaccaucgccacguacugcaccggcuccauccccugcagcgugugccuguccgggcucgacagccuggacaccuaccccucccuggagaccauccagaucacgaucagcuccuucaagugggaccucaccgccuucggccuggucgccgagugguuccuggccuacauccucuucacccgguucuucuacgugcuggggcuggcggccaucaugcagcucuucuucagcuacuucgccgugcacuucaucuccaacagcuggcugauguggcugaucaucaaccugguccagauggcccccaucuccgcgauggugcgcauguacaucuucuucgccagcuucuacuacguguggaagagcuacguccacgugguggacggcugcaacuccagcaccugcaugaugugcuacaagcggaaccgcgccacgcgggucgagugcaccaccaucgugaacgggguccgccgguccuucuacguguacgccaacggcggcaagggguucugcaagcuccacaacuggaacugcgugaacugcgacaccuucugcgccggcagcacguucaucuccgacgaggucgcgcgcgaccugagccugcaguucaagcggccgaucaaccccaccgaccaguccagcuacaucguggacuccgugaccgucaagaacgggagcauccaccucuacuucgacaaggccggccagaagaccuacgagcgccacucccugagccacuucgugaaccuggacaaccuccgggccaacaacacgaaggggucccugcccaucaacgugaucgucuucgacggcaagagcaagugcgaggaguccagcgccaaguccgccagcguguacuacucccagcugaugugccagcccauccuccugcuggaccaggcgcucgugagcgacgucggcgacagcgccgagguggccgugaagauguucgacgccuacgucaacaccuucuccagcaccuucaacgugccgauggagaagcugaagacccugguggccacggcggaggccgagcucgccaagaacgucucccuggacaacgugcugagcaccuucaucuccgccgcgcgccagggguucguggacagcgacgucgagaccaaggacgugguggagugccucaagcugucccaccagagcgacaucgaggucaccggcgacuccugcaacaacuacaugcugacguacaacaagguggagaacaugaccccccgggaccucggggccugcaucgacugcagcgcccgccacaucaacgcccagguggccaagucccacaacaucgcgcugaucuggaacgucaaggacuucaugagccuguccgagcagcuccggaagcagauccgcagcgccgccaagaagaacaaccugcccuucaagcugaccugcgccaccacgcgccagguggugaacgucgugaccaccaagaucgcccucaagggcgggugaggacuaguuauaagacugacuagcccgaugggccucccaacgggcccuccuccccuccuugcaccgagauuaauaaaaaaaaaaaaaaaaaaaaaaaaaaaaaaaaaaaaaaaaaaaaaaaaaaaaaaaaaaaaaaaaugcaucccccccccccccccccccccccccccccccaaaggcucuuuucagagccaccagaauu

SEQ ID NO: 21382 - RNA, 6058 nt, Artificial Sequence
  SARS-CoV-2__MT920036.1__non-structural protein 3 (NSP3) mRNA gc
aggagaaagcuuaccauggcccccaccaaggugaccuucggcgacgacacggucaucgaggugcagggguacaagagcgugaacaucaccuucgagcuggacgagcgcaucgacaagguccucaacgagaagugcuccgccuacaccguggagcugggcaccgaggugaacgaguucgcgugcgucguggccgacgccgugaucaagacgcugcagccggucagcgagcuccugaccccccuggggaucgaccucgacgagugguccauggccaccuacuaccuguucgacgagagcggcgaguucaagcuggccucccacauguacugcagcuucuacccccccgacgaggacgaggaggagggggacugcgaggaggaggaguucgagccguccacccaguacgaguacggcacggaggacgacuaccagggcaagccccucgaguucggggcgaccagcgccgcccugcagcccgaggaggagcaggaggaggacuggcuggacgacgacucccagcagaccgugggccagcaggacgggagcgaggacaaccagaccacgaccauccagaccaucguggagguccagccccagcucgagauggagcugaccccgguggugcagacgaucgaggucaacuccuucagcggcuaccugaagcucaccgacaacguguacaucaagaacgccgacaucguggaggaggcgaagaaggucaagcccaccgugguggucaacgccgccaacguguaccugaagcacgggggcggcguggccggggcccugaacaaggcgaccaacaacgccaugcaggucgaguccgacgacuacaucgccacgaacggcccccucaagguggggggcagcugcguccuguccggccacaaccuggccaagcacugccuccacgugguggggcccaacgucaacaagggcgaggacauccagcugcugaagagcgccuacgagaacuucaaccagcacgaggugcuccuggcgccgcugcucuccgccgggaucuucggcgccgaccccauccacagccugcgggugugcgucgacaccgugcgcaccaacguguaccuggccgucuucgacaagaaccucuacgacaagcugguguccagcuuccuggagaugaagagcgagaagcagguggagcagaagaucgccgagauccccaaggaggaggucaagcccuucaucaccgaguccaagccgagcguggagcagcggaagcaggacgacaagaagaucaaggcgugcguggaggaggucacgaccacccucgaggagaccaaguuccugacggagaaccugcuccuguacaucgacaucaacgggaaccugcaccccgacuccgccacccucgugagcgacaucgacaucaccuuccugaagaaggacgcccccuacaucgugggcgacgucgugcaggagggcgugcugaccgccgucgugauccccacgaagaaggccgggggcaccaccgagaugcucgcgaaggcccugcgcaaggugccgaccgacaacuacaucacgaccuaccccgggcagggccugaacggguacaccgucgaggaggccaagaccgugcucaagaagugcaaguccgccuucuacauccugcccagcaucaucuccaacgagaagcaggagauccugggcaccgugagcuggaaccuccgggagaugcuggcgcacgccgaggagacgcgcaagcugaugcccgucugcguggagaccaaggccaucguguccaccauccagcggaaguacaagggcaucaagauccaggagggggucguggacuacggcgcccgcuucuacuucuacaccagcaagacgaccguggccucccugaucaacacccucaacgaccugaacgagacccuggucacgaugccgcucggguacgugacccacggccugaaccuggaggaggcggcccgguacaugcgcagccucaaggugcccgccaccgucuccgugagcucccccgacgccgugaccgccuacaacggguaccugacgagcuccagcaagacccccgaggagcacuucaucgagaccaucucccuggcgggcagcuacaaggacuggagcuacuccggccagagcacccagcucgggaucgaguuccugaagcggggcgacaaguccgucuacuacacgagcaacccgaccaccuuccaccuggacggggaggugaucaccuucgacaaccucaagacgcugcugucccuccgcgaggugcggaccaucaaggucuucaccaccguggacaacaucaaccugcacacgcagguggucgacaugagcaugaccuacggccagcaguucggccccaccuaccuggacggggccgacgugaccaagaucaagccccacaacucccacgagggcaagacguucuacgugcucccgaacgacgacacccugcgcgucgaggccuucgaguacuaccacaccaccgaccccagcuuccuggggcgguacauguccgcccucaaccacacgaagaaguggaaguacccccaggugaacggccugaccagcaucaagugggccgacaacaacugcuaccuggcgaccgcccuccugacccugcagcagaucgagcucaaguucaaccccccggcccugcaggacgccuacuaccgcgcgcgggccggggaggccgccaacuucugcgcccugauccucgcguacugcaacaagacggugggcgagcugggcgacguccgcgagaccauguccuaccuguuccagcacgccaaccucgacagcugcaagcgggugcugaacgucgugugcaagaccugcgggcagcagcagaccacccugaagggcguggaggccgucauguacauggggacgcucuccuacgagcaguucaagaagggcgugcagauccccugcaccugcgggaagcaggccaccaaguaccuggugcagcaggagagccccuucgucaugauguccgcccccccggcgcaguacgagcugaagcacggcaccuucacgugcgccagcgaguacaccggcaacuaccagugcgggcacuacaagcacaucaccuccaaggagacccucuacugcaucgacggcgcccugcugacgaagagcagcgaguacaaggggcccaucaccgacguguucuacaaggagaacuccuacaccaccacgaucaagcccgugaccuacaagcucgacggcgucgugugcaccgagaucgaccccaagcuggacaacuacuacaagaaggacaacagcuacuucaccgagcagccgaucgaccuggugcccaaccagcccuaccccaacgccuccuucgacaacuucaaguucgucugcgacaacaucaaguucgccgacgaccucaaccagcugacgggguacaagaagccggcgcugcgcgagcucaaggugaccuucuuccccgaccugaacggcgacguggucgccaucgacuacaagcacuacacccccagcuucaagaagggcgccaagcugcuccacaagcccaucguguggcacgugaacaacgccaccaacaaggcgacguacaagccgaacaccuggugcauccggugccugugguccaccaagcccgucgagaccagcaacuccuucgacgugcugaagagcgaggacgcccaggggauggacaaccucgccugcgaggaccugaagcccguguccgaggaggucguggagaaccccacgauccagaaggacgugcuggagugcaacgucaagaccaccgagguggugggcgacaucauccucaagccggccaacaacagccugaagaucaccgaggaggucgggcacacggaccugauggccgcguacguggacaacuccagccucaccaucaagaagcccaacgagcugucccgcgugcugggccucaagacccuggccacccacgggcuggccgccgucaacagcgugcccugggacacgaucgccaacuacgcgaagccguuccucaacaagguggucuccaccaccaccaacaucgugacgcgcugccugaaccgggugugcaccaacuacaugcccuacuucuucacccugcuccugcagcugugcaccuucacccgcagcacgaacucccggaucaaggccagcaugcccaccaccaucgccaagaacaccgucaaguccgugggcaaguucugccucgaggccagcuucaacuaccugaagagccccaacuucuccaagcugaucaacaucaucaucugguuccuccugcugagcgugugccucggcucccugaucuacagcacggccgcgcuggggguccucauguccaaccugggcaugccgagcuacugcaccggguaccgcgagggcuaccugaacuccaccaacgugaccaucgccacguacugcaccggcagcauccccugcuccgugugccucagcgggcuggacucccuggacaccuaccccagccucgagaccauccagaucacgaucuccagcuucaagugggaccugaccgccuucggccuggucgccgagugguuccucgccuacauccuguucacccgguucuucuacgugcuggggcucgcggccaucaugcagcuguucuucuccuacuucgccgugcacuucaucagcaacuccuggcugauguggcugaucaucaaccucguccagauggcccccaucagcgcgauggugcgcauguacaucuucuucgccuccuucuacuacguguggaagagcuacguccacgugguggacggcugcaacagcuccaccugcaugaugugcuacaagcggaaccgcgccacgcgggucgagugcaccaccaucgugaacgggguccgccggagcuucuacguguacgccaacggcggcaagggguucugcaagcugcacaacuggaacugcgugaacugcgacaccuucugcgccggcuccacguucaucagcgacgaggucgcgcgcgaccugucccuccaguucaagcggccgaucaaccccaccgaccagagcuccuacaucguggacagcgugaccgucaagaacggguccauccaccuguacuucgacaaggccggccagaagaccuacgagcgccacagccugucccacuucgugaaccucgacaaccugcgggccaacaacacgaaggggagccugcccaucaacgugaucgucuucgacggcaaguccaagugcgaggagagcuccgccaagagcgccuccguguacuacagccagcucaugugccagcccauccugcugcucgaccaggcgcugguguccgacgucggcgacagcgccgagguggccgugaagauguucgacgccuacgucaacaccuucagcuccaccuucaacgugccgauggagaagcugaagacccucguggccacggcggaggccgagcuggccaagaacgucagccuggacaacgugcucuccaccuucaucagcgccgcgcgccagggguucguggacuccgacgucgagaccaaggacgugguggagugccugaagcugagccaccaguccgacaucgaggucaccggcgacagcugcaacaacuacaugcucacguacaacaagguggagaacaugaccccccgggaccugggggccugcaucgacugcuccgcccgccacaucaacgcccagguggccaagagccacaacaucgcgcugaucuggaacgucaaggacuucaugucccucagcgagcagcugcggaagcagauccgcuccgccgccaagaagaacaaccugcccuucaagcucaccugcgccaccacgcgccagguggugaacgucgugaccaccaagaucgcccugaagggcgggugaggacuaguuauaagacugacuagcccgaugggccucccaacgggcccuccuccccuccuugcaccgagauuaauaaaaaaaaaaaaaaaaaaaaaaaaaaaaaaaaaaaaaaaaaaaaaaaaaaaaaaaaaaaaaaaaugcaucccccccccccccccccccccccccccccccaaaggcucuuuucagagccaccagaauu

SEQ ID NO: 21383 - RNA, 6058 nt, Artificial Sequence
  SARS-CoV-2__MT921159.1__non-structural protein 3 (NSP3) mRNA gc
aggagaaagcuuaccauggcccccaccaaggugaccuucggcgacgacacggucaucgaggugcagggguacaagagcgugaacaucaccuucgagcuggacgagcgcaucgacaagguccucaacgagaagugcuccgccuacaccguggagcugggcaccgaggugaacgaguucgcgugcgucguggccgacgccgugaucaagacgcugcagccggucagcgagcuccugaccccccuggggaucgaccucgacgagugguccauggccaccuacuaccuguucgacgagagcggcgaguucaagcuggccucccacauguacugcagcuucuacccccccgacgaggacgaggaggagggggacugcgaggaggaggaguucgagccguccacccaguacgaguacggcacggaggacgacuaccagggcaagccccucgaguucggggcgaccagcgccgcccugcagcccgaggaggagcaggaggaggacuggcuggacgacgacucccagcagaccgugggccagcaggacgggagcgaggacaaccagaccacgaccauccagaccaucguggagguccagccccagcucgagauggagcugaccccgguggugcagacgaucgaggucaacuccuucagcggcuaccugaagcucaccgacaacguguacaucaagaacgccgacaucguggaggaggcgaagaaggucaagcccaccgugguggucaacgccgccaacguguaccugaagcacgggggcggcguggccggggcccugaacaaggcgaccaacaacgccaugcaggucgaguccgacgacuacaucgccacgaacggcccccucaagguggggggcagcugcguccuguccggccacaaccuggccaagcacugccuccacgugguggggcccaacgucaacaagggcgaggacauccagcugcugaagagcgccuacgagaacuucaaccagcacgaggugcuccuggcgccgcugcucuccgccgggaucuucggcgccgaccccauccacagccugcgggugugcgucgacaccgugcgcaccaacguguaccuggccgucuucgacaagaaccucuacgacaagcugguguccagcuuccuggagaccaagagcgagaagcagguggagcagaagaucgccgagauccccaaggaggaggucaagcccuucaucacggaguccaagccgagcguggagcagcggaagcaggacgacaagaagaucaaggcgugcguggaggaggucaccaccacccucgaggagacgaaguuccugaccgagaaccugcuccuguacaucgacaucaacgggaaccugcaccccgacuccgccacccucgugagcgacaucgacaucaccuuccugaagaaggacgcccccuacaucgugggcgacgucgugcaggagggcgugcugacggccgucgugauccccaccaagaaggccgggggcaccaccgagaugcucgcgaaggcccugcgcaaggugccgacggacaacuacaucaccaccuaccccgggcagggccugaacggguacaccgucgaggaggccaagaccgugcucaagaagugcaaguccgccuucuacauccugcccagcaucaucuccaacgagaagcaggagauccugggcacggugagcuggaaccuccgggagaugcuggcgcacgccgaggagacccgcaagcugaugcccgucugcguggagaccaaggccaucguguccaccauccagcggaaguacaagggcaucaagauccaggagggggucguggacuacggcgcccgcuucuacuucuacacgagcaagaccaccguggccucccugaucaacacccucaacgaccugaacgagacgcuggucaccaugccgcucggguacgugacccacggccugaaccuggaggaggcggcccgguacaugcgcagccucaaggugcccgccaccgucuccgugagcucccccgacgccgugacggccuacaacggguaccugaccagcuccagcaagacccccgaggagcacuucaucgagaccaucucccuggcgggcagcuacaaggacuggagcuacuccggccagagcacgcagcucgggaucgaguuccugaagcggggcgacaaguccgucuacuacaccagcaacccgaccaccuuccaccuggacggggaggugaucacguucgacaaccucaagacccugcugucccuccgcgaggugcggaccaucaaggucuucaccacgguggacaacaucaaccugcacacccagguggucgacaugagcaugaccuacggccagcaguucggccccaccuaccuggacggggccgacgugacgaagaucaagccccacaacucccacgagggcaagaccuucuacgugcucccgaacgacgacacccugcgcgucgaggccuucgaguacuaccacaccacggaccccagcuuccuggggcgguacauguccgcccucaaccacaccaagaaguggaaguacccccaggugaacggccugaccagcaucaagugggccgacaacaacugcuaccuggcgaccgcccuccugacgcugcagcagaucgagcucaaguucaaccccccggcccugcaggacgccuacuaccgcgcgcgggccggggaggccgccaacuucugcgcccugauccucgcguacugcaacaagaccgugggcgagcugggcgacguccgcgagaccauguccuaccuguuccagcacgccaaccucgacagcugcaagcgggugcugaacgucgugugcaagaccugcgggcagcagcagaccacgcugaagggcguggaggccgucauguacauggggacccucuccuacgagcaguucaagaagggcgugcagauccccugcaccugcgggaagcaggccaccaaguaccuggugcagcaggagagccccuucgucaugauguccgcccccccggcgcaguacgagcugaagcacggcacguucaccugcgccagcgaguacaccggcaacuaccagugcgggcacuacaagcacaucaccuccaaggagacgcucuacugcaucgacggcgcccugcugaccaagagcagcgaguacaaggggcccaucaccgacguguucuacaaggagaacuccuacaccacgaccaucaagcccgugaccuacaagcucgacggcgucgugugcaccgagaucgaccccaagcuggacaacuacuacaagaaggacaacagcuacuucacggagcagccgaucgaccuggugcccaaccagcccuaccccaacgccuccuucgacaacuucaaguucgucugcgacaacaucaaguucgccgacgaccucaaccagcugaccggguacaagaagccggcgagccgcgagcugaaggugaccuucuuccccgaccucaacggcgacguggucgccaucgacuacaagcacuacacccccuccuucaagaagggcgccaagcugcugcacaagcccaucguguggcacgugaacaacgccacgaacaaggcgaccuacaagccgaacaccuggugcauccggugccucuggagcaccaagcccgucgagacguccaacagcuucgacgugcugaaguccgaggacgcccaggggauggacaaccuggccugcgaggaccucaagcccgugagcgaggaggucguggagaaccccaccauccagaaggacgugcuggagugcaacgucaagaccaccgagguggugggcgacaucauccugaagccggccaacaacucccucaagaucacggaggaggucgggcacaccgaccugauggccgcguacguggacaacagcucccugaccaucaagaagcccaacgagcucagccgcgugcugggccugaagacccucgccacgcacgggcuggccgccgucaacuccgugcccugggacaccaucgccaacuacgcgaagccguuccugaacaagguggucagcaccaccacgaacaucgugacccgcugccucaaccgggugugcaccaacuacaugcccuacuucuucacccugcugcuccagcugugcaccuucacgcgcuccaccaacagccggaucaaggccuccaugcccaccaccaucgccaagaacacggucaagagcgugggcaaguucugccuggaggccagcuucaacuaccucaagucccccaacuucagcaagcugaucaacaucaucaucugguuccugcuccuguccgugugccugggcagccucaucuacuccaccgccgcgcuggggguccugaugagcaaccucggcaugccguccuacugcaccggguaccgcgagggcuaccugaacagcaccaacgugacgaucgccaccuacugcaccggcuccauccccugcagcgugugccuguccgggcucgacagccuggacaccuaccccucccuggagacgauccagaucaccaucagcuccuucaagugggaccucaccgccuucggccuggucgccgagugguuccuggccuacauccucuucacccgguucuucuacgugcuggggcuggcggccaucaugcagcucuucuucagcuacuucgccgugcacuucaucuccaacagcuggcugauguggcugaucaucaaccugguccagauggcccccaucuccgcgauggugcgcauguacaucuucuucgccagcuucuacuacguguggaagagcuacguccacgugguggacggcugcaacuccagcacgugcaugaugugcuacaagcggaaccgcgccacccgggucgagugcaccaccaucgugaacgggguccgccgguccuucuacguguacgccaacggcggcaagggguucugcaagcuccacaacuggaacugcgugaacugcgacacguucugcgccggcagcaccuucaucuccgacgaggucgcgcgcgaccugagccugcaguucaagcggccgaucaaccccaccgaccaguccagcuacaucguggacuccgugaccgucaagaacgggagcauccaccucuacuucgacaaggccggccagaagacguacgagcgccacucccugagccacuucgugaaccuggacaaccuccgggccaacaacaccaaggggucccugcccaucaacgugaucgucuucgacggcaagagcaagugcgaggaguccagcgccaaguccgccagcguguacuacucccagcugaugugccagcccauccuccugcuggaccaggcgcucgugagcgacgucggcgacagcgccgagguggccgugaagauguucgacgccuacgucaacaccuucuccagcaccuucaacgugccgauggagaagcugaagacgcugguggccaccgcggaggccgagcucgccaagaacgucucccuggacaacgugcugagcaccuucaucuccgccgcgcgccagggguucguggacagcgacgucgagaccaaggacgugguggagugccucaagcugucccaccagagcgacaucgaggucacgggcgacuccugcaacaacuacaugcugaccuacaacaagguggagaacaugaccccccgggaccucggggccugcaucgacugcagcgcccgccacaucaacgcccagguggccaagucccacaacaucgcgcugaucuggaacgucaaggacuucaugagccuguccgagcagcuccggaagcagauccgcagcgccgccaagaagaacaaccugcccuucaagcugaccugcgccacgacccgccagguggugaacgucgugaccaccaagaucgcccucaagggcgggugaggacuaguuauaagacugacuagcccgaugggccucccaacgggcccuccuccccuccuugcaccgagauuaauaaaaaaaaaaaaaaaaaaaaaaaaaaaaaaaaaaaaaaaaaaaaaaaaaaaaaaaaaaaaaaaaugcaucccccccccccccccccccccccccccccccaaaggcucuuuucagagccaccagaauu

SEQ ID NO: 21384 - RNA, 6058 nt, Artificial Sequence
  SARS-CoV-2__MT913053.1__non-structural protein 3 (NSP3) mRNA gc
aggagaaagcuuaccauggcccccaccaaggugaccuucggcgacgacacggucaucgaggugcagggguacaagagcgugaacaucaccuucgagcuggacgagcgcaucgacaagguccucaacgagaagugcuccgccuacaccguggagcugggcaccgaggugaacgaguucgcgugcgucguggccgacgccgugaucaagacgcugcagccggucagcgagcuccugaccccccuggggaucgaccucgacgagugguccauggccaccuacuaccuguucgacgagagcggcgaguucaagcuggccucccacauguacugcagcuucuacccccccgacgaggacgaggaggagggggacugcgaggaggaggaguucgagccguccacccaguacgaguacggcacggaggacgacuaccagggcaagccccucgaguucggggcgaccagcgccgcccugcagcccgaggaggagcaggaggaggacuggcuggacgacgacucccagcagaccgugggccagcaggacgggagcgaggacaaccagaccacgaccauccagaccaucguggagguccagccccagcucgagauggagcugaccccgguggugcagacgaucgaggucaacuccuucagcggcuaccugaagcucaccgacaacguguacaucaagaacgccgacaucguggaggaggcgaagaaggucaagcccaccgugguggucaacgccgccaacguguaccugaagcacgggggcggcguggccggggcccugaacaaggcgaccaacaacgccaugcaggucgaguccgacgacuacaucgccacgaacggcccccucaagguggggggcagcugcguccuguccggccacaaccuggccaagcacugccuccacgugguggggcccaacgucaacaagggcgaggacauccagcugcugaagagcgccuacgagaacuucaaccagcacgaggugcuccuggcgccgcugcucuccgccgggaucuucggcgccgaccccauccacagccugcgggugugcgucgacaccgugcgcaccaacguguaccuggccgucuucgacaagaaccucuacgacaagcugguguccagcuuccuggagaugaagagcgagaagcagguggagcagaagaucgccgagauccccaaggaggaggucaagcccuucaucaccgaguccaagccgagcguggagcagcggaagcaggacgacaagaagaucaaggcgugcguggaggaggucacgaccacccucgaggagaccaaguuccugacggagaaccugcuccuguacaucgacaucaacgggaaccugcaccccgacuccgccacccucgugagcgacaucgacaucaccuuccugaagaaggacgcccccuacaucgugggcgacgucgugcaggagggcgugcugaccgccgucgugauccccacgaagaaggccgggggcaccaccgagaugcucgcgaaggcccugcgcaaggugccgaccgacaacuacaucacgaccuaccccgggcagggccugaacggguacaccgucgaggaggccaagaccgugcucaagaagugcaaguccgccuucuacauccugcccagcaucaucuccaacgagaagcaggagauccugggcaccgugagcuggaaccuccgggagaugcuggcgcacgccgaggagacgcgcaagcugaugcccgucugcguggagaccaaggccaucguguccaccauccagcggaaguacaagggcaucaagauccaggagggggucguggacuacggcacccgcuucuacuucuacacgagcaagaccaccguggccucccugaucaacacccucaacgaccugaacgagacgcuggucaccaugccgcucggguacgugacccacggccugaaccuggaggaggccgcgcgguacaugcgcagccucaaggugcccgccaccgucuccgugagcucccccgacgccgugacggccuacaacggguaccugaccagcuccagcaagacccccgaggagcacuucaucgagaccaucucccuggccggcagcuacaaggacuggagcuacuccggccagagcacgcagcucgggaucgaguuccugaagcggggcgacaaguccgucuacuacaccagcaacccgaccaccuuccaccuggacggggaggugaucacguucgacaaccucaagacccugcugucccuccgcgaggugcggaccaucaaggucuucaccacgguggacaacaucaaccugcacacccagguggucgacaugagcaugaccuacggccagcaguucggccccaccuaccuggacggggcggacgugacgaagaucaagccccacaacucccacgagggcaagaccuucuacgugcucccgaacgacgacacccugcgcgucgaggccuucgaguacuaccacaccacggaccccagcuuccuggggcgguacauguccgcccucaaccacaccaagaaguggaaguacccccaggugaacggccugaccagcaucaagugggccgacaacaacugcuaccuggccaccgcgcuccugacgcugcagcagaucgagcucaaguucaaccccccggcccugcaggacgccuacuaccgcgcccgggcgggggaggccgccaacuucugcgcccugauccucgccuacugcaacaagaccgugggcgagcugggcgacguccgcgagaccauguccuaccuguuccagcacgcgaaccucgacagcugcaagcgggugcugaacgucgugugcaagaccugcgggcagcagcagaccacgcugaagggcguggaggccgucauguacauggggacccucuccuacgagcaguucaagaagggcgugcagauccccugcaccugcgggaagcaggccaccaaguaccuggugcagcaggagagccccuucgucaugauguccgcccccccggcccaguacgagcugaagcacggcacguucaccugcgcgagcgaguacaccggcaacuaccagugcgggcacuacaagcacaucaccuccaaggagacgcucuacugcaucgacggcgcccugcugaccaagagcagcgaguacaaggggcccaucaccgacguguucuacaaggagaacuccuacaccacgaccaucaagcccgugaccuacaagcucgacggcgucgugugcaccgagaucgaccccaagcuggacaacuacuacaagaaggacaacagcuacuucacggagcagccgaucgaccuggugcccaaccagcccuaccccaacgccuccuucgacaacuucaaguucgucugcgacaacaucaaguucgccgacgaccucaaccagcugaccggguacaagaagccggccagccgcgagcugaaggugaccuucuuccccgaccucaacggcgacguggucgcgaucgacuacaagcacuacacccccuccuucaagaagggcgccaagcugcugcacaagcccaucguguggcacgugaacaacgccacgaacaaggccaccuacaagccgaacaccuggugcauccggugccucuggagcaccaagcccgucgagacguccaacagcuucgacgugcugaaguccgaggacgcgcaggggauggacaaccuggccugcgaggaccucaagcccgugagcgaggaggucguggagaaccccaccauccagaaggacgugcuggagugcaacgucaagaccaccgagguggugggcgacaucauccugaagccggccaacaacucccucaagaucacggaggaggucgggcacaccgaccugauggccgccuacguggacaacagcucccugaccaucaagaagcccaacgagcucagccgcgugcugggccugaagacccucgcgacgcacgggcuggccgccgucaacuccgugcccugggacaccaucgccaacuacgccaagccguuccugaacaagguggucagcaccaccacgaacaucgugacccgcugccucaaccgggugugcaccaacuacaugcccuacuucuucacccugcugcuccagcugugcaccuucacgcgcuccaccaacagccggaucaaggcguccaugcccaccaccaucgccaagaacacggucaagagcgugggcaaguucugccuggaggccagcuucaacuaccucaagucccccaacuucagcaagcugaucaacaucaucaucugguuccugcuccuguccgugugccugggcagccucaucuacuccaccgccgcccuggggguccugaugagcaaccucggcaugccguccuacugcaccggguaccgcgagggcuaccugaacagcaccaacgugacgaucgcgaccuacugcaccggcuccauccccugcagcgugugccuguccgggcucgacagccuggacaccuaccccucccuggagacgauccagaucaccaucagcuccuucaagugggaccucaccgccuucggccuggucgccgagugguuccuggccuacauccucuucacccgguucuucuacgugcuggggcuggccgcgaucaugcagcucuucuucagcuacuucgccgugcacuucaucuccaacagcuggcugauguggcugaucaucaaccugguccagauggcccccaucuccgccauggugcgcauguacaucuucuucgcgagcuucuacuacguguggaagagcuacguccacgugguggacggcugcaacuccagcacgugcaugaugugcuacaagcggaaccgcgccacccgggucgagugcaccaccaucgugaacgggguccgccgguccuucuacguguacgccaacggcggcaagggguucugcaagcuccacaacuggaacugcgugaacugcgacacguucugcgccggcagcaccuucaucuccgacgaggucgcccgcgaccugagccugcaguucaagcggccgaucaaccccaccgaccaguccagcuacaucguggacuccgugaccgucaagaacgggagcauccaccucuacuucgacaaggcgggccagaagacguacgagcgccacucccugagccacuucgugaaccuggacaaccuccgggccaacaacaccaaggggucccugcccaucaacgugaucgucuucgacggcaagagcaagugcgaggaguccagcgccaaguccgccagcguguacuacucccagcugaugugccagcccauccuccugcuggaccaggcccucgugagcgacgucggcgacagcgcggagguggccgugaagauguucgacgccuacgucaacaccuucuccagcaccuucaacgugccgauggagaagcugaagacgcugguggccaccgccgaggcggagcucgccaagaacgucucccuggacaacgugcugagcaccuucaucuccgccgcccgccagggguucguggacagcgacgucgagaccaaggacgugguggagugccucaagcugucccaccagagcgacaucgaggucacgggcgacuccugcaacaacuacaugcugaccuacaacaagguggagaacaugaccccccgggaccucggggcgugcaucgacugcagcgcccgccacaucaacgcccagguggccaagucccacaacaucgcccugaucuggaacgucaaggacuucaugagccuguccgagcagcuccggaagcagauccgcagcgcggccaagaagaacaaccugcccuucaagcugaccugcgccacgacccgccagguggugaacgucgugaccaccaagaucgcccucaagggcgggugaggacuaguuauaagacugacuagcccgaugggccucccaacgggcccuccuccccuccuugcaccgagauuaauaaaaaaaaaaaaaaaaaaaaaaaaaaaaaaaaaaaaaaaaaaaaaaaaaaaaaaaaaaaaaaaaugcaucccccccccccccccccccccccccccccccaaaggcucuuuucagagccaccagaauu

SEQ ID NO: 21385 - RNA, 6058 nt, Artificial Sequence
  SARS-CoV-2__MT913074.1__non-structural protein 3 (NSP3) mRNA gc
aggagaaagcuuaccauggcccccaccaaggugaccuucggcgacgacacggucaucgaggugcagggguacaagagcgugaacaucaccuucgagcuggacgagcgcaucgacaagguccucaacgagaagugcuccgccuacaccguggagcugggcaccgaggugaacgaguucgcgugcgucguggccgacgccgugaucaagacgcugcagccggucagcgagcuccugaccccccuggggaucgaccucgacgagugguccauggccaccuacuaccuguucgacgagagcggcgaguucaagcuggccucccacauguacugcagcuucuacccccccgacgaggacgaggaggagggggacugcgaggaggaggaguucgagccguccacccaguacgaguacggcacggaggacgacuaccagggcaagccccucgaguucggggcgaccagcgccgcccugcagcccgaggaggagcaggaggaggacuggcuggacgacgacucccagcagaccgugggccagcaggacgggagcgaggacaaccagaccacgaccauccagaccaucguggagguccagccccagcucgagauggagcugaccccgguggugcagacgaucgaggucaacuccuucagcggcuaccugaagcucaccgacaacguguacaucaagaacgccgacaucguggaggaggcgaagaaggucaagcccaccgugguggucaacgccgccaacguguaccugaagcacgggggcggcguggccggggcccugaacaaggcgaccaacaacgccaugcaggucgaguccgacgacuacaucgccacgaacggcccccucaagguggggggcagcugcguccuguccggccacaaccuggccaagcacugccuccacgugguggggcccaacgucaacaagggcgaggacauccagcugcugaagagcgccuacgagaacuucaaccagcacgaggugcuccuggcgccgcugcucuccgccgggaucuucggcgccgaccccauccacagccugcgggugugcgucgacaccgugcgcaccaacguguaccuggccgucuucgacaagaaccucuacgacaagcugguguccagcuuccuggagaugaagagcgagaagcagguggagcagaagaucgccgagauccccaaggaggaggucaagcccuucaucaccgaguccaagccgagcguggagcagcggaagcaggacgacaagaagaucaaggcgugcguggaggaggucacgaccacccucgaggagaccaaguuccugacggagaaccugcuccuguacaucgacaucaacgggaaccugcaccccgacuccgccacccucgugagcgacaucgacaucaccuuccugaagaaggacgcccccuacaucgugggcgacgucgugcaggagggcgugcugaccgccgucgugauccccacgaagaaggccgggggcaccaccgagaugcucgcgaaggcccugcgcaaggugccgaccgacaacuacaucacgaccuaccccgggcagggccugaacggguacaccgucgaggaggccaagaccgugcucaagaagugcaaguccgccuucuacauccugcccagcaucaucuccaacgagaagcaggagauccugggcaccgugagcuggaaccuccgggagaugcuggcgcacgccgaggagacgcgcaagcugaugcccgucugcguggagaccaaggccaucguguccaccauccagcggaaguacaagggcaucaagauccaggagggggucguggacuacggcgcccgcuucuacuucuacaccagcaagacgaccguggccucccugaucaacacccucaacgaccugaacgagacccuggucacgaugccgcucggguacgugacccacggccugaaccuggaggaggcggcccgguacaugcgcagccucaaggugcccgccaccgucuccgugagcucccccgacgccgugaccgccuacaacggguaccugacgagcuccagcaagacccccgaggagcacuucaucgagaccaucucccuggcgggcagcuacaaggacuggagcuacuccggccagagcacccagcucgggaucgaguuccugaagcggggcgacaaguccgucuacuacacgagcaacccgaccaccuuccaccuggacggggaggugaucaccuucgacaaccucaagacgcugcugucccuccgcgaggugcggaccaucaaggucuucaccaccguggacaacaucaaccugcacacgcagguggucgacaugagcaugaccuacggccagcaguucggccccaccuaccuggacggggccgacgugaccaagaucaagccccacaacucccacgagggcaagacguucuacgugcucccgaacgacgacacccugcgcgucgaggccuucgaguacuaccacaccaccgaccccagcuuccuggggcgguacauguccgcccucaaccacacgaagaaguggaaguacccccaggugaacggccugaccagcaucaagugggccgacaacaacugcuaccuggcgaccgcccuccugacccugcagcagaucgagcucaaguucaaccccccggcccugcaggacgccuacuaccgcgcgcgggccggggaggccgccaacuucugcgcccugauccucgcguacugcaacaagacggugggcgagcugggcgacguccgcgagaccauguccuaccuguuccagcacgccaaccucgacagcugcaagcgggugcugaacgucgugugcaagaccugcgggcagcagcagaccacccugaagggcguggaggccgucauguacauggggacgcucuccuacgagcaguucaagaagggcgugcagauccccugcaccugcgggaagcaggccaccaaguaccuggugcagcaggagagccccuucgucaugauguccgcccccccggcgcaguacgagcugaagcacggcaccuucacgugcgccagcgaguacaccggcaacuaccagugcgggcacuacaagcacaucaccuccaaggagacccucuacugcaucgacggcgcccugcugacgaagagcagcgaguacaaggggcccaucaccgacguguucuacaaggagaacuccuacaccaccacgaucaagcccgugaccuacaagcucgacggcgucgugugcaccgagaucgaccccaagcuggacaacuacuacaagaaggacaacagcuacuucaccgagcagccgaucgaccuggugcccaaccagcccuaccucaacgccuccuucgacaacuucaaguucgucugcgacaacaucaaguucgccgacgaccugaaccagcugacgggguacaagaagcccgcgagccgcgagcucaaggugaccuucuucccggaccugaacggcgacguggucgccaucgacuacaagcacuacacccccuccuucaagaagggcgccaagcugcuccacaagcccaucguguggcacgugaacaacgccaccaacaaggcgacguacaagcccaacaccuggugcauccggugccuguggagcaccaagccggucgagaccuccaacagcuucgacgugcugaaguccgaggacgcccaggggauggacaaccucgccugcgaggaccugaagcccgugagcgaggaggucguggagaaccccacgauccagaaggacgugcuggagugcaacgucaagaccaccgagguggugggcgacaucauccucaagcccgccaacaacucccugaagaucaccgaggaggucgggcacacggaccugauggccgcguacguggacaacagcucccucaccaucaagaagccgaacgagcugagccgcgugcugggccucaagacccuggccacccacgggcuggccgccgucaacuccgugcccugggacacgaucgccaacuacgcgaagcccuuccucaacaagguggucagcaccaccaccaacaucgugacgcgcugccugaaccgggugugcaccaacuacaugccguacuucuucacccugcuccugcagcugugcaccuucacccgcuccacgaacagccggaucaaggccuccaugcccaccaccaucgccaagaacaccgucaagagcgugggcaaguucugccucgaggccagcuucaacuaccugaagucccccaacuucagcaagcugaucaacaucaucaucugguuccuccugcuguccgugugccucggcagccugaucuacuccacggccgcgcuggggguccucaugagcaaccugggcaugcccuccuacugcaccggguaccgcgagggcuaccugaacagcaccaacgugaccaucgccacguacugcaccggcuccaucccgugcagcgugugccucuccgggcuggacagccuggacaccuaccccucccucgagaccauccagaucacgaucagcuccuucaagugggaccugaccgccuucggccuggucgccgagugguuccucgccuacauccuguucacccgguucuucuacgugcuggggcucgcggccaucaugcagcuguucuucagcuacuucgccgugcacuucaucuccaacagcuggcugauguggcugaucaucaaccucguccagauggcccccaucuccgcgauggugcgcauguacaucuucuucgccagcuucuacuacguguggaagagcuacguccacgugguggacggcugcaacuccagcaccugcaugaugugcuacaagcggaaccgcgccacgcgggucgagugcaccaccaucgugaacgggguccgccgguccuucuacguguacgccaacggcggcaagggguucugcaagcugcacaacuggaacugcgugaacugcgacaccuucugcgccggcagcacguucaucuccgacgaggucgcgcgcgaccugagccuccaguucaagcggcccaucaacccgaccgaccaguccagcuacaucguggacuccgugaccgucaagaacgggagcauccaccuguacuucgacaaggccggccagaagaccuacgagcgccacucccugagccacuucgugaaccucgacaaccugcgggccaacaacacgaaggggucccugcccaucaacgugaucgucuucgacggcaagagcaagugcgaggaguccagcgccaaguccgccagcguguacuacucccagcucaugugccagcccauccugcugcucgaccaggcgcuggugagcgacgucggcgacagcgccgagguggccgugaagauguucgacgccuacgucaacaccuucuccagcaccuucaacgugcccauggagaagcugaagacccucguggccacggcggaggccgagcuggccaagaacgucucccuggacaacgugcucagcaccuucaucuccgccgcgcgccagggguucguggacagcgacgucgagaccaaggacgugguggagugccugaagcugucccaccagagcgacaucgaggucaccggcgacuccugcaacaacuacaugcucacguacaacaagguggagaacaugaccccgcgggaccugggggccugcaucgacugcagcgcccgccacaucaacgcccagguggccaagucccacaacaucgcgcugaucuggaacgucaaggacuucaugagccucuccgagcagcugcggaagcagauccgcagcgccgccaagaagaacaaccugcccuucaagcucaccugcgccaccacgcgccagguggugaacgucgugaccaccaagaucgcccugaagggcgggugaggacuaguuauaagacugacuagcccgaugggccucccaacgggcccuccuccccuccuugcaccgagauuaauaaaaaaaaaaaaaaaaaaaaaaaaaaaaaaaaaaaaaaaaaaaaaaaaaaaaaaaaaaaaaaaaugcaucccccccccccccccccccccccccccccccaaaggcucuuuucagagccaccagaauu

SEQ ID NO: 21386 - RNA, 6058 nt, Artificial Sequence
  SARS-CoV-2__MT913076.1__non-structural protein 3 (NSP3) mRNA gc
aggagaaagcuuaccauggcccccaccaaggugaccuucggcgacgacacggucaucgaggugcagggguacaagagcgugaacaucaccuucgagcuggacgagcgcaucgacaagguccucaacgagaagugcuccgccuacaccguggagcugggcaccgaggugaacgaguucgcgugcgucguggccgacgccgugaucaagacgcugcagccggucagcgagcuccugaccccccuggggaucgaccucgacgagugguccauggccaccuacuaccuguucgacgagagcggcgaguucaagcuggccucccacauguacugcagcuucuacccccccgacgaggacgaggaggagggggacugcgaggaggaggaguucgagccguccacccaguacgaguacggcacggaggacgacuaccagggcaagccccucgaguucggggcgaccagcgccgcccugcagcccgaggaggagcaggaggaggacuggcuggacgacgacucccagcagaccgugggccagcaggacgggagcgaggacaaccagaccacgaccauccagaccaucguggagguccagccccagcucgagauggagcugaccccgguggugcagacgaucgaggucaacuccuucagcggcuaccugaagcucaccgagaacguguacaucaagaacgccgacaucguggaggaggcgaagaaggucaagcccaccgugguggucaacgccgccaacguguaccugaagcacgggggcggcguggccggggcccugaacaaggcgaccaacaacgccaugcaggucgaguccgacgacuacaucgccacgaacggcccccucaagguggggggcagcugcguccuguccggccacaaccuggccaagcacugccuccacgugguggggcccaacgucaacaagggcgaggacauccagcugcugaagagcgccuacgagaacuucaaccagcacgaggugcuccuggcgccgcugcucuccgccgggaucuucggcgccgaccccauccacagccugcgggugugcgucgacaccgugcgcaccaacguguaccuggccgucuucgacaagaaccucuacgacaagcugguguccagcuuccuggagaugaagagcgagaagcagguggagcagaagaucgccgagauccccaaggaggaggucaagcccuucaucaccgaguccaagccgagcguggagcagcggaagcaggacgacaagaagaucaaggcgugcguggaggaggucacgaccacccucgaggagaccaaguuccugacggagaaccugcuccuguacaucgacaucaacgggaaccugcaccccgacuccgccacccucgugagcgacaucgacaucaccuuccugaagaaggacgcccccuacaucgugggcgacgucgugcaggagggcgugcugaccgccgucgugauccccacgaagaaggccgggggcaccaccgagaugcucgcgaaggcccugcgcaaggugccgaccgacaacuacaucacgaccuaccccgggcagggccugaacggguacaccgucgaggaggccaagaccgugcucaagaagugcaaguccgccuucuacauccugcccagcaucaucuccaacgagaagcaggagauccugggcaccgugagcuggaaccuccgggagaugcuggcgcacgccgaggagacgcgcaagcugaugcccgucugcguggagaccaaggccaucguguccaccauccagcggaaguacaagggcaucaagauccaggagggggucguggacuacggcgcccgcuucuacuucuacaccagcaagacgaccguggccucccugaucaacacccucaacgaccugaacgagacccuggucacgaugccgcucggguacgugacccacggccugaaccuggaggaggcggcccgguacaugcgcagccucaaggugcccgccaccgucuccgugagcucccccgacgccgugaccgccuacaacggguaccugacgagcuccagcaagacccccgaggagcacuucaucgagaccaucucccuggcgggcagcuacaaggacuggagcuacuccggccagagcacccagcucgggaucgaguuccugaagcggggcgacaaguccgucuacuacacgagcaacccgaccaccuuccaccuggacggggaggugaucaccuucgacaaccucaagacgcugcugucccuccgcgaggugcggaccaucaaggucuucaccaccguggacaacaucaaccugcacacgcagguggucgacaugagcaugaccuacggccagcaguucggccccaccuaccuggacggggccgacgugaccaagaucaagccccacaacucccacgagggcaagacguucuacgugcucccgaacgacgacacccugcgcgucgaggccuucgaguacuaccacaccaccgaccccagcuuccuggggcgguacauguccgcccucaaccacacgaagaaguggaaguacccccaggugaacggccugaccagcaucaagugggccgacaacaacugcuaccuggcgaccgcccuccugacccugcagcagaucgagcucaaguucaaccccccggcccugcaggacgccuacuaccgcgcgcgggccggggaggccgccaacuucugcgcccugauccucgcguacugcaacaagacggugggcgagcugggcgacguccgcgagaccauguccuaccuguuccagcacgccaaccucgacagcugcaagcgggugcugaacgucgugugcaagaccugcgggcagcagcagaccacccugaagggcguggaggccgucauguacauggggacgcucuccuacgagcaguucaagaagggcgugcagauccccugcaccugcgggaagcaggccaccaaguaccuggugcagcaggagagccccuucgucaugauguccgcccccccggcgcaguacgagcugaagcacggcaccuucacgugcgccagcgaguacaccggcaacuaccagugcgggcacuacaagcacaucaccuccaaggagacccucuacugcaucgacggcgcccugcugacgaagagcagcgaguacaaggggcccaucaccgacguguucuacaaggagaacuccuacaccaccacgaucaagcccgugaccuacaagcucgacggcgucgugugcaccgagaucgaccccaagcuggacaacuacuacaagaaggacaacagcuacuucaccgagcagccgaucgaccuggugcccaaccagcccuaccccaacgccuccuucgacaacuucaaguucgucugcgacaacaucaaguucgccgacgaccucaaccagcugacgggguacaagaagccggcgagccgcgagcugaaggugaccuucuuccccgaccucaacggcgacguggucgccaucgacuacaagcacuacacccccuccuucaagaagggcgccaagcugcugcacaagcccaucguguggcacgugaacaacgccaccaacaaggcgacguacaagccgaacaccuggugcauccggugccucuggagcaccaagcccgucgagaccuccaacagcuucgacgugcugaaguccgaggacgcccaggggauggacaaccuggccugcgaggaccucaagcccgugagcgaggaggucguggagaaccccacgauccagaaggacgugcuggagugcaacgucaagaccaccgagguggugggcgacaucauccugaagccggccaacaacucccucaagaucaccgaggaggucgggcacacggaccugauggccgcguacguggacaacagcucccugaccaucaagaagcccaacgagcucagccgcgugcugggccugaagacccucgccacccacgggcuggccgccgucaacuccgugcccugggacacgaucgccaacuacgcgaagccguuccugaacaagguggucagcaccaccaccaacaucgugacgcgcugccucaaccgggugugcaccaacuacaugcccuacuucuucacccugcugcuccagcugugcaccuucacccgcuccacgaacagccggaucaaggccuccaugcccaccaccaucgccaagaacaccgucaagagcgugggcaaguucugccuggaggccagcuucaacuaccucaagucccccaacuucagcaagcugaucaacaucaucaucugguuccugcuccuguccgugugccugggcagccucaucuacuccacggccgcgcuggggguccugaugagcaaccucggcaugccguccuacugcaccggguaccgcgagggcuaccugaacagcaccaacgugaccaucgccacguacugcaccggcuccauccccugcagcgugugccuguccgggcucgacagccuggacaccuaccccucccuggagaccauccagaucacgaucagcuccuucaagugggaccucaccgccuucggccuggucgccgagugguuccuggccuacauccucuucacccgguucuucuacgugcuggggcuggcggccaucaugcagcucuucuucagcuacuucgccgugcacuucaucuccaacagcuggcugauguggcugaucaucaaccugguccagauggcccccaucuccgcgauggugcgcauguacaucuucuucgccagcuucuacuacguguggaagagcuacguccacgugguggacggcugcaacuccagcaccugcaugaugugcuacaagcggaaccgcgccacgcgggucgagugcaccaccaucgugaacgggauccgccgguccuucuacgucuacgccaacggcggcaagggguucugcaagcuccacaacuggaacugcgugaacugcgacaccuucugcgccggcagcacguucaucuccgacgagguggcgcgcgaccugagccugcaguucaagcggccgaucaaccccaccgaccaguccagcuacaucgucgacuccgugaccgugaagaacgggagcauccaccucuacuucgacaaggccggccagaagaccuacgagcgccacucccugagccacuucgucaaccuggacaaccuccgggccaacaacacgaaggggucccugcccaucaacgugaucguguucgacggcaagagcaagugcgaggaguccagcgccaaguccgccagcgucuacuacucccagcugaugugccagcccauccuccugcuggaccaggcgcucgugagcgacgugggcgacagcgccgaggucgccgugaagauguucgacgccuacgugaacaccuucuccagcaccuucaacgucccgauggagaagcugaagacccugguggccacggcggaggccgagcucgccaagaacgugucccuggacaacguccugagcaccuucaucuccgccgcgcgccagggguucguggacagcgacguggagaccaaggacgucguggagugccucaagcugucccaccagagcgacaucgaggugaccggcgacuccugcaacaacuacaugcugacguacaacaaggucgagaacaugaccccccgggaccucggggccugcaucgacugcagcgcccgccacaucaacgcccagguggccaagucccacaacaucgcgcugaucuggaacgugaaggacuucaugagccuguccgagcagcuccggaagcagauccgcagcgccgccaagaagaacaaccugcccuucaagcugaccugcgccaccacgcgccaggucgugaacguggucaccaccaagaucgcccucaagggcgggugaggacuaguuauaagacugacuagcccgaugggccucccaacgggcccuccuccccuccuugcaccgagauuaauaaaaaaaaaaaaaaaaaaaaaaaaaaaaaaaaaaaaaaaaaaaaaaaaaaaaaaaaaaaaaaaaugcaucccccccccccccccccccccccccccccccaaaggcucuuuucagagccaccagaauu

SEQ ID NO: 21387 - RNA, 6058 nt, Artificial Sequence
  SARS-CoV-2__MT913119.1__non-structural protein 3 (NSP3) mRNA gc
aggagaaagcuuaccauggcccccaccaaggugaccuucggcgacgacacggucaucgaggugcagggguacaagagcgugaacaucaccuucgagcuggacgagcgcaucgacaagguccucaacgagaagugcuccgccuacaccguggagcugggcaccgaggugaacgaguucgcgugcgucguggccgacgccgugaucaagacgcugcagccggucagcgagcuccugaccccccuggggaucgaccucgacgagugguccauggccaccuacuaccuguucgacgagagcggcgaguucaagcuggccucccacauguacugcagcuucuacccccccgacgaggacgaggaggagggggacugcgaggaggaggaguucgagccguccacccaguacgaguacggcacggaggacgacuaccagggcaagccccucgaguucggggcgaccagcgccgcccugcagcccgaggaggagcaggaggaggacuggcuggacgacgacucccagcagaccgugggccagcaggacgggagcgaggacaaccagaccacgaccauccagaccaucguggagguccagccccagcucgagauggagcugaccccgguggugcagacgaucgaggucaacuccuucagcggcuaccugaagcucaccgagaacguguacaucaagaacgccgacaucguggaggaggcgaagaaggucaagcccaccgugguggucaacgccgccaacguguaccugaagcacgggggcggcguggccggggcccugaacaaggcgaccaacaacgccaugcaggucgaguccgacgacuacaucgccacgaacggcccccucaagguggggggcagcugcguccuguccggccacaaccuggccaagcacugccuccacgugguggggcccaacgucaacaagggcgaggacauccagcugcugaagagcgccuacgagaacuucaaccagcacgaggugcuccuggcgccgcugcucuccgccgggaucuucggcgccgaccccauccacagccugcgggugugcgucgacaccgugcgcaccaacguguaccuggccgucuucgacaagaaccucuacgacaagcugguguccagcuuccuggagaugaagagcgagaagcagguggagcagaagaucgccgagauccccaaggaggaggucaagcccuucaucaccgaguccaagccgagcguggagcagcggaagcaggacgacaagaagaucaaggcgugcguggaggaggucacgaccacccucgaggagaccaaguuccugacggagaaccugcuccuguacaucgacaucaacgggaaccugcaccccgacuccgccacccucgugagcgacaucgacaucaccuuccugaagaaggacgcccccuacaucgugggcgacgucgugcaggagggcgugcugaccgccgucgugauccccacgaagaaggccgggggcaccaccgagaugcucgcgaaggcccugcgcaaggugccgaccgacaacuacaucacgaccuaccccgggcagggccugaacggguacaccgucgaggaggccaagaccgugcucaagaagugcaaguccgccuucuacauccugcccagcaucaucuccaacgagaagcaggagauccugggcaccgugagcuggaaccuccgggagaugcuggcgcacgccgaggagacgcgcaagcugaugcccgucugcguggagaccaaggccaucguguccaccauccagcggaaguacaagggcaucaagauccaggagggggucguggacuacggcgcccgcuucuacuucuacaccagcaagacgaccguggccucccugaucaacacccucaacgaccugaacgagacccuggucacgaugccgcucggguacgugacccacggccugaaccuggaggaggcggcccgguacaugcgcagccucaaggugcccgccaccgucuccgugagcucccccgacgccgugaccgccuacaacggguaccugacgagcuccagcaagacccccgaggagcacuucaucgagaccaucucccuggcgggcagcuacaaggacuggagcuacuccggccagagcacccagcucgggaucgaguuccugaagcggggcgacaaguccgucuacuacacgagcaacccgaccaccuuccaccuggacggggaggugaucaccuucgacaaccucaagacgcugcugucccuccgcgaggugcggaccaucaaggucuucaccaccguggacaacaucaaccugcacacgcagguggucgacaugagcaugaccuacggccagcaguucggccccaccuaccuggacggggccgacgugaccaagaucaagccccacaacucccacgagggcaagacguucuacgugcucccgaacgacgacacccugcgcgucgaggccuucgaguacuaccacaccaccgaccccagcuuccuggggcgguacauguccgcccucaaccacacgaagaaguggaaguacccccaggugaacggccugaccagcaucaagugggccgacaacaacugcuaccuggcgaccgcccuccugacccugcagcagaucgagcucaaguucaaccccccggcccugcaggacgccuacuaccgcgcgcgggccggggaggccgccaacuucugcgcccugauccucgcguacugcaacaagacggugggcgagcugggcgacguccgcgagaccauguccuaccuguuccagcacgccaaccucgacagcugcaagcgggugcugaacgucgugugcaagaccugcgggcagcagcagaccacccugaagggcguggaggccgucauguacauggggacgcucuccuacgagcaguucaagaagggcgugcagauccccugcaccugcgggaagcaggccaccaaguaccuggugcagcaggagagccccuucgucaugauguccgcccccccggcgcaguacgagcugaagcacggcaccuucacgugcgccagcgaguacaccggcaacuaccagugcgggcacuacaagcacaucaccuccaaggagacccucuacugcaucgacggcgcccugcugacgaagagcagcgaguacaaggggcccaucaccgacguguucuacaaggagaacuccuacaccaccacgaucaagcccgugaccuacaagcucgacggcgucgugugcaccgagaucgaccccaagcuggacaacuacuacaagaaggacaacagcuacuucaccgagcagccgaucgaccuggugcccaaccagcccuaccccaacgccuccuucgacaacuucaaguucgucugcgacaacaucaaguucgccgacgaccucaaccagcugacgggguacaagaagccggcgagccgcgagcugaaggugaccuucuuccccgaccucaacggcgacguggucgccaucgacuacaagcacuacacccccuccuucaagaagggcgccaagcugcugcacaagcccaucguguggcacgugaacaacgccaccaacaaggcgacguacaagccgaacaccuggugcauccggugccucuggagcaccaagcccgucgagaccuccaacagcuucgacgugcugaaguccgaggacgcccaggggauggacaaccuggccugcgaggaccucaagcccgugagcgaggaggucguggagaaccccacgauccagaaggacgugcuggagugcaacgucaagaccaccgagguggugggcgacaucauccugaagccggccaacaacucccucaagaucaccgaggaggucgggcacacggaccugauggccgcguacguggacaacagcucccugaccaucaagaagcccaacgagcucagccgcgugcugggccugaagacccucgccacccacgggcuggccgccgucaacuccgugcccugggacacgaucgccaacuacgcgaagccguuccugaacaagguggucagcaccaccaccaacaucgugacgcgcugccucaaccgggugugcaccaacuacaugcccuacuucuucacccugcugcuccagcugugcaccuucacccgcuccacgaacagccggaucaaggccuccaugcccaccaccaucgccaagaacaccgucaagagcgugggcaaguucugccuggaggccagcuucaacuaccucaagucccccaacuucagcaagcugaucaacaucaucaucugguuccugcuccuguccgugugccugggcagccucaucuacuccacggccgcgcuggggguccugaugagcaaccucggcaugccguccuacugcaccggguaccgcgagggcuaccugaacagcaccaacgugaccaucgccacguacugcaccggcuccauccccugcagcgugugccuguccgggcucgacagccuggacaccuaccccucccuggagaccauccagaucacgaucagcuccuucaagugggaccucaccgccuucggccuggucgccgagugguuccuggccuacauccucuucacccgguucuucuacgugcuggggcuggcggccaucaugcagcucuucuucagcuacuucgccgugcacuucaucuccaacagcuggcugauguggcugaucaucaaccugguccagauggcccccaucuccgcgauggugcgcauguacaucuucuucgccagcuucuacuacguguggaagagcuacguccacgugguggacggcugcaacuccagcaccugcaugaugugcuacaagcggaaccgcgccacgcgggucgagugcaccaccaucgugaacgggguccgccgguccuucuacguguacgccaacggcggcaagggguucugcaagcuccacaacuggaacugcgugaacugcgacaccuucugcgccggcagcacguucaucuccgacgaggucgcgcgcgaccugagccugcaguucaagcggccgaucaaccccaccgaccaguccagcuacaucguggacuccgugaccgucaagaacgggagcauccaccucuacuucgacaaggccggccagaagaccuacgagcgccacucccugagccacuucgugaaccuggacaaccuccgggccaacaacacgaaggggucccugcccaucaacgugaucgucuucgacggcaagagcaagugcgaggaguccagcgccaaguccgccagcguguacuacucccagcugaugugccagcccauccuccugcuggaccaggcgcucgugagcgacgucggcgacagcgccgagguggccgugaagauguucgacgccuacgucaacaccuucuccagcaccuucaacgugccgauggagaagcugaagacccugguggccacggcggaggccgagcucgccaagaacgucucccuggacaacgugcugagcaccuucaucuccgccgcgcgccagggguucguggacagcgacgucgagaccaaggacgugguggagugccucaagcugucccaccagagcgacaucgaggucaccggcgacuccugcaacaacuacaugcugacguacaacaagguggagaacaugaccccccgggaccucggggccugcaucgacugcagcgcccgccacaucaacgcccagguggccaagucccacaacaucgcgcugaucuggaacgucaaggacuucaugagccuguccgagcagcuccggaagcagauccgcagcgccgccaagaagaacaaccugcccuucaagcugaccugcgccaccacgcgccagguggugaacgucgugaccaccaagaucgcccucaagggcgggugaggacuaguuauaagacugacuagcccgaugggccucccaacgggcccuccuccccuccuugcaccgagauuaauaaaaaaaaaaaaaaaaaaaaaaaaaaaaaaaaaaaaaaaaaaaaaaaaaaaaaaaaaaaaaaaaugcaucccccccccccccccccccccccccccccccaaaggcucuuuucagagccaccagaauu

SEQ ID NO: 21388 - RNA, 6058 nt, Artificial Sequence
  SARS-CoV-2__MT913129.1__non-structural protein 3 (NSP3) mRNA gc
aggagaaagcuuaccauggcccccaccaaggugaccuucggcgacgacacggucaucgaggugcagggguacaagagcgugaacaucaccuucgagcuggacgagcgcaucgacaagguccucaacgagaagugcuccgccuacaccguggagcugggcaccgaggugaacgaguucgcgugcgucguggccgacgccgugaucaagacgcugcagccggucagcgagcuccugaccccccuggggaucgaccucgacgagugguccauggccaccuacuaccuguucgacgagagcggcgaguucaagcuggccucccacauguacugcagcuucuacccccccgacgaggacgaggaggagggggacugcgaggaggaggaguucgagccguccacccaguacgaguacggcacggaggacgacuaccagggcaagccccucgaguucggggcgaccagcgccgcccugcagcccgaggaggagcaggaggaggacuggcuggacgacgacucccagcagaccgugggccagcaggacgggagcgaggacaaccagaccacgaccauccagaccaucguggagguccagccccagcucgagauggagcugaccccgguggugcagacgaucgaggucaacuccuucagcggcuaccugaagcucaccgacaacguguacaucaagaacgccgacaucguggaggaggcgaagaaggucaagcccaccgugguggucaacgccgccaacguguaccugaagcacgggggcggcguggccggggcccugaacaaggcgaccaacaacgccaugcaggucgaguccgacgacuacaucgccacgaacggcccccucaagguggggggcagcugcguccuguccggccacaaccuggccaagcacugccuccacgugguggggcccaacgucaacaagggcgagaacauccagcugcugaagagcgccuacgagaacuucaaccagcacgaggugcuccuggcgccgcugcucuccgccgggaucuucggcgccgaccccauccacagccugcgggugugcgucgacaccgugcgcaccaacguguaccuggccgucuucgacaagaaccucuacgacaagcugguguccagcuuccuggagaugaagagcgagaagcagguggagcagaagaucgccgagauccccaaggaggaggucaagcccuucaucaccgaguccaagccgagcguggagcagcggaagcaggacgacaagaagaucaaggcgugcguggaggaggucacgaccacccucgaggagaccaaguuccugacggagaaccugcuccuguacaucgacaucaacgggaaccugcaccccgacuccgccacccucgugagcgacaucgacaucaccuuccugaagaaggacgcccccuacaucgugggcgacgucgugcaggagggcgugcugaccgccgucgugauccccacgaagaaggccgggggcaccaccgagaugcucgcgaaggcccugcgcaaggugccgaccgacaacuacaucacgaccuaccccgggcagggccugaacggguacaccgucgaggaggccaagaccgugcucaagaagugcaaguccgccuucuacauccugcccagcaucaucuccaacgagaagcaggagauccugggcaccgugagcuggaaccuccgggagaugcuggcgcacgccgaggagacgcgcaagcugaugcccgucugcguggagaccaaggccaucguguccaccauccagcggaaguacaagggcaucaagauccaggagggggucguggacuacggcgcccgcuucuacuucuacaccagcaagacgaccguggccucccugaucaacacccucaacgaccugaacgagacccuggucacgaugccgcucggguacgugacccacggccugaaccuggaggaggcggcccgguacaugcgcagccucaaggugcccgccaccgucuccgugagcucccccgacgccgugaccgccuacaacggguaccugacgagcuccagcaagacccccgaggagcacuucaucgagaccaucucccuggcgggcagcuacaaggacuggagcuacuccggccagagcacccagcucgggaucgaguuccugaagcggggcgacaaguccgucuacuacacgagcaacccgaccaccuuccaccuggacggggaggugaucaccuucgacaaccucaagacgcugcugucccuccgcgaggugcggaccaucaaggucuucaccaccguggacaacaucaaccugcacacgcagguggucgacaugagcaugaccuacggccagcaguucggccccaccuaccuggacggggccgacgugaccaagaucaagccccacaacucccacgagggcaagacguucuacgugcucccgaacgacgacacccugcgcgucgaggccuucgaguacuaccacaccaccgaccccagcuuccuggggcgguacauguccgcccucaaccacacgaagaaguggaaguacccccaggugaacggccugaccagcaucaagugggccgacaacaacugcuaccuggcgaccgcccuccugacccugcagcagaucgagcucaaguucaaccccccggcccugcaggacgccuacuaccgcgcgcgggccggggaggccgccaacuucugcgcccugauccucgcguacugcaacaagacggugggcgagcugggcgacguccgcgagaccauguccuaccuguuccagcacgccaaccucgacagcugcaagcgggugcugaacgucgugugcaagaccugcgggcagcagcagaccacccugaagggcguggaggccgucauguacauggggacgcucuccuacgagcaguucaagaagggcgugcagauccccugcaccugcgggaagcaggccaccaaguaccuggugcagcaggagagccccuucgucaugauguccgcccccccggcgcaguacgagcugaagcacggcaccuucacgugcgccagcgaguacaccggcaacuaccagugcgggcacuacaagcacaucaccuccaaggagacccucuacugcaucgacggcgcccugcugacgaagagcagcgaguacaaggggcccaucaccgacguguucuacaaggagaacuccuacaccaccacgaucaagcccgugaccuacaagcucgacggcgucgugugcaccgagaucgaccccaagcuggacaacuacuacaagaaggacaacagcuacuucaccgagcagccgaucgaccuggugcccaaccagcccuaccccaacgccuccuucgacaacuucaaguucgucugcgacaacaucaaguucgccgacgaccucaaccagcugacgggguacaagaagccggcgagccgcgagcugaaggugaccuucuuccccgaccucaacggcgacguggucgccaucgacuacaagcacuacacccccuccuucaagaagggcgccaagcugcugcacaagcccaucguguggcacgugaacaacgccaccaacaaggcgacguacaagccgaacaccuggugcauccggugccucuggagcaccaagcccgucgagaccuccaacagcuucgacgugcugaaguccgaggacgcccaggggauggacaaccuggccugcgaggaccucaagcccgugagcgaggaggucguggagaaccccacgauccagaaggacgugcuggagugcaacgucaagaccaccgagguggugggcgacaucauccugaagccggccaacaacucccucaagaucaccgaggaggucgggcacacggaccugauggccgcguacguggacaacagcucccugaccaucaagaagcccaacgagcucagccgcgugcugggccugaagacccucgccacccacgggcuggccgccgucaacuccgugcccugggacacgaucgccaacuacgcgaagccguuccugaacaagguggucagcaccaccaccaacaucgugacgcgcugccucaaccgggugugcaccaacuacaugcccuacuucuucacccugcugcuccagcugugcaccuucacccgcuccacgaacagccggaucaaggccuccaugcccaccaccaucgccaagaacaccgucaagagcgugggcaaguucugccuggaggccagcuucaacuaccucaagucccccaacuucagcaagcugaucaacaucaucaucugguuccugcuccuguccgugugccugggcagccucaucuacuccacggccgcgcuggggguccugaugagcaaccucggcaugccguccuacugcaccggguaccgcgagggcuaccugaacagcaccaacgugaccaucgccacguacugcaccggcuccauccccugcagcgugugccuguccgggcucgacagccuggacaccuaccccucccuggagaccauccagaucacgaucagcuccuucaagugggaccucaccgccuucggccuggucgccgagugguuccuggccuacauccucuucacccgguucuucuacgugcuggggcuggcggccaucaugcagcucuucuucagcuacuucgccgugcacuucaucuccaacagcuggcugauguggcugaucaucaaccugguccagauggcccccaucuccgcgauggugcgcauguacaucuucuucgccagcuucuacuacguguggaagagcuacguccacgugguggacggcugcaacuccagcaccugcaugaugugcuacaagcggaaccgcgccacgcgggucgagugcaccaccaucgugaacgggguccgccgguccuucuacguguacgccaacggcggcaagggguucugcaagcuccacaacuggaacugcgugaacugcgacaccuucugcgccggcagcacguucaucuccgacgaggucgcgcgcgaccugagccugcaguucaagcggccgaucaaccccaccgaccaguccagcuacaucguggacuccgugaccgucaagaacgggagcauccaccucuacuucgacaaggccggccagaagaccuacgagcgccacucccugagccacuucgugaaccuggacaaccuccgggccaacaacacgaaggggucccugcccaucaacgugaucgucuucgacggcaagagcaagugcgaggaguccagcgccaaguccgccagcguguacuacucccagcugaugugccagcccauccuccugcuggaccaggcgcucgugagcgacgucggcgacagcgccgagguggccgugaagauguucgacgccuacgucaacaccuucuccagcaccuucaacgugccgauggagaagcugaagacccugguggccacggcggaggccgagcucgccaagaacgucucccuggacaacgugcugagcaccuucaucuccgccgcgcgccagggguucguggacagcgacgucgagaccaaggacgugguggagugccucaagcugucccaccagagcgacaucgaggucaccggcgacuccugcaacaacuacaugcugacguacaacaagguggagaacaugaccccccgggaccucggggccugcaucgacugcagcgcccgccacaucaacgcccagguggccaagucccacaacaucgcgcugaucuggaacgucaaggacuucaugagccuguccgagcagcuccggaagcagauccgcagcgccgccaagaagaacaaccugcccuucaagcugaccugcgccaccacgcgccagguggugaacgucgugaccaccaagaucgcccucaagggcgggugaggacuaguuauaagacugacuagcccgaugggccucccaacgggcccuccuccccuccuugcaccgagauuaauaaaaaaaaaaaaaaaaaaaaaaaaaaaaaaaaaaaaaaaaaaaaaaaaaaaaaaaaaaaaaaaaugcaucccccccccccccccccccccccccccccccaaaggcucuuuucagagccaccagaauu

SEQ ID NO: 21389 - RNA, 6058 nt, Artificial Sequence
  SARS-CoV-2__MT913130.1__non-structural protein 3 (NSP3) mRNA gc
aggagaaagcuuaccauggcccccaccaaggugaccuucggcgacgacacggucaucgaggugcagggguacaagagcgugaacaucaccuucgagcuggacgagcgcaucgacaagguccucaacgagaagugcuccgccuacaccguggagcugggcaccgaggugaacgaguucgcgugcgucguggccgacgccgugaucaagacgcugcagccggucagcgagcuccugaccccccuggggaucgaccucgacgagugguccauggccaccuacuaccuguucgacgagagcggcgaguucaagcuggccucccacauguacugcagcuucuacccccccgacgaggacgaggaggagggggacugcgaggaggaggaguucgagccguccacccaguacgaguacggcacggaggacgacuaccagggcaagccccucgaguucggggcgaccagcgccgcccugcagcccgaggaggagcaggaggaggacuggcuggacgacgacucccagcagaccgugggccagcaggacgggagcgaggacaaccagaccacgaccauccagaccaucguggagguccagccccagcucgagauggagcugaccccgguggugcagacgaucgaggucaacuccuucagcggcuaccugaagcucaccgacaacguguacaucaagaacgccgacaucguggaggaggcgaagaaggucaagcccaccgugguggucaacgccgccaacguguaccugaagcacgggggcggcguggccggggcccugaacaaggcgaccaacaacgccaugcaggucgaguccgacgacuacaucgccacgaacggcccccucaagguggggggcagcugcguccuguccggccacaaccuggccaagcacugccuccacgugguggggcccaacgucaacaagggcgaggacauccagcugcugaagagcgccuacgagaacuucaaccagcacgaggugcuccuggcgccgcugcucuccgccgggaucuucggcgccgaccccauccacagccugcgggugugcgucgacaccgugcgcaccaacguguaccuggccgucuucgacaagaaccucuacgacaagcugguguccagcuuccuggagaugaagagcgagaagcagguggagcagaagaucgccgagauccccaaggaggaggucaagcccuucaucaccgaguccaagccgagcguggagcagcggaagcaggacgacaagaagaucaaggcgugcguggaggaggucacgaccacccucgaggagaccaaguuccugacggagaaccugcuccuguacaucgacaucaacgggaaccugcaccccgacuccgccacccucgugagcgacaucgacaucaccuuccugaacaaggacgcccccuacaucgugggcgacgucgugcaggagggcgugcugaccgccgucgugauccccacgaagaaggccgggggcaccaccgagaugcucgcgaaggcccugcgcaaggugccgaccgacaacuacaucacgaccuaccccgggcagggccugaacggguacaccgucgaggaggccaagaccgugcucaagaagugcaaguccgccuucuacauccugcccagcaucaucuccaacgagaagcaggagauccugggcaccgugagcuggaaccuccgggagaugcuggcgcacgccgaggagacgcgcaagcugaugcccgucugcguggagaccaaggccaucguguccaccauccagcggaaguacaagggcaucaagauccaggagggggucguggacuacggcgcccgcuucuacuucuacaccagcaagacgaccguggccucccugaucaacacccucaacgaccugaacgagacccuggucacgaugccgcucggguacgugacccacggccugaaccuggaggaggcggcccgguacaugcgcagccucaaggugcccgccaccgucuccgugagcucccccgacgccgugaccgccuacaacggguaccugacgagcuccagcaagacccccgaggagcacuucaucgagaccaucucccuggcgggcagcuacaaggacuggagcuacuccggccagagcacccagcucgggaucgaguuccugaagcggggcgacaaguccgucuacuacacgagcaacccgaccaccuuccaccuggacggggaggugaucaccuucgacaaccucaagacgcugcugucccuccgcgaggugcggaccaucaaggucuucaccaccguggacaacaucaaccugcacacgcagguggucgacaugagcaugaccuacggccagcaguucggccccaccuaccuggacggggccgacgugaccaagaucaagccccacaacucccacgagggcaagacguucuacgugcucccgaacgacgacacccugcgcgucgaggccuucgaguacuaccacaccaccgaccccagcuuccuggggcgguacauguccgcccucaaccacacgaagaaguggaaguacccccaggugaacggccugaccagcaucaagugggccgacaacaacugcuaccuggcgaccgcccuccugacccugcagcagaucgagcucaaguucaaccccccggcccugcaggacgccuacuaccgcgcgcgggccggggaggccgccaacuucugcgcccugauccucgcguacugcaacaagacggugggcgagcugggcgacguccgcgagaccauguccuaccuguuccagcacgccaaccucgacagcugcaagcgggugcugaacgucgugugcaagaccugcgggcagcagcagaccacccugaagggcguggaggccgucauguacauggggacgcucuccuacgagcaguucaagaagggcgugcagauccccugcaccugcgggaagcaggccaccaaguaccuggugcagcaggagagccccuucgucaugauguccgcccccccggcgcaguacgagcugaagcacggcaccuucacgugcgccagcgaguacaccggcaacuaccagugcgggcacuacaagcacaucaccuccaaggagacccucuacugcaucgacggcgcccugcugacgaagagcagcgaguacaaggggcccaucaccgacguguucuacaaggagaacuccuacaccaccacgaucaagcccgugaccuacaagcucgacggcgucgugugcaccgagaucgaccccaagcuggacaacuacuacaagaaggacaacagcuacuucaccgagcagccgaucgaccuggugcccaaccagcccuaccccaacgccuccuucgacaacuucaaguucgucugcgacaacaucaaguucgccgacgaccucaaccagcugacgggguacaagaagccggcgagccgcgagcugaaggugaccuucuuccccgaccucaacggcgacguggucgccaucgacuacaagcacuacacccccuccuucaagaagggcgccaagcugcugcacaagcccaucguguggcacgugaacaacgccaccaacaaggcgacguacaagccgaacaccuggugcauccggugccucuggagcaccaagcccgucgagaccuccaacagcuucgacgugcugaaguccgaggacgcccaggggauggacaaccuggccugcgaggaccucaagcccgugagcgaggaggucguggagaaccccacgauccagaaggacgugcuggagugcaacgucaagaccaccgagguggugggcgacaucauccugaagccggccaacaacucccucaagaucaccgaggaggucgggcacacggaccugauggccgcguacguggacaacagcucccugaccaucaagaagcccaacgagcucagccgcgugcugggccugaagacccucgccacccacgggcuggccgccgucaacuccgugcccugggacacgaucgccaacuacgcgaagccguuccugaacaagguggucagcaccaccaccaacaucgugacgcgcugccucaaccgggugugcaccaacuacaugcccuacuucuucacccugcugcuccagcugugcaccuucacccgcuccacgaacagccggaucaaggccuccaugcccaccaccaucgccaagaacaccgucaagagcgugggcaaguucugccuggaggccagcuucaacuaccucaagucccccaacuucagcaagcugaucaacaucaucaucugguuccugcuccuguccgugugccugggcagccucaucuacuccacggccgcgcuggggguccugaugagcaaccucggcaugccguccuacugcaccggguaccgcgagggcuaccugaacagcaccaacgugaccaucgccacguacugcaccggcuccauccccugcagcgugugccuguccgggcucgacagccuggacaccuaccccucccuggagaccauccagaucacgaucagcuccuucaagugggaccucaccgccuucggccuggucgccgagugguuccuggccuacauccucuucacccgguucuucuacgugcuggggcuggcggccaucaugcagcucuucuucagcuacuucgccgugcacuucaucuccaacagcuggcugauguggcugaucaucaaccugguccagauggcccccaucuccgcgauggugcgcauguacaucuucuucgccagcuucuacuacguguggaagagcuacguccacgugguggacggcugcaacuccagcaccugcaugaugugcuacaagcggaaccgcgccacgcgggucgagugcaccaccaucgugaacgggguccgccgguccuucuacguguacgccaacggcggcaagggguucugcaagcuccacaacuggaacugcgugaacugcgacaccuucugcgccggcagcacguucaucuccgacgaggucgcgcgcgaccugagccugcaguucaagcggccgaucaaccccaccgaccaguccagcuacaucguggacuccgugaccgucaagaacgggagcauccaccucuacuucgacaaggccggccagaagaccuacgagcgccacucccugagccacuucgugaaccuggacaaccuccgggccaacaacacgaaggggucccugcccaucaacgugaucgucuucgacggcaagagcaagugcgaggaguccagcgccaaguccgccagcguguacuacucccagcugaugugccagcccauccuccugcuggaccaggcgcucgugagcgacgucggcgacagcgccgagguggccgugaagauguucgacgccuacgucaacaccuucuccagcaccuucaacgugccgauggagaagcugaagacccugguggccacggcggaggccgagcucgccaagaacgucucccuggacaacgugcugagcaccuucaucuccgccgcgcgccagggguucguggacagcgacgucgagaccaaggacgugguggagugccucaagcugucccaccagagcgacaucgaggucaccggcgacuccugcaacaacuacaugcugacguacaacaagguggagaacaugaccccccgggaccucggggccugcaucgacugcagcgcccgccacaucaacgcccagguggccaagucccacaacaucgcgcugaucuggaacgucaaggacuucaugagccuguccgagcagcuccggaagcagauccgcagcgccgccaagaagaacaaccugcccuucaagcugaccugcgccaccacgcgccagguggugaacgucgugaccaccaagaucgcccucaagggcgggugaggacuaguuauaagacugacuagcccgaugggccucccaacgggcccuccuccccuccuugcaccgagauuaauaaaaaaaaaaaaaaaaaaaaaaaaaaaaaaaaaaaaaaaaaaaaaaaaaaaaaaaaaaaaaaaaugcaucccccccccccccccccccccccccccccccaaaggcucuuuucagagccaccagaauu

SEQ ID NO: 21390 - RNA, 6058 nt, Artificial Sequence
  SARS-CoV-2__MT913139.1__non-structural protein 3 (NSP3) mRNA gc
aggagaaagcuuaccauggcccccaccaaggugaccuucggcgacgacacggucaucgaggugcagggguacaagagcgugaacaucaccuucgagcuggacgagcgcaucgacaagguccucaacgagaagugcuccgccuacaccguggagcugggcaccgaggugaacgaguucgcgugcgucguggccgacgccgugaucaagacgcugcagccggucagcgagcuccugaccccccuggggaucgaccucgacgagugguccauggccaccuacuaccuguucgacgagagcggcgaguucaagcuggccucccacauguacugcagcuucuacccccccgacgaggacgaggaggagggggacugcgaggaggaggaguucgagccguccacccaguacgaguacggcacggaggacgacuaccagggcaagccccucgaguucggggcgaccagcgccgcccugcagcccgaggaggagcaggaggaggacuggcuggacgacgacucccagcagaucgugggccagcaggacgggagcgaggacaaccagaccaccacgauccagaccaucguggagguccagccccagcucgagauggagcugaccccgguggugcagaccaucgaggucaacuccuucagcggcuaccugaagcucacggacaacguguacaucaagaacgccgacaucguggaggaggcgaagaaggucaagcccaccgugguggucaacgccgccaacguguaccugaagcacgggggcggcguggccggggcccugaacaaggcgaccaacaacgccaugcaggucgaguccgacgacuacaucgccaccaacggcccccucaagguggggggcagcugcguccuguccggccacaaccuggccaagcacugccuccacgugguggggcccaacgucaacaagggcgaggacauccagcugcugaagagcgccuacgagaacuucaaccagcacgaggugcuccuggcgccgcugcucuccgccgggaucuucggcgccgaccccauccacagccugcgggugugcgucgacacggugcgcaccaacguguaccuggccgucuucgacaagaaccucuacgacaagcugguguccagcuuccuggagaugaagagcgagaagcagguggagcagaagaucgccgagauccccaaggaggaggucaagcccuucaucaccgaguccaagccgagcguggagcagcggaagcaggacgacaagaagaucaaggcgugcguggaggaggucaccacgacccucgaggagaccaaguuccugaccgagaaccugcuccuguacaucgacaucaacgggaaccugcaccccgacuccgccacgcucgugagcgacaucgacaucaccuuccugaagaaggacgcccccuacaucgugggcgacgucgugcaggagggcgugcugaccgccgucgugauccccaccaagaaggccgggggcacgaccgagaugcucgcgaaggcccugcgcaaggugccgaccgacaacuacaucaccacguaccccgggcagggccugaacggguacaccgucgaggaggccaagaccgugcucaagaagugcaaguccgccuucuacauccugcccagcaucaucuccaacgagaagcaggagauccugggcaccgugagcuggaaccuccgggagaugcuggcgcacgccgaggagacccgcaagcugaugcccgucugcguggagacgaaggccaucguguccaccauccagcggaaguacaagggcaucaagauccaggagggggucguggacuacggcgcccgcuucuacuucuacaccagcaagaccacgguggccucccugaucaacacccucaacgaccugaacgagacccuggucaccaugccgcucggguacgugacgcacggccugaaccuggaggaggcggcccgguacaugcgcagccucaaggugcccgccaccgucuccgugagcucccccgacgccgugaccgccuacaacggguaccugaccagcuccagcaagacgcccgaggagcacuucaucgagaccaucucccuggcgggcagcuacaaggacuggagcuacuccggccagagcacccagcucgggaucgaguuccugaagcggggcgacaaguccgucuacuacaccagcaacccgacgaccuuccaccuggacggggaggugaucaccuucgacaaccucaagacccugcugucccuccgcgaggugcggacgaucaaggucuucaccaccguggacaacaucaaccugcacacccagguggucgacaugagcaugacguacggccagcaguucggccccaccuaccuggacggggccgacgugaccaagaucaagccccacaacucccacgagggcaagaccuucuacgugcucccgaacgacgacacgcugcgcgucgaggccuucgaguacuaccacaccaccgaccccagcuuccuggggcgguacauguccgcccucaaccacaccaagaaguggaaguacccccaggugaacggccugacgagcaucaagugggccgacaacaacugcuaccuggcgaccgcccuccugacccugcagcagaucgagcucaaguucaaccccccggcccugcaggacgccuacuaccgcgcgcgggccggggaggccgccaacuucugcgcccugauccucgcguacugcaacaagaccgugggcgagcugggcgacguccgcgagacgauguccuaccuguuccagcacgccaaccucgacagcugcaagcgggugcugaacgucgugugcaagaccugcgggcagcagcagaccacccugaagggcguggaggccgucauguacauggggacccucuccuacgagcaguucaagaagggcgugcagauccccugcacgugcgggaagcaggccaccaaguaccuggugcagcaggagagccccuucgucaugauguccgcccccccggcgcaguacgagcugaagcacggcaccuucaccugcgccagcgaguacacgggcaacuaccagugcgggcacuacaagcacaucaccuccaaggagacccucuacugcaucgacggcgcccugcugaccaagagcagcgaguacaaggggcccaucacggacguguucuacaaggagaacuccuacaccaccaccaucaagcccgugacguacaagcucgacggcgucgugugcaccgagaucgaccccaagcuggacaacuacuacaagaaggacaacagcuacuucaccgagcagccgaucgaccuggugcccaaccagcccuaccccaacgccuccuucgacaacuucaaguucgucugcgacaacaucaaguucgccgacgaccucaaccagcugaccggguacaagaagccggcgagccgcgagcugaaggugacguucuuccccgaccucaacggcgacguggucgccaucgacuacaagcacuacacccccuccuucaagaagggcgccaagcugcugcacaagcccaucguguggcacgugaacaacgccaccaacaaggcgaccuacaagccgaacacguggugcauccggugccucuggagcaccaagcccgucgagaccuccaacagcuucgacgugcugaaguccgaggacgcccaggggauggacaaccuggccugcgaggaccucaagcccgugagcgaggaggucguggagaaccccaccauccagaaggacgugcuggagugcaacgucaagacgaccgagguggugggcgacaucauccugaagccggccaacaacucccucaagaucaccgaggaggucgggcacaccgaccugauggccgcguacguggacaacagcucccugacgaucaagaagcccaacgagcucagccgcgugcugggccugaagacccucgccacccacgggcuggccgccgucaacuccgugcccugggacaccaucgccaacuacgcgaagccguuccugaacaagguggucagcacgaccaccaacaucgugacccgcugccucaaccgggugugcacgaacuacaugcccuacuucuucacccugcugcuccagcugugcaccuucacccgcuccaccaacagccggaucaaggccuccaugcccacgaccaucgccaagaacaccgucaagagcgugggcaaguucugccuggaggccagcuucaacuaccucaagucccccaacuucagcaagcugaucaacaucaucaucugguuccugcuccuguccgugugccugggcagccucaucuacuccaccgccgcgcuggggguccugaugagcaaccucggcaugccguccuacugcacgggguaccgcgagggcuaccugaacagcaccaacgugaccaucgccaccuacugcacgggcuccauccccugcagcgugugccuguccgggcucgacagccuggacaccuaccccucccuggagaccauccagaucaccaucagcuccuucaagugggaccucacggccuucggccuggucgccgagugguuccuggccuacauccucuucacccgguucuucuacgugcuggggcuggcggccaucaugcagcucuucuucagcuacuucgccgugcacuucaucuccaacagcuggcugauguggcugaucaucaaccugguccagauggcccccaucuccgcgauggugcgcauguacaucuucuucgccagcuucuacuacguguggaagagcuacguccacgugguggacggcugcaacuccagcaccugcaugaugugcuacaagcggaaccgcgccacccgggucgagugcacgaccaucgugaacgggguccgccgguccuucuacguguacgccaacggcggcaagggguucugcaagcuccacaacuggaacugcgugaacugcgacaccuucugcgccggcagcaccuucaucuccgacgaggucgcgcgcgaccugagccugcaguucaagcggccgaucaaccccacggaccaguccagcuacaucguggacuccgugaccgucaagaacgggagcauccaccucuacuucgacaaggccggccagaagaccuacgagcgccacucccugagccacuucgugaaccuggacaaccuccgggccaacaacaccaaggggucccugcccaucaacgugaucgucuucgacggcaagagcaagugcgaggaguccagcgccaaguccgccagcguguacuacucccagcugaugugccagcccauccuccugcuggaccaggcgcucgugagcgacgucggcgacagcgccgagguggccgugaagauguucgacgccuacgucaacacguucuccagcaccuucaacgugccgauggagaagcugaagacccugguggccaccgcggaggccgagcucgccaagaacgucucccuggacaacgugcugagcacguucaucuccgccgcgcgccagggguucguggacagcgacgucgagaccaaggacgugguggagugccucaagcugucccaccagagcgacaucgaggucaccggcgacuccugcaacaacuacaugcugaccuacaacaagguggagaacaugacgccccgggaccucggggccugcaucgacugcagcgcccgccacaucaacgcccagguggccaagucccacaacaucgcgcugaucuggaacgucaaggacuucaugagccuguccgagcagcuccggaagcagauccgcagcgccgccaagaagaacaaccugcccuucaagcugaccugcgccaccacccgccagguggugaacgucgugacgaccaagaucgcccucaagggcgggugaggacuaguuauaagacugacuagcccgaugggccucccaacgggcccuccuccccuccuugcaccgagauuaauaaaaaaaaaaaaaaaaaaaaaaaaaaaaaaaaaaaaaaaaaaaaaaaaaaaaaaaaaaaaaaaaugcaucccccccccccccccccccccccccccccccaaaggcucuuuucagagccaccagaauu

SEQ ID NO: 21391 - RNA, 6058 nt, Artificial Sequence
  SARS-CoV-2__MT913142.1__non-structural protein 3 (NSP3) mRNA gc
aggagaaagcuuaccauggcccccaccaaggugaccuucggcgacgacacggucaucgaggugcagggguacaagagcgugaacaucaccuucgagcuggacgagcgcaucgacaagguccucaacgagaagugcuccgccuacaccguggagcugggcaccgaggugaacgaguucgcgugcgucguggccgacgccgugaucaagacgcugcagccggucagcgagcuccugaccccccuggggaucgaccucgacgagugguccauggccaccuacuaccuguucgacgagagcggcgaguucaagcuggccucccacauguacugcagcuucuacccccccgacgaggacgaggaggagggggacugcgaggaggaggaguucgagccguccacccaguacgaguacggcacggaggacgacuaccagggcaagccccucgaguucggggcgaacagcgccgcccugcagcccgaggaggagcaggaggaggacuggcuggacgacgacucccagcagaccgugggccagcaggacgggagcgaggacaaccagaccaccacgauccagaccaucguggagguccagccccagcucgagauggagcugaccccgguggugcagaccaucgaggucaacuccuucagcggcuaccugaagcucacggacaacguguacaucaagaacgccgacaucguggaggaggcgaagaaggucaagcccaccgugguggucaacgccgccaacguguaccugaagcacgggggcggcguggccggggcccugaacaaggcgaccaacaacgccaugcaggucgaguccgacgacuacaucgccaccaacggcccccucaagguggggggcagcugcguccuguccggccacaaccuggccaagcacugccuccacgugguggggcccaacgucaacaagggcgaggacauccagcugcugaagagcgccuacgagaacuucaaccagcacgaggugcuccuggcgccgcugcucuccgccgggaucuucggcgccgaccccauccacagccugcgggugugcgucgacacggugcgcaccaacguguaccuggccgucuucgacaagaaccucuacgacaagcugguguccagcuuccuggagaugaagagcgagaagcagguggagcagaagaucgccgagauccccaaggaggaggucaagcccuucaucaccgaguccaagccgagcguggagcagcggaagcaggacgacaagaagaucaaggcgugcguggaggaggucaccacgacccucgaggagaccaaguuccugaccgagaaccugcuccuguacaucgacaucaacgggaaccugcaccccgacuccgccacgcucgugagcgacaucgacaucaccuuccugaagaaggacgcccccuacaucgugggcgacgucgugcaggagggcgugcugaccgccgucgugauccccaccaagaaggccgggggcacgaccgagaugcucgcgaaggcccugcgcaaggugccgaccgacaacuacaucaccacguaccccgggcagggccugaacggguacaccgucgaggaggccaagaccgugcucaagaagugcaaguccgccuucuacauccugcccagcaucaucuccaacgagaagcaggagauccugggcaccgugagcuggaaccuccgggagaugcuggcgcacgccgaggagacccgcaagcugaugcccgucugcguggagacgaaggccaucguguccaccauccagcggaaguacaagggcaucaagauccaggagggggucguggacuacggcgcccgcuucuacuucuacaccagcaagaccacgguggccucccugaucaacacccucaacgaccugaacgagacccuggucaccaugccgcucggguacgugacgcacggccugaaccuggaggaggcggcccgguacaugcgcagccucaaggugcccgccaccgucuccgugagcucccccgacgccgugaccgccuacaacggguaccugaccagcuccagcaagacgcccgaggagcacuucaucgagaccaucucccuggcgggcagcuacaaggacuggagcuacuccggccagagcacccagcucgggaucgaguuccugaagcggggcgacaaguccgucuacuacaccagcaacccgacgaccuuccaccuggacggggaggugaucaccuucgacaaccucaagacccugcugucccuccgcgaggugcggacgaucaaggucuucaccaccguggacaacaucaaccugcacacccagguggucgacaugagcaugacguacggccagcaguucggccccaccuaccuggacggggccgacgugaccaagaucaagccccacaacucccacgagggcaagaccuucuacgugcucccgaacgacgacacgcugcgcgucgaggccuucgaguacuaccacaccaccgacagcuccuuccuggggcgguacaugagcgcccucaaccacaccaagaaguggaaguacccccaggugaacggccugacguccaucaagugggccgacaacaacugcuaccuggcgaccgcccuccugacccugcagcagaucgagcucaaguucaacccccccgcccugcaggacgccuacuaccgcgcgcgggccggggaggccgccaacuucugcgcccugauccucgcguacugcaacaagaccgugggcgagcugggcgacguccgcgagacgaugagcuaccuguuccagcacgccaaccucgacuccugcaagcgggugcugaacgucgugugcaagaccugcgggcagcagcagaccacccugaagggcguggaggccgucauguacauggggacccucagcuacgagcaguucaagaagggcgugcagaucccgugcacgugcgggaagcaggccaccaaguaccuggugcagcaggagucccccuucgucaugaugagcgccccccccgcgcaguacgagcugaagcacggcaccuucaccugcgccuccgaguacacgggcaacuaccagugcgggcacuacaagcacaucaccagcaaggagacccucuacugcaucgacggcgcccugcugaccaagagcuccgaguacaaggggccgaucacggacguguucuacaaggagaacagcuacaccaccaccaucaagcccgugacguacaagcucgacggcgucgugugcaccgagaucgaccccaagcuggacaacuacuacaagaaggacaacuccuacuucaccgagcagcccaucgaccuggugccgaaccagcccuaccccaacgccagcuucgacaacuucaaguucgucugcgacaacaucaaguucgccgacgaccucaaccagcugaccggguacaagaagcccgcgucccgcgagcugaaggugacguucuucccggaccucaacggcgacguggucgccaucgacuacaagcacuacacccccagcuucaagaagggcgccaagcugcugcacaagcccaucguguggcacgugaacaacgccaccaacaaggcgaccuacaagcccaacacguggugcauccggugccucugguccaccaagccggucgagaccagcaacuccuucgacgugcugaagagcgaggacgcccaggggauggacaaccuggccugcgaggaccucaagcccguguccgaggaggucguggagaaccccaccauccagaaggacgugcuggagugcaacgucaagacgaccgagguggugggcgacaucauccugaagcccgccaacaacagccucaagaucaccgaggaggucgggcacaccgaccugauggccgcguacguggacaacuccagccugacgaucaagaagccgaacgagcucucccgcgugcugggccugaagacccucgccacccacgggcuggccgccgucaacagcgugcccugggacaccaucgccaacuacgcgaagcccuuccugaacaagguggucuccacgaccaccaacaucgugacccgcugccucaaccgggugugcacgaacuacaugccguacuucuucacccugcugcuccagcugugcaccuucacccgcagcaccaacucccggaucaaggccagcaugcccacgaccaucgccaagaacaccgucaagagcgugggcaaguucugccuggaggccuccuucaacuaccucaagagccccaacuucuccaagcugaucaacaucaucaucugguuccugcuccugagcgugugccugggcucccucaucuacagcaccgccgcgcuggggguccugauguccaaccucggcaugcccagcuacugcacgggguaccgcgagggcuaccugaacuccaccaacgugaccaucgccaccuacugcacgggcagcaucccgugcuccgugugccugagcgggcucgacucccuggacaccuaccccagccuggagaccauccagaucaccaucuccagcuucaagugggaccucacggccuucggccuggucgccgagugguuccuggccuacauccucuucacccgguucuucuacgugcuggggcuggcggccaucaugcagcucuucuucuccuacuucgccgugcacuucaucagcaacuccuggcugauguggcugaucaucaaccugguccagauggcccccaucagcgcgauggugcgcauguacaucuucuucgccagcuucuacuacguguggaaguccuacguccacgugguggacggcugcaacagcuccaccugcaugaugugcuacaagcggaaccgcgccacccgggucgagugcacgaccaucgugaacgggguccgccggagcuucuacguguacgccaacggcggcaagggguucugcaagcuccacaacuggaacugcgugaacugcgacaccuucugcgccggcuccaccuucaucagcgacgaggucgcgcgcgaccugucccugcaguucaagcggcccaucaacccgacggaccagagcuccuacaucguggacagcgugaccgucaagaacggguccauccaccucuacuucgacaaggccggccagaagaccuacgagcgccacagccugucccacuucgugaaccuggacaaccuccgggccaacaacaccaaggggagccugcccaucaacgugaucgucuucgacggcaaguccaagugcgaggagagcuccgccaagagcgccuccguguacuacagccagcugaugugccagcccauccuccugcuggaccaggcgcucgugagcgacgucggcgacuccgccgagguggccgugaagauguucgacgccuacgucaacacguucagcuccaccuucaacgugcccauggagaagcugaagacccugguggccaccgcggaggccgagcucgccaagaacgucagccuggacaacgugcuguccacguucaucagcgccgcgcgccagggguucguggacuccgacgucgagaccaaggacgugguggagugccucaagcugagccaccaguccgacaucgaggucaccggcgacagcugcaacaacuacaugcugaccuacaacaagguggagaacaugacgccgcgggaccucggggccugcaucgacugcuccgcccgccacaucaacgcccagguggccaagagccacaacaucgcgcugaucuggaacgucaaggacuucaugucccugagcgagcagcuccggaagcagauccgcuccgccgccaagaagaacaaccugcccuucaagcugaccugcgccaccacccgccagguggugaacgucgugacgaccaagaucgcccucaagggcgggugaggacuaguuauaagacugacuagcccgaugggccucccaacgggcccuccuccccuccuugcaccgagauuaauaaaaaaaaaaaaaaaaaaaaaaaaaaaaaaaaaaaaaaaaaaaaaaaaaaaaaaaaaaaaaaaaugcaucccccccccccccccccccccccccccccccaaaggcucuuuucagagccaccagaauu

SEQ ID NO: 21392 - RNA, 6058 nt, Artificial Sequence
  SARS-CoV-2__MT913146.1__non-structural protein 3 (NSP3) mRNA gc
aggagaaagcuuaccauggcccccaccaaggugaccuucggcgacgacacggucaucgaggugcagggguacaagagcgugaacaucaccuucgagcuggacgagcgcaucgacaagguccucaacgagaagugcuccgccuacaccguggagcugggcaccgaggugaacgaguucgcgugcgucguggccgacgccgugaucaagacgcugcagccggucagcgagcuccugaucccccuggggaucgaccucgacgagugguccauggccaccuacuaccuguucgacgagagcggcgaguucaagcuggccucccacauguacugcagcuucuacccccccgacgaggacgaggaggagggggacugcgaggaggaggaguucgagccguccacccaguacgaguacggcaccgaggacgacuaccagggcaagccccucgaguucggggcgacgagcgccgcccugcagcccgaggaggagcaggaggaggacuggcuggacgacgacucccagcagaccgugggccagcaggacgggagcgaggacaaccagaccaccacgauccagaccaucguggagguccagccccagcucgagauggagcugaccccgguggugcagaccaucgaggucaacuccuucagcggcuaccugaagcucacggacaacguguacaucaagaacgccgacaucguggaggaggcgaagaaggucaagcccaccgugguggucaacgccgccaacguguaccugaagcacgggggcggcguggccggggcccugaacaaggcgaccaacaacgccaugcaggucgaguccgacgacuacaucgccaccaacggcccccucaagguggggggcagcugcguccuguccggccacaaccuggccaagcacugccuccacgugguggggcccaacgucaacaagggcgaggacauccagcugcugaagagcgccuacgagaacuucaaccagcacgaggugcuccuggcgccgcugcucuccgccgggaucuucggcgccgaccccauccacagccugcgggugugcgucgacacggugcgcaccaacguguaccuggccgucuucgacaagaaccucuacgacaagcugguguccagcuuccuggagaugaagagcgagaagcagguggagcagaagaucgccgagauccccaaggaggaggucaagcccuucaucaccgaguccaagccgagcguggagcagcggaagcaggacgacaagaagaucaaggcgugcguggaggaggucaccacgacccucgaggagaccaaguuccugaccgagaaccugcuccuguacaucgacaucaacgggaaccugcaccccgacuccgccacgcucgugagcgacaucgacaucaccuuccugaagaaggacgcccccuacaucgugggcgacgucgugcaggagggcgugcugaccgccgucgugauccccaccaagaaggccgggggcacgaccgagaugcucgcgaaggcccugcgcaaggugccgaccgacaacuacaucaccacguaccccgggcagggccugaacggguacaccgucgaggaggccaagaccgugcucaagaagugcaaguccgccuucuacauccugcccagcaucaucuccaacgagaagcaggagauccugggcaccgugagcuggaaccuccgggagaugcuggcgcacgccgaggagacccgcaagcugaugcccgucugcguggagacgaaggccaucguguccaccauccagcggaaguacaagggcaucaagauccaggagggggucguggacuacggcgcccgcuucuacuucuacaccagcaagaccacgguggccucccugaucaacacccucaacgaccugaacgagacccuggucaccaugccgcucggguacgugacgcacggccugaaccuggaggaggcggcccgguacaugcgcagccucaaggugcccgccaccgucuccgugagcucccccgacgccgugaccgccuacaacggguaccugaccagcuccagcaagacgcccgaggagcacuucaucgagaccaucucccuggcgggcagcuacaaggacuggagcuacuccggccagagcacccagcucgggaucgaguuccugaagcggggcgacaaguccgucuacuacaccagcaacccgacgaccuuccaccuggacggggaggugaucaccuucgacaaccucaagacccugcugucccuccgcgaggugcggacgaucaaggucuucaccaccguggacaacaucaaccugcacacccagguggucgacaugagcaugacguacggccagcaguucggccccaccuaccuggacggggccgacgugaccaagaucaagccccacaacucccacgagggcaagaccuucuacgugcucccgaacgacgacacgcugcgcgucgaggccuucgaguacuaccacaccaccgaccccagcuuccuggggcgguacauguccgcccucaaccacaccaagaaguggaaguacccccaggugaacggccugacgagcaucaagugggccgacaacaacugcuaccuggcgaccgcccuccugacccugcagcagaucgagcucaaguucaaccccccggcccugcaggacgccuacuaccgcgcgcgggccggggaggccgccaacuucugcgcccugauccucgcguacugcaacaagaccgugggcgagcugggcgacguccgcgagacgauguccuaccuguuccagcacgccaaccucgacagcugcaagcgggugcugaacgucgugugcaagaccugcgggcagcagcagaccacccugaagggcguggaggccgucauguacauggggacccucuccuacgagcaguucaagaagggcgugcagauccccugcacgugcgggaagcaggccaccaaguaccuggugcagcaggagagccccuucgucaugauguccgcccccccggcgcaguacgagcugaagcacggcaccuucaccugcgccagcgaguacacgggcaacuaccagugcgggcacuacaagcacaucaccuccaaggagacccucuacugcaucgacggcgcccugcugaccaagagcagcgaguacaaggggcccaucacggacguguucuacaaggagaacuccuacaccaccaccaucaagcccgugacguacaagcucgacggcgucgugugcaccgagaucgaccccaagcuggacaacuacuacaagaaggacaacagcuacuucaccgagcagccgaucgaccuggugcccaaccagcccuaccccaacgccuccuucgacaacuucaaguucgucugcgacaacaucaaguucgccgacgaccucaaccagcugaccggguacaagaagccggcgagccgcgagcugaaggugacguucuuccccgaccucaacggcgacguggucgccaucgacuacaagcacuacacccccuccuucaagaagggcgccaagcugcugcacaagcccaucguguggcacgugaacaacgccaccaacaaggcgaccuacaagccgaacacguggugcauccggugccucuggagcaccaagcccgucgagaccuccaacagcuucgacgugcugaaguccgaggacgcccaggggauggacaaccuggccugcgaggaccucaagcccgugagcgaggaggucguggagaaccccaccauccagaaggacgugcuggagugcaacgucaagacgaccgagguggugggcgacaucauccugaagccggccaacaacucccucaagaucaccgaggaggucgggcacaccgaccugauggccgcguacguggacaacagcucccugacgaucaagaagcccaacgagcucagccgcgugcugggccugaagacccucgccacccacgggcuggccgccgucaacuccgugcccugggacaccaucgccaacuacgcgaagccguuccugaacaagguggucagcacgaccaccaacaucgugacccgcugccucaaccgggugugcacgaacuacaugcccuacuucuucacccugcugcuccagcugugcaccuucacccgcuccaccaacagccggaucaaggccuccaugcccacgaccaucgccaagaacaccgucaagagcgugggcaaguucugccuggaggccagcuucaacuaccucaagucccccaacuucagcaagcugaucaacaucaucaucugguuccugcuccuguccgugugccugggcagccucaucuacuccaccgccgcgcuggggguccugaugagcaaccucggcaugccguccuacugcacgggguaccgcgagggcuaccugaacagcaccaacgugaccaucgccaccuacugcacgggcuccauccccugcagcgugugccuguccgggcucgacagccuggacaccuaccccucccuggagaccauccagaucaccaucagcuccuucaagugggaccucacggccuucggccuggucgccgagugguuccuggccuacauccucuucacccgguucuucuacgugcuggggcuggcggccaucaugcagcucuucuucagcuacuucgccgugcacuucaucuccaacagcuggcugauguggcugaucaucaaccugguccagauggcccccaucuccgcgauggugcgcauguacaucuucuucgccagcuucuacuacguguggaagagcuacguccacgugguggacggcugcaacuccagcaccugcaugaugugcuacaagcggaaccgcgccacccgggucgagugcacgaccaucgugaacgggguccgccgguccuucuacguguacgccaacggcggcaagggguucugcaagcuccacaacuggaacugcgugaacugcgacaccuucugcgccggcagcaccuucaucuccgacgaggucgcgcgcgaccugagccugcaguucaagcggccgaucaaccccacggaccaguccagcuacaucguggacuccgugaccgucaagaacgggagcauccaccucuacuucgacaaggccggccagaagaccuacgagcgccacucccugagccacuucgugaaccuggacaaccuccgggccaacaacaccaaggggucccugcccaucaacgugaucgucuucgacggcaagagcaagugcgaggaguccagcgccaaguccgccagcguguacuacucccagcugaugugccagcccauccuccugcuggaccaggcgcucgugagcgacgucggcgacagcgccgagguggccgugaagauguucgacgccuacgucaacacguucuccagcaccuucaacgugccgauggagaagcugaagacccugguggccaccgcggaggccgagcucgccaagaacgucucccuggacaacgugcugagcacguucaucuccgccgcgcgccagggguucguggacagcgacgucgagaccaaggacgugguggagugccucaagcugucccaccagagcgacaucgaggucaccggcgacuccugcaacaacuacaugcugaccuacaacaagguggagaacaugacgccccgggaccucggggccugcaucgacugcagcgcccgccacaucaacgcccagguggccaagucccacaacaucgcgcugaucuggaacgucaaggacuucaugagccuguccgagcagcuccggaagcagauccgcagcgccgccaagaagaacaaccugcccuucaagcugaccugcgccaccacccgccagguggugaacgucgugacgaccaagaucgcccucaagggcgggugaggacuaguuauaagacugacuagcccgaugggccucccaacgggcccuccuccccuccuugcaccgagauuaauaaaaaaaaaaaaaaaaaaaaaaaaaaaaaaaaaaaaaaaaaaaaaaaaaaaaaaaaaaaaaaaaugcaucccccccccccccccccccccccccccccccaaaggcucuuuucagagccaccagaauu

SEQ ID NO: 21393 - RNA, 6058 nt, Artificial Sequence
  SARS-CoV-2__MT913147.1__non-structural protein 3 (NSP3) mRNA gc
aggagaaagcuuaccauggcccccaccaaggugaccuucggcgacgacacggucaucgaggugcagggguacaagagcgugaacaucaccuucgagcuggacgagcgcaucgacaagguccucaacgagaagugcuccgccuacaccguggagcugggcaccgaggugaacgaguucgcgugcgucguggccgacgccgugaucaagacgcugcagccggucagcgagcuccugaccccccuggggaucgaccucgacgagugguccauggccaccuacuaccuguucgacgagagcggcgaguucaagcuggccucccacauguacugcagcuucuacccccccgacgaggacgaggaggagggggacugcgaggaggaggaguucgagccguccacccaguacgaguacggcacggaggacgacuaccagggcaagccccucgaguucggggcgaccagcgccgcccugcagcccgaggaggagcaggaggaggacuggcuggacgacgacucccagcagaccgugggccagcaggacgggagcgaggacaaccagaccacgaccauccagaccaucguggagguccagccccagcucgagauggagcugaccccgguggugcagacgaucgaggucaacuccuucagcggcuaccugaagcucaccgacaacguguacaucaagaacgccgacaucguggaggaggcgaagaaggucaagcccaccgugguggucaacgccgccaacguguaccugaagcacgggggcggcguggccggggcccugaacaaggcgaccaacaacgccaugcaggucgaguccgacgacuacaucgccacgaacggcccccucaagguggggggcagcugcguccuguccggccacaaccuggccaagcacugccuccacgugguggggcccaacgucaacaagggcgaggacauccagcugcugaagagcgccuacgagaacuucaaccagcacgaggugcuccuggcgccgcugcucuccgccgggaucuucggcgccgaccccauccacagccugcgggugugcgucgacaccgugcgcaccaacguguaccuggccgucuucgacaagaaccucuacgacaagcugguguccagcuuccuggagaugaagagcgagaagcagguggagcagaagaucgccgagauccccaaggaggaggucaagcccuucaucaccgaguccaagccgagcguggagcagcggaagcaggacgacaagaagaucaaggcgugcguggaggaggucacgaccauccucgaggagaccaaguuccugaccgagaaccugcuccuguacaucgacaucaacgggaaccugcaccccgacuccgccacgcucgugagcgacaucgacaucaccuuccugaagaaggacgcccccuacaucgugggcgacgucgugcaggagggcgugcugaccgccgucgugauccccaccaagaaggccgggggcacgaccgagaugcucgcgaaggcccugcgcaaggugccgaccgacaacuacaucaccacguaccccgggcagggccugaacggguacaccgucgaggaggccaagaccgugcucaagaagugcaaguccgccuucuacauccugcccagcaucaucuccaacgagaagcaggagauccugggcaccgugagcuggaaccuccgggagaugcuggcgcacgccgaggagacccgcaagcugaugcccgucugcguggagacgaaggccaucguguccaccauccagcggaaguacaagggcaucaagauccaggagggggucguggacuacggcgcccgcuucuacuucuacaccagcaagaccacgguggccucccugaucaacacccucaacgaccugaacgagacccuggucaccaugccgcucggguacgugacgcacggccugaaccuggaggaggcggcccgguacaugcgcagccucaaggugcccgccaccgucuccgugagcucccccgacgccgugaccgccuacaacggguaccugaccagcuccagcaagacgcccgaggagcacuucaucgagaccaucucccuggcgggcagcuacaaggacuggagcuacuccggccagagcacccagcucgggaucgaguuccugaagcggggcgacaaguccgucuacuacaccagcaacccgacgaccuuccaccuggacggggaggugaucaccuucgacaaccucaagacccugcugucccuccgcgaggugcggacgaucaaggucuucaccaccguggacaacaucaaccugcacacccagguggucgacaugagcaugacguacggccagcaguucggccccaccuaccuggacggggccgacgugaccaagaucaagccccacaacucccacgagggcaagaccuucuacgugcucccgaacgacgacacgcugcgcgucgaggccuucgaguacuaccacaccaccgaccccagcuuccuggggcgguacauguccgcccucaaccacaccaagaaguggaaguacccccaggugaacggccugacgagcaucaagugggccgacaacaacugcuaccuggcgaccgcccuccugacccugcagcagaucgagcucaaguucaaccccccggcccugcaggacgccuacuaccgcgcgcgggccggggaggccgccaacuucugcgcccugauccucgcguacugcaacaagaccgugggcgagcugggcgacguccgcgagacgauguccuaccuguuccagcacgccaaccucgacagcugcaagcgggugcugaacgucgugugcaagaccugcgggcagcagcagaccacccugaagggcguggaggccgucauguacauggggacccucuccuacgagcaguucaagaagggcgugcagauccccugcacgugcgggaagcaggccaccaaguaccuggugcagcaggagagccccuucgucaugauguccgcccccccggcgcaguacgagcugaagcacggcaccuucaccugcgccagcgaguacacgggcaacuaccagugcgggcacuacaagcacaucaccuccaaggagacccucuacugcaucgacggcgcccugcugaccaagagcagcgaguacaaggggcccaucacggacguguucuacaaggagaacuccuacaccaccaccaucaagcccgugacguacaagcucgacggcgucgugugcaccgagaucgaccccaagcuggacaacuacuacaagaaggacaacagcuacuucaccgagcagccgaucgaccuggugcccaaccagcccuaccccaacgccuccuucgacaacuucaaguucgucugcgacaacaucaaguucgccgacgaccucaaccagcugaccggguacaagaagccggcgagccgcgagcugaaggugacguucuuccccgaccucaacggcgacguggucgccaucgacuacaagcacuacacccccuccuucaagaagggcgccaagcugcugcacaagcccaucguguggcacgugaacaacgccaccaacaaggcgaccuacaagccgaacacguggugcauccggugccucuggagcaccaagcccgucgagaccuccaacagcuucgacgugcugaaguccgaggacgcccaggggauggacaaccuggccugcgaggaccucaagcccgugagcgaggaggucguggagaaccccaccauccagaaggacgugcuggagugcaacgucaagacgaccgagguggugggcgacaucauccugaagccggccaacaacucccucaagaucaccgaggaggucgggcacaccgaccugauggccgcguacguggacaacagcucccugacgaucaagaagcccaacgagcucagccgcgugcugggccugaagacccucgccacccacgggcuggccgccgucaacuccgugcccugggacaccaucgccaacuacgcgaagccguuccugaacaagguggucagcacgaccaccaacaucgugacccgcugccucaaccgggugugcacgaacuacaugcccuacuucuucacccugcugcuccagcugugcaccuucacccgcuccaccaacagccggaucaaggccuccaugcccacgaccaucgccaagaacaccgucaagagcgugggcaaguucugccuggaggccagcuucaacuaccucaagucccccaacuucagcaagcugaucaacaucaucaucugguuccugcuccuguccgugugccugggcagccucaucuacuccaccgccgcgcuggggguccugaugagcaaccucggcaugccguccuacugcacgggguaccgcgagggcuaccugaacagcaccaacgugaccaucgccaccuacugcacgggcuccauccccugcagcgugugccuguccgggcucgacagccuggacaccuaccccucccuggagaccauccagaucaccaucagcuccuucaagugggaccucacggccuucggccuggucgccgagugguuccuggccuacauccucuucacccgguucuucuacgugcuggggcuggcggccaucaugcagcucuucuucagcuacuucgccgugcacuucaucuccaacagcuggcugauguggcugaucaucaaccugguccagauggcccccaucuccgcgauggugcgcauguacaucuucuucgccagcuucuacuacguguggaagagcuacguccacgugguggacggcugcaacuccagcaccugcaugaugugcuacaagcggaaccgcgccacccgggucgagugcacgaccaucgugaacgggguccgccgguccuucuacguguacgccaacggcggcaagggguucugcaagcuccacaacuggaacugcgugaacugcgacaccuucugcgccggcagcaccuucaucuccgacgaggucgcgcgcgaccugagccugcaguucaagcggccgaucaaccccacggaccaguccagcuacaucguggacuccgugaccgucaagaacgggagcauccaccucuacuucgacaaggccggccagaagaccuacgagcgccacucccugagccacuucgugaaccuggacaaccuccgggccaacaacaccaaggggucccugcccaucaacgugaucgucuucgacggcaagagcaagugcgaggaguccagcgccaaguccgccagcguguacuacucccagcugaugugccagcccauccuccugcuggaccaggcgcucgugagcgacgucggcgacagcgccgagguggccgugaagauguucgacgccuacgucaacacguucuccagcaccuucaacgugccgauggagaagcugaagacccugguggccaccgcggaggccgagcucgccaagaacgucucccuggacaacgugcugagcacguucaucuccgccgcgcgccagggguucguggacagcgacgucgagaccaaggacgugguggagugccucaagcugucccaccagagcgacaucgaggucaccggcgacuccugcaacaacuacaugcugaccuacaacaagguggagaacaugacgccccgggaccucggggccugcaucgacugcagcgcccgccacaucaacgcccagguggccaagucccacaacaucgcgcugaucuggaacgucaaggacuucaugagccuguccgagcagcuccggaagcagauccgcagcgccgccaagaagaacaaccugcccuucaagcugaccugcgccaccacccgccagguggugaacgucgugacgaccaagaucgcccucaagggcgggugaggacuaguuauaagacugacuagcccgaugggccucccaacgggcccuccuccccuccuugcaccgagauuaauaaaaaaaaaaaaaaaaaaaaaaaaaaaaaaaaaaaaaaaaaaaaaaaaaaaaaaaaaaaaaaaaugcaucccccccccccccccccccccccccccccccaaaggcucuuuucagagccaccagaauu

SEQ ID NO: 21394 - RNA, 6058 nt, Artificial Sequence
  SARS-CoV-2__MT913148.1__non-structural protein 3 (NSP3) mRNA gc
aggagaaagcuuaccauggcccccaccaaggugaccuucggcgacgacacggucaucgaggugcagggguacaagagcgugaacaucaccuucgagcuggacgagcgcaucgacaagguccucaacgagaagugcuccgccuacaccguggagcugggcaccgaggugaacgaguucgcgugcgucguggccgacgccgugaucaagacgcugcagccggucagcgagcuccugaccccccuggggaucgaccucgacgagugguccauggccaccuacuaccuguucgacgagagcggcgaguucaagcuggccucccacauguacugcagcuucuacccccccgacgaggacgaggaggagggggacugcgaggaggaggaguucgagccguccacccaguacgaguacggcacggaggacgacuaccagggcaagccccucgaguucggggcgaccagcgccgcccugcagcccgaggaggagcaggaggaggacuggcuggacgacgacucccagcagaccgugggccagcaggacgggagcgaggacaaccagaccacgaccauccagaccaucguggagguccagccccagcucgagauggagcugaccccgguggugcagacgaucgaggucaacuccuucagcggcuaccugaagcucaccgacaacguguacaucaagaacgccgacaucguggaggaggcgaagaaggucaagcccaccgugguggucaacgccgccaacguguaccugaagcacgggggcggcguggccggggcccugaacaaggcgaccaacaacgccaugcaggucgaguccgacgacuacaucgccacgaacggcccccucaagguggggggcagcugcguccuguccggccacaaccuggccaagcacugccuccacgugguggggcccaacgucaacaagggcgaggacauccagcugcugaagagcgccuacgagaacuucaaccagcacgaggugcuccuggcgccgcugcucuccgccgggaucuucggcgccgaccccauccacagccugcgggugugcgucgacaccgugcgcaccaacguguaccuggccgucuucgacaagaaccucuacgacaagcugguguccagcuuccuggagaugaagagcgagaagcagguggagcagaagaucgccgagauccccaaggaggaggucaagcccuucaucaccgaguccaagccgagcguggagcagcggaagcaggacgacaagaagaucaaggcgugcguggaggaggucacgaccacccucgaggagaccaaguuccugacggagaaccugcuccuguacaucgacaucaacgggaaccugcaccccgacuccgccacccucgugagcgacaucgacaucaccuuccugaagaaggacgcccccuacaucgugggcgacgucgugcaggagggcgugcugaccgccgucgugauccccacgaagaaggccgggggcaccaccgagaugcucgcgaaggcccugcgcaaggugccgaccgacaacuacaucacgaccuaccccgggcagggccugaacggguacaccgucgaggaggccaagaccgugcucaagaagugcaaguccgccuucuacauccugcccagcaucaucuccaacgagaagcaggagauccugggcaccgugagcuggaaccuccgggagaugcuggcgcacgccgaggagacgcgcaagcugaugcccgucugcguggagaccaaggccaucguguccaccauccagcggaaguacaagggcaucaagauccaggagggggucguggacuacggcgcccgcuucuacuucuacaccagcaagacgaccguggccucccugaucaacacccucaacgaccugaacgagacccuggucacgaugccgcucggguacgugacccacggccugaaccuggaggaggcggcccgguacaugcgcagccucaaggugcccgccaccgucuccgugagcucccccgacgccgugaccgccuacaacggguaccugacgagcuccagcaagacccccgaggagcacuucaucgagaccaucucccuggcgggcagcuacaaggacuggagcuacuccggccagagcacccagcucgggaucgaguuccugaagcggggcgacaaguccgucuacuacacgagcaacccgaccaccuuccaccuggacggggaggugaucaccuucgacaaccucaagacgcugcugucccuccgcgaggugcggaccaucaaggucuucaccaccguggacaacaucaaccugcacacgcagguggucgacaugagcaugaccuacggccagcaguucggccccaccuaccuggacggggccgacgugaccaagaucaagccccacaacucccacgagggcaagacguucuacgugcucccgaacgacgacacccugcgcgucgaggccuucgaguacuaccacaucaccgaccccagcuuccuggggcgguacauguccgcccucaaccacaccaagaaguggaaguacccccaggugaacggccugacgagcaucaagugggccgacaacaacugcuaccuggcgaccgcccuccugacccugcagcagaucgagcucaaguucaaccccccggcccugcaggacgccuacuaccgcgcgcgggccggggaggccgccaacuucugcgcccugauccucgcguacugcaacaagaccgugggcgagcugggcgacguccgcgagacgauguccuaccuguuccagcacgccaaccucgacagcugcaagcgggugcugaacgucgugugcaagaccugcgggcagcagcagaccacccugaagggcguggaggccgucauguacauggggacccucuccuacgagcaguucaagaagggcgugcagauccccugcacgugcgggaagcaggccaccaaguaccuggugcagcaggagagccccuucgucaugauguccgcccccccggcgcaguacgagcugaagcacggcaccuucaccugcgccagcgaguacacgggcaacuaccagugcgggcacuacaagcacaucaccuccaaggagacccucuacugcaucgacggcgcccugcugaccaagagcagcgaguacaaggggcccaucacggacguguucuacaaggagaacuccuacaccaccaccaucaagcccgugacguacaagcucgacggcgucgugugcaccgagaucgaccccaagcugaacaacuacuacaagaaggacaacagcuacuucaccgagcagccgaucgaccuggugcccaaccagcccuaccccaacgccuccuucgacaacuucaaguucgucugcgacaacaucaaguucgccgacgaccucaaccagcugaccggguacaagaagccggcgagccgcgagcugaaggugacguucuuccccgaccucaacggcgacguggucgccaucgacuacaagcacuacacccccuccuucaagaagggcgccaagcugcugcacaagcccaucguguggcacgugaacaacgccaccaacaaggcgaccuacaagccgaacacguggugcauccggugccucuggagcaccaagcccgucgagaccuccaacagcuucgacgugcugaaguccgaggacgcccaggggauggacaaccuggccugcgaggaccucaagcccgugagcgaggaggucguggagaaccccaccauccagaaggacgugcuggagugcaacgucaagacgaccgagguggugggcgacaucauccugaagccggccaacaacucccucaagaucaccgaggaggucgggcacaccgaccugauggccgcguacguggacaacagcucccugacgaucaagaagcccaacgagcucagccgcgugcugggccugaagacccucgccacccacgggcuggccgccgucaacuccgugcccugggacaccaucgccaacuacgcgaagccguuccugaacaagguggucagcacgaccaccaacaucgugacccgcugccucaaccgggugugcacgaacuacaugcccuacuucuucacccugcugcuccagcugugcaccuucacccgcuccaccaacagccggaucaaggccuccaugcccacgaccaucgccaagaacaccgucaagagcgugggcaaguucugccuggaggccagcuucaacuaccucaagucccccaacuucagcaagcugaucaacaucaucaucugguuccugcuccuguccgugugccugggcagccucaucuacuccaccgccgcgcuggggguccugaugagcaaccucggcaugccguccuacugcacgggguaccgcgagggcuaccugaacagcaccaacgugaccaucgccaccuacugcacgggcuccauccccugcagcgugugccuguccgggcucgacagccuggacaccuaccccucccuggagaccauccagaucaccaucagcuccuucaagugggaccucacggccuucggccuggucgccgagugguuccuggccuacauccucuucacccgguucuucuacgugcuggggcuggcggccaucaugcagcucuucuucagcuacuucgccgugcacuucaucuccaacagcuggcugauguggcugaucaucaaccugguccagauggcccccaucuccgcgauggugcgcauguacaucuucuucgccagcuucuacuacguguggaagagcuacguccacgugguggacggcugcaacuccagcaccugcaugaugugcuacaagcggaaccgcgccacccgggucgagugcacgaccaucgugaacgggguccgccgguccuucuacguguacgccaacggcggcaagggguucugcaagcuccacaacuggaacugcgugaacugcgacaccuucugcgccggcagcaccuucaucuccgacgaggucgcgcgcgaccugagccugcaguucaagcggccgaucaaccccacggaccaguccagcuacaucguggacuccgugaccgucaagaacgggagcauccaccucuacuucgacaaggccggccagaagaccuacgagcgccacucccugagccacuucgugaaccuggacaaccuccgggccaacaacaccaaggggucccugcccaucaacgugaucgucuucgacggcaagagcaagugcgaggaguccagcgccaaguccgccagcguguacuacucccagcugaugugccagcccauccuccugcuggaccaggcgcucgugagcgacgucggcgacagcgccgagguggccgugaagauguucgacgccuacgucaacacguucuccagcaccuucaacgugccgauggagaagcugaagacccugguggccaccgcggaggccgagcucgccaagaacgucucccuggacaacgugcugagcacguucaucuccgccgcgcgccagggguucguggacagcgacgucgagaccaaggacgugguggagugccucaagcugucccaccagagcgacaucgaggucaccggcgacuccugcaacaacuacaugcugaccuacaacaagguggagaacaugacgccccgggaccucggggccugcaucgacugcagcgcccgccacaucaacgcccagguggccaagucccacaacaucgcgcugaucuggaacgucaaggacuucaugagccuguccgagcagcuccggaagcagauccgcagcgccgccaagaagaacaaccugcccuucaagcugaccugcgccaccacccgccagguggugaacgucgugacgaccaagaucgcccucaagggcgggugaggacuaguuauaagacugacuagcccgaugggccucccaacgggcccuccuccccuccuugcaccgagauuaauaaaaaaaaaaaaaaaaaaaaaaaaaaaaaaaaaaaaaaaaaaaaaaaaaaaaaaaaaaaaaaaaugcaucccccccccccccccccccccccccccccccaaaggcucuuuucagagccaccagaauu

SEQ ID NO: 21395 - RNA, 6058 nt, Artificial Sequence
  SARS-CoV-2__MT913149.1__non-structural protein 3 (NSP3) mRNA gc
aggagaaagcuuaccauggcccccaccaaggugaccuucggcgacgacacggucaucgaggugcagggguacaagagcgugaacaucaccuucgagcuggacgagcgcaucgacaagguccucaacgagaagugcuccgccuacaccguggagcugggcaccgaggugaacgaguucgcgugcgucguggccgacgccgugaucaagacgcugcagccggucagcgagcuccugaccccccuggggaucgaccucgacgagugguccauggccaccuacuaccuguucgacgagagcggcgaguucaagcuggccucccacauguacugcagcuucuacccccccgacgaggacgaggaggagggggacugcgaggaggaggaguucgagccguccacccaguacgaguacggcacggaggcggacuaccagggcaagccccucgaguucggggccaccagcgccgcccugcagcccgaggaggagcaggaggaggacuggcuggacgacgacucccagcagaccgugggccagcaggacgggagcgaggacaaccagaccacgaccauccagaccaucguggagguccagccccagcucgagauggagcugaccccgguggugcagacgaucgaggucaacuccuucagcggcuaccugaagcucaccgacaacguguacaucaagaacgcggacaucguggaggaggccaagaaggucaagcccaccgugguggucaacgccgccaacguguaccugaagcacgggggcggcguggccggggcgcugaacaaggccaccaacaacgccaugcaggucgaguccgacgacuacaucgccacgaacggcccccucaagguggggggcagcugcguccuguccggccacaaccuggccaagcacugccuccacgugguggggcccaacgucaacaagggcgaggacauccagcugcugaagagcgcguacgagaacuucaaccagcacgaggugcuccuggccccgcugcucuccgccgggaucuucggcgccgaccccauccacagccugcgggugugcgucgacaccgugcgcaccaacguguaccuggccgucuucgacaagaaccucuacgacaagcugguguccagcuuccuggagaugaagagcgagaagcagguggagcagaagaucgcggagauccccaaggaggaggucaagcccuucaucaccgaguccaagccgagcguggagcagcggaagcaggacgacaagaagaucaaggccugcguggaggaggucacgaccacccucgaggagaccaaguuccugacggagaaccugcuccuguacaucgacaucaacgggaaccugcaccccgacuccgccacccucgugagcgacaucgacaucaccuuccugaagaaggacgcccccuacaucgugggcgacgucgugcaggagggcgugcugaccgccgucgugauccccacgaagaaggcggggggcaccaccgagaugcucgccaaggcccugcgcaaggugccgaccgacaacuacaucacgaccuaccccgggcagggccugaacggguacaccgucgaggaggccaagaccgugcucaagaagugcaaguccgcguucuacauccugcccagcaucaucuccaacgagaagcaggagauccugggcaccgugagcuggaaccuccgggagaugcuggcccacgccgaggagacgcgcaagcugaugcccgucugcguggagaccaaggccaucguguccaccauccagcggaaguacaagggcaucaagauccaggagggggucguggacuacggcgcccgcuucuacuucuacaccagcaagacgaccguggcgucccugaucaacacccucaacgaccugaacgagacccuggucacgaugccgcucggguacgugacccacggccugaaccuggaggaggccgcccgguacaugcgcagccucaaggugcccgccaccgucuccgugagcucccccgacgccgugaccgcguacaacggguaccugacgagcuccagcaagacccccgaggagcacuucaucgagaccaucucccuggccggcagcuacaaggacuggagcuacuccggccagagcacccagcucgggaucgaguuccugaagcggggcgacaaguccgucuacuacacgagcaacccgaccaccuuccaccuggacggggaggugaucaccuucgacaaccucaagacgcugcugucccuccgcgaggugcggaccaucaaggucuucaccaccguggacaacaucaaccugcacacgcagguggucgacaugagcaugaccuacggccagcaguucggccccaccuaccuggacggggccgacgugaccaagaucaagccccacaacucccacgagggcaagacguucuacgugcucccgaacgacgacacccugcgcgucgaggccuucgaguacuaccacaccaccgaccccagcuuccuggggcgguacauguccgcccucaaccacacgaagaaguggaaguacccccaggugaacggccugaccagcaucaagugggcggacaacaacugcuaccuggccaccgcccuccugacccugcagcagaucgagcucaaguucaaccccccggcccugcaggacgcguacuaccgcgcccgggccggggaggccgccaacuucugcgcgcugauccucgccuacugcaacaagacggugggcgagcugggcgacguccgcgagaccauguccuaccuguuccagcacgccaaccucgacagcugcaagcgggugcugaacgucgugugcaagaccugcgggcagcagcagaccacccugaagggcguggaggccgucauguacauggggacgcucuccuacgagcaguucaagaagggcgugcagauccccugcaccugcgggaagcaggccaccaaguaccuggugcagcaggagagccccuucgucaugauguccgcgcccccggcccaguacgagcugaagcacggcaccuucacgugcgccagcgaguacaccggcaacuaccagugcgggcacuacaagcacaucaccuccaaggagacccucuacugcaucgacggcgcccugcugacgaagagcagcgaguacaaggggcccaucaccgacguguucuacaaggagaacuccuacaccaccacgaucaagcccgugaccuacaagcucgacggcgucgugugcaccgagaucgaccccaagcuggacaacuacuacaagaaggacaacagcuacuucaccgagcagccgaucgaccuggugcccaaccagcccuaccccaacgccuccuucgacaacuucaaguucgucugcgacaacaucaaguucgcggacgaccucaaccagcugacgggguacaagaagccggccagccgcgagcugaaggugaccuucuuccccgaccucaacggcgacguggucgccaucgacuacaagcacuacacccccuccuucaagaagggcgccaagcugcugcacaagcccaucguguggcacgugaacaacgcgaccaacaaggccacguacaagccgaacaccuggugcauccggugccucuggagcaccaagcccgucgagaccuccaacagcuucgacgugcugaaguccgaggacgcccaggggauggacaaccuggccugcgaggaccucaagcccgugagcgaggaggucguggagaaccccacgauccagaaggacgugcuggagugcaacgucaagaccaccgagguggugggcgacaucauccugaagccggccaacaacucccucaagaucaccgaggaggucgggcacacggaccugauggcggccuacguggacaacagcucccugaccaucaagaagcccaacgagcucagccgcgugcugggccugaagacccucgccacccacgggcuggccgccgucaacuccgugcccugggacacgaucgcgaacuacgccaagccguuccugaacaagguggucagcaccaccaccaacaucgugacgcgcugccucaaccgggugugcaccaacuacaugcccuacuucuucacccugcugcuccagcugugcaccuucacccgcuccacgaacagccggaucaaggccuccaugcccaccaccaucgccaagaacaccgucaagagcgugggcaaguucugccuggaggccagcuucaacuaccucaagucccccaacuucagcaagcugaucaacaucaucaucugguuccugcuccuguccgugugccugggcagccucaucuacuccacggcggcccuggggguccugaugagcaaccucggcaugccguccuacugcaccggguaccgcgagggcuaccugaacagcaccaacgugaccaucgccacguacugcaccggcuccauccccugcagcgugugccuguccgggcucgacagccuggacaccuaccccucccuggagaccauccagaucacgaucagcuccuucaagugggaccucaccgccuucggccuggucgccgagugguuccuggcguacauccucuucacccgguucuucuacgugcuggggcuggccgccaucaugcagcucuucuucagcuacuucgccgugcacuucaucuccaacagcuggcugauguggcugaucaucaaccugguccagauggcgcccaucuccgccauggugcgcauguacaucuucuucgccagcuucuacuacguguggaagagcuacguccacgugguggacggcugcaacuccagcaccugcaugaugugcuacaagcggaaccgcgccacgcgggucgagugcaccaccaucgugaacgggguccgccgguccuucuacguguacgccaacggcggcaagggguucugcaagcuccacaacuggaacugcgugaacugcgacaccuucugcgcgggcagcacguucaucuccgacgaggucgcccgcgaccugagccugcaguucaagcggccgaucaaccccaccgaccaguccagcuacaucguggacuccgugaccgucaagaacgggagcauccaccucuacuucgacaaggccggccagaagaccuacgagcgccacucccugagccacuucgugaaccuggacaaccuccgggccaacaacacgaaggggucccugcccaucaacgugaucgucuucgacggcaagagcaagugcgaggaguccagcgccaaguccgcgagcguguacuacucccagcugaugugccagcccauccuccugcuggaccaggcccucgugagcgacgucggcgacagcgccgagguggccgugaagauguucgacgccuacgucaacaccuucuccagcaccuucaacgugccgauggagaagcugaagacccugguggcgacggccgaggccgagcucgccaagaacgucucccuggacaacgugcugagcaccuucaucuccgcggcccgccagggguucguggacagcgacgucgagaccaaggacgugguggagugccucaagcugucccaccagagcgacaucgaggucaccggcgacuccugcaacaacuacaugcugacguacaacaagguggagaacaugaccccccgggaccucggggccugcaucgacugcagcgcccgccacaucaacgcccagguggcgaagucccacaacaucgcccugaucuggaacgucaaggacuucaugagccuguccgagcagcuccggaagcagauccgcagcgccgccaagaagaacaaccugcccuucaagcugaccugcgccaccacgcgccagguggugaacgucgugaccaccaagaucgcgcucaagggcgggugaggacuaguuauaagacugacuagcccgaugggccucccaacgggcccuccuccccuccuugcaccgagauuaauaaaaaaaaaaaaaaaaaaaaaaaaaaaaaaaaaaaaaaaaaaaaaaaaaaaaaaaaaaaaaaaaugcaucccccccccccccccccccccccccccccccaaaggcucuuuucagagccaccagaauu

SEQ ID NO: 21396 - RNA, 6058 nt, Artificial Sequence
  SARS-CoV-2__MT913150.1__non-structural protein 3 (NSP3) mRNA gc
aggagaaagcuuaccauggcccccaccaaggugaccuucggcgacgacacggucaucgaggugcagggguacaagagcgugaacaucaccuucgagcuggacgagcgcaucgacaagguccucaacgagaagugcuccgccuacaccguggagcugggcaccgaggugaacgaguucgcgugcgucguggccgacgccgugaucaagacgcugcagccggucagcgagcuccugaccccccuggggaucgaccucgacgagugguccauggccaccuacuaccuguucgacgagagcggcgaguucaagcuggccucccacauguacugcagcuucuacccccccgacgaggacgaggaggagggggacugcgaggaggaggaguucgagccguccacccaguacgaguacggcacggaggacgacuaccagggcaagccccucgaguucggggcgaccagcgccgcccugcagcccgaggaggagcaggaggaggacuggcuggacgacgacucccagcagaccgugggccagcaggacgggagcgaggacaaccagaccacgaccauccagaccaucguggagguccagccccagcucgagauggagcugaccccgguggugcagacgaucgaggucaacuccuucagcggcuaccugaagcucaccgacaacguguacaucaagaacgccgacaucguggaggaggcgaagaaggucaagcccaccgugguggucaacgccgccaacguguaccugaagcacgggggcggcguggccggggcccugaacaaggcgaccaacaacgccaugcaggucgaguccgacgacuacaucgccacgaacggcccccucaagguggggggcagcugcguccuguccggccacaaccuggccaagcacugccuccacgugguggggcccaacgucaacaagggcgaggacauccagcugcugaagagcgccuacgagaacuucaaccagcacgaggugcuccuggcgccgcugcucuccgccgggaucuucggcgccgaccccauccacagccugcgggugugcgucgacaccgugcgcaccaacguguaccuggccgucuucgacaagaaccucuacgacaagcugguguccagcuuccuggagaugaagagcgagaagcagguggagcagaagaucgccgagauccccaaggaggaggucaagcccuucaucaccgaguccaagccgagcguggagcagcggaagcaggacgacaagaagaucaaggcgugcguggaggaggucacgaccacccucgaggagaccaaguuccugacggagaaccugcuccuguacaucgacaucaacgggaaccugcaccccgacuccgccacccucgugagcgacaucgacaucaccuuccugaagaaggacgcccccuacaucgugggcgacgucgugcaggagggcgugcugaccgccgucgugauccccacgaagaaggccgggggcaccaccgagaugcucgcgaaggcccugcgcaaggugccgaccgacaacuacaucacgaccuaccccgggcagggccugaacggguacaccgucgaggaggccaagaccgugcucaagaagugcaaguccgccuucuacauccugcccagcaucaucuccaacgagaagcaggagauccugggcaccgugagcuggaaccuccgggagaugcuggcgcacgccgaggagacgcgcaagcugaugcccgucugcguggagaccaaggccaucguguccaccauccagcggaaguacaagggcaucaagauccaggagggggucguggacuacggcgcccgcuucuacuucuacaccagcaagacgaccguggccucccugaucaacacccucaacgaccugaacgagacccuggucacgaugccgcucggguacgugacccacggccugaaccuggaggaggcggcccgguacaugcgcagccucaaggugcccgccaccgucuccgugagcucccccgacgccgugaccgccuacaacggguaccugacgagcuccagcaagacccccgaggagcacuucaucgagaccaucucccuggcgggcagcuacaaggacuggagcuacuccggccagagcacccagcucgggaucgaguuccugaagcggggcgacaaguccgucuacuacacgagcaacccgaccaccuuccaccuggacggggaggugaucaccuucgacaaccucaagacgcugcugucccuccgcgaggugcggaccaucaaggucuucaccaccguggacaacaucaaccugcacacgcagguggucgacaugagcaugaccuacggccagcaguucggccccaccuaccuggacggggccgacgugaccaagaucaagccccacaacucccacgagggcaagacguucuacgugcucccgaacgacgacacccugcgcgucgaggccuucgaguacuaccacaccaccgaccccagcuuccuggggcgguacauguccgcccucaaccacacgaagaaguggaaguacccccaggugaacggccugaccagcaucaagugggccgacaacaacugcuaccuggcgaccgcccuccugacccugcagcagaucgagcucaaguucaaccccccggcccugcaggacgccuacuaccgcgcgcgggccggggaggccgccaacuucugcgcccugauccucgcguacugcaacaagacggugggcgagcugggcgacguccgcgagaccauguccuaccuguuccagcacgccaaccucgacagcugcaagcgggugcugaacgucgugugcaagaccugcgggcagcagcagaccacccugaagggcguggaggccgucauguacauggggacgcucuccuacgagcaguucaagaagggcgugcagauccccugcaccugcgggaagcaggccaccaaguaccuggugcagcaggagagccccuucgucaugauguccgcccccccggcgcaguacgagcugaagcacggcaccuucacgugcgccagcgaguacaccggcaacuaccagugcgggcacuacaagcacaucaccuccaaggagacccucuacugcaucgacggcgcccugcugacgaagagcagcgaguacaaggggcccaucaccgacguguucuacaaggagaacuccuacaccaccacgaucaagcccgugaccuacaagcucgacggcgucgugugcaccgagaucgaccccaagcuggacaacuacuacaagaaggacaacagcuacuucaccgagcagccgaucgaccuggugcccaaccagcccuaccccaacgccuccuucgacaacuucaaguucgucugcgacaacaucaaguucgccgacgaccucaaccagcugacgggguacaagaagccggcgagccgcgagcugaaggugaccuucuuccccgaccucaacggcgacguggucgccaucgacuacaagcacuacacccccuccuucaagaagggcgccaagcugcugcacaagcccaucguguggcacgugaacaacgccaccaacaaggcgacguacaagccgaacaccuggugcauccggugccucuggagcaccaagcccgucgagaccuccaacagcuucgacgugcugaaguccgaggacgcccaggggauggacaaccuggccugcgaggaccucaagcccgugagcgaggaggucguggagaaccccacgauccagaaggacgugcuggagugcaacgucaagaccaccgagguggugggcgacaucauccugaagccggccaacaacucccucaagaucaccgaggaggucgggcacacggaccugauggccgcguacguggacaacagcucccugaccaucaagaagcccaacgagcucagccgcgugcugggccugaagacccucgccacccacgggcuggccgccgucaacuccgugcccugggacacgaucgccaacgcgaagccguuccugaacaagguggucagcaccaccaccaacaucgugacgcgcugccucaaccgggugugcaccaacuacaugcccuacuucuucacccugcugcuccagcugugcaccuucacccgcuccacgaacagccggaucaaggccuccaugcccaccaccaucgccaagaacaccgucaagagcgugggcaaguucugccuggaggccagcuucaacuaccucaagucccccaacuucagcaagcugaucaacaucaucaucugguuccugcuccuguccgugugccugggcagccucaucuacuccacggccgcgcuggggguccugaugagcaaccucggcaugccguccuacugcaccggguaccgcgagggcuaccugaacagcaccaacgugaccaucgccacguacugcaccggcuccauccccugcagcgugugccuguccgggcucgacagccuggacaccuaccccucccuggagaccauccagaucacgaucagcuccuucaagugggaccucaccgccuucggccuggucgccgagugguuccuggccuacauccucuucacccgguucuucuacgugcuggggcuggcggccaucaugcagcucuucuucagcuacuucgccgugcacuucaucuccaacagcuggcugauguggcugaucaucaaccugguccagauggcccccaucuccgcgauggugcgcauguacaucuucuucgccagcuucuacuacguguggaagagcuacguccacgugguggacggcugcaacuccagcaccugcaugaugugcuacaagcggaaccgcgccacgcgggucgagugcaccaccaucgugaacgggguccgccgguccuucuacguguacgccaacggcggcaagggguucugcaagcuccacaacuggaacugcgugaacugcgacaccuucugcgccggcagcacguucaucuccgacgaggucgcgcgcgaccugagccugcaguucaagcggccgaucaaccccaccgaccaguccagcuacaucguggacuccgugaccgucaagaacgggagcauccaccucuacuucgacaaggccggccagaagaccuacgagcgccacucccugagccacuucgugaaccuggacaaccuccgggccaacaacacgaaggggucccugcccaucaacgugaucgucuucgacggcaagagcaagugcgaggaguccagcgccaaguccgccagcguguacuacucccagcugaugugccagcccauccuccugcuggaccaggcgcucgugagcgacgucggcgacagcgccgagguggccgugaagauguucgacgccuacgucaacaccuucuccagcaccuucaacgugccgauggagaagcugaagacccugguggccacggcggaggccgagcucgccaagaacgucucccuggacaacgugcugagcaccuucaucuccgccgcgcgccagggguucguggacagcgacgucgagaccaaggacgugguggagugccucaagcugucccaccagagcgacaucgaggucaccggcgacuccugcaacaacuacaugcugacguacaacaagguggagaacaugaccccccgggaccucggggccugcaucgacugcagcgcccgccacaucaacgcccagguggccaagucccacaacaucgcgcugaucuggaacgucaaggacuucaugagccuguccgagcagcuccggaagcagauccgcagcgccgccaagaagaacaaccugcccuucaagcugaccugcgccaccacgcgccagguggugaacgucgugaccaccaagaucgcccucaagggcgggaagugaggacuaguuauaagacugacuagcccgaugggccucccaacgggcccuccuccccuccuugcaccgagauuaauaaaaaaaaaaaaaaaaaaaaaaaaaaaaaaaaaaaaaaaaaaaaaaaaaaaaaaaaaaaaaaaaugcaucccccccccccccccccccccccccccccccaaaggcucuuuucagagccaccagaauu

SEQ ID NO: 21397 - RNA, 6058 nt, Artificial Sequence
  SARS-CoV-2__MT913152.1__non-structural protein 3 (NSP3) mRNA gc
aggagaaagcuuaccauggcccccaccaaggugaccuucggcgacgacacggucaucgaggugcagggguacaagagcgugaacaucaccuucgagcuggacgagcgcaucgacaagguccucaacgagaagugcuccgccuacaccguggagcugggcaccgaggugaacgaguucgcgugcgucguggccgacgccgugaucaagacgcugcagccggucagcgagcuccugaccccccuggggaucgaccucgacgagugguccauggccaccuacuaccuguucgacgagagcggcgaguucaagcuggccucccacauguacugcagcuucuacccccccgacgaggacgaggaggagggggacugcgaggaggaggaguucgagccguccacccaguacgaguacggcacggaggacgacuaccagggcaagccccucgaguucggggcgaccagcgccgcccugcagcccgaggaggagcaggaggaggacuggcuggacgacgacucccagcagaccgugggccagcaggacgggagcgaggacaaccagaccacgaccauccagaccaucguggagguccagccccagcucgagauggagcugaccccgguggugcagacgaucgaggucaacuccuucagcggcuaccugaagcucaccgacaacguguacaucaagaacgccgacaucguggaggaggcgaagaaggucaagcccaccgugguggucaacgccgccaacguguaccugaagcacgggggcggcguggccggggcccugaacaaggcgaccaacaacgccaugcaggucgaguccgacgacuacaucgccacgaacggcccccucaagguggggggcagcugcguccuguccggccacaaccuggccaagcacugccuccacgugguggggcccaacgucaacaagggcgaggacauccagcugcugaagagcgccuacgagaacuucaaccagcacgaggugcuccuggcgccgcugcucuccgccgggaucuucggcgccgaccccauccacagccugcgggugugcgucgacaccgugcgcaccaacguguaccuggccgucuucgacaagaaccucuacgacaagcugguguccagcuuccuggagaugaagagcgagaagcagguggagcagaagaucgccgagauccccaaggaggaggucaagcccuucaucaccgaguccaagccgagcguggagcagcggaagcaggacgacaagaagaucaaggcgugcguggaggaggucacgaccacccucgaggagaccaaguuccugacggagaaccugcuccuguacaucgacaucaacgggaaccugcaccccgacuccgccacccucgugagcgacaucgacaucaccuuccugaagaaggacgcccccuacaucgugggcgacgucgugcaggagggcgugcugaccgccgucgugauccccacgaagaaggccgggggcaccaccgagaugcucgcgaaggcccugcgcaaggugccgaccgacaacuacaucacgaccuaccccgggcagggccugaacggguacaccgucgaggaggccaagaccgugcucaagaagugcaaguccgccuucuacauccugcccagcaucaucuccaacgagaagcaggagauccugggcaccgugagcuggaaccuccgggagaugcuggcgcacgccgaggagacgcgcaagcugaugcccgucugcguggagaccaaggccaucguguccaccauccagcggaaguacaagggcaucaagauccaggagggggucguggacuacggcgcccgcuucuacuucuacaccagcaagacgaccguggccucccugaucaacacccucaacgaccugaacgagacccuggucacgaugccgcucggguacgugacccacggccugaaccuggaggaggcggcccgguacaugcgcagccucaaggugcccgccaccgucuccgugagcucccccgacgccgugaccgccuacaacggguaccugacgagcuccagcaagacccccgaggagcacuucaucgagaccaucucccuggcgggcagcuacaaggacuggagcuacuccggccagagcacccagcucgggaucgaguuccugaagcggggcgacaaguccgucuacuacacgagcaacccgaccaccuuccaccuggacggggaggugaucaccuucgacaaccucaagacgcugcugucccuccgcgaggugcggaccaucaaggucuucaccaccguggacaacaucaaccugcacacgcagguggucgacaugagcaugaccuacggccagcaguucggccccaccuaccuggacggggccgacgugaccaagaucaagccccacaacucccacgagggcaagacguucuacgugcucccgaacgacgacacccugcgcgucgaggccuucgaguacuaccacaccaccgaccccagcuuccuggggcgguacauguccgcccucaaccacacgaagaaguggaaguacccccaggugaacggccugaccagcaucaagugggccgacaacaacugcuaccuggcgaccgcccuccugacccugcagcagaucgagcucaaguucaaccccccggcccugcaggacgccuacuaccgcgcgcgggccggggaggccgccaacuucugcgcccugauccucgcguacugcaacaagacggugggcgagcugggcgacguccgcgagaccauguccuaccuguuccagcacgccaaccucgacagcugcaagcgggugcugaacgucgugugcaagaccugcgggcagcagcagaccacccugaagggcguggaggccgucauguacauggggacgcucuccuacgagcaguucaagaagggcgugcagauccccugcaccugcgggaagcaggccaccaaguaccuggugcagcaggagagccccuucgucaugauguccgcccccccggcgcaguacgagcugaagcacggcaccuucacgugcgccagcgaguacaccggcaacuaccagugcgggcacuacaagcacaucaccuccaaggagacccucuacugcaucgacggcgcccugcugacgaagagcagcgaguacaaggggcccaucaccgacguguucuacaaggagaacuccuacaccaccacgaucaagcccgugaccuacaagcucgacggcgucgugugcaccgagaucgaccccaagcuggacaacuacuacaagaaggacaacagcuacuucaccgagcagccgaucgaccuggugcccaaccagcccuaccccaacgccuccuucgacaacuucaaguucgucugcgacaacaucaaguucgccgacgaccucaaccagcugacgggguacaagaagccggcgagccgcgagcugaaggugaccuucuuccccgaccucaacggcgacguggucgccaucgacuacaagcacuacacccccuccuucaagaagggcgccaagcugcugcacaagcccaucguguggcacgugaacaacgccaccaacaaggcgacguacaagccgaacaccuggugcauccggugccucuggagcaccaagcccgucgagaccuccaacagcuucgacgugcugaaguccgaggacgcccaggggauggacaaccuggccugcgaggaccucaagcccgugagcgaggaggucguggagaaccccacgauccagaaggacgugcuggagugcaacgucaagaccaccgagguggugggcgacaucauccugaagccggccaacaacucccucaagaucaccgaggaggucgggcacaucgaccugauggccgcguacguggacaacagcucccugacgaucaagaagcccaacgagcucagccgcgugcugggccugaagacccucgccacccacgggcuggccgccgucaacuccgugcccugggacaccaucgccaacuacgcgaagccguuccugaacaagguggucagcacgaccaccaacaucgugacccgcugccucaaccgggugugcacgaacuacaugcccuacuucuucacccugcugcuccagcugugcaccuucacccgcuccaccaacagccggaucaaggccuccaugcccacgaccaucgccaagaacaccgucaagagcgugggcaaguucugccuggaggccagcuucaacuaccucaagucccccaacuucagcaagcugaucaacaucaucaucugguuccugcuccuguccgugugccugggcagccucaucuacuccaccgccgcgcuggggguccugaugagcaaccucggcaugccguccuacugcacgggguaccgcgagggcuaccugaacagcaccaacgugaccaucgccaccuacugcacgggcuccauccccugcagcgugugccuguccgggcucgacagccuggacaccuaccccucccuggagaccauccagaucaccaucagcuccuucaagugggaccucacggccuucggccuggucgccgagugguuccuggccuacauccucuucacccgguucuucuacgugcuggggcuggcggccaucaugcagcucuucuucagcuacuucgccgugcacuucaucuccaacagcuggcugauguggcugaucaucaaccugguccagauggcccccaucuccgcgauggugcgcauguacaucuucuucgccagcuucuacuacguguggaagagcuacguccacgugguggacggcugcaacuccagcaccugcaugaugugcugcaagcggaaccgcgccacccgggucgagugcacgaccaucgugaacgggguccgccgguccuucuacguguacgccaacggcggcaagggguucugcaagcuccacaacuggaacugcgugaacugcgacaccuucugcgccggcagcaccuucaucuccgacgaggucgcgcgcgaccugagccugcaguucaagcggccgaucaaccccacggaccaguccagcuacaucguggacuccgugaccgucaagaacgggagcauccaccucuacuucgacaaggccggccagaagaccuacgagcgccacucccugagccacuucgugaaccuggacaaccuccgggccaacaacaccaaggggucccugcccaucaacgugaucgucuucgacggcaagagcaagugcgaggaguccagcgccaaguccgccagcguguacuacucccagcugaugugccagcccauccuccugcuggaccaggcgcucgugagcgacgucggcgacagcgccgagguggccgugaagauguucgacgccuacgucaacacguucuccagcaccuucaacgugccgauggagaagcugaagacccugguggccaccgcggaggccgagcucgccaagaacgucucccuggacaacgugcugagcacguucaucuccgccgcgcgccagggguucguggacagcgacgucgagaccaaggacgugguggagugccucaagcugucccaccagagcgacaucgaggucaccggcgacuccugcaacaacuacaugcugaccuacaacaagguggagaacaugacgccccgggaccucggggccugcaucgacugcagcgcccgccacaucaacgcccagguggccaagucccacaacaucgcgcugaucuggaacgucaaggacuucaugagccuguccgagcagcuccggaagcagauccgcagcgccgccaagaagaacaaccugcccuucaagcugaccugcgccaccacccgccagguggugaacgucgugacgaccaagaucgcccucaagggcgggugaggacuaguuauaagacugacuagcccgaugggccucccaacgggcccuccuccccuccuugcaccgagauuaauaaaaaaaaaaaaaaaaaaaaaaaaaaaaaaaaaaaaaaaaaaaaaaaaaaaaaaaaaaaaaaaaugcaucccccccccccccccccccccccccccccccaaaggcucuuuucagagccaccagaauu

SEQ ID NO: 21398 - RNA, 6058 nt, Artificial Sequence
  SARS-CoV-2__MT907517.1__non-structural protein 3 (NSP3) mRNA gc
aggagaaagcuuaccauggcccccaccaaggugaccuucggcgacgacacggucaucgaggugcagggguacaagagcgugaacaucaccuucgagcuggacgagcgcaucgacaagguccucaacgagaagugcuccgccuacaccguggagcugggcaccgaggugaacgaguucgcgugcgucguggccgacgccgugaucaagacgcugcagccggucagcgagcuccugaccccccuggggaucgaccucgacgagugguccauggccaccuacuaccuguucgacgagagcggcgaguucaagcuggccucccacauguacugcagcuucuacccccccgacgaggacgaggaggagggggacugcgaggaggaggaguucgagccguccacccaguacgaguacggcacggaggacgacuaccagggcaagccccucgaguucggggcgaccagcgccgcccugcagcccgaggaggagcaggaggaggacuggcuggacgacgacucccagcagaccgugggccagcaggacgggagcgaggacaaccagaccacgaccauccagaccaucguggagguccagccccagcucgagauggagcugaccccgguggugcagacgaucgaggucaacuccuucagcggcuaccugaagcucaccgacaacguguacaucaagaacgccgacaucguggaggaggcgaagaaggucaagcccaccgugguggucaacgccgccaacguguaccugaagcacgggggcggcguggccggggcccugaacaaggcgaccaacaacgccaugcaggucgaguccgacgacuacaucgccacgaacggcccccucaagguggggggcagcugcguccuguccggccacaaccuggccaagcacugccuccacgugguggggcccaacgucaacaagggcgaggacauccagcugcugaagagcgccuacgagaacuucaaccagcacgaggugcuccuggcgccgcugcucuccgccgggaucuucggcgccgaccccauccacagccugcgggugugcgucgacaccgugcgcaccaacguguaccuggccgucuucgacaagaaccucuacgacaagcugguguccagcuuccuggagaugaagagcgagaagcagguggagcagaagaucgccgagauccccaaggaggaggucaagcccuucaucaccgaguccaagccgagcguggagcagcggaagcaggacgacaagaagaucaaggcgugcguggaggaggucacgaccacccucgaggagaccaaguuccugacggagaaccugcuccuguacaucgacaucaacgggaaccugcaccccgacuccgccacccucgugagcgacaucgacaucaccuuccugaagaaggacgcccccuacaucgugggcgacgucgugcaggagggcgugcugaccgccgucgugauccccacgaagaaggccgggggcaccaccgagaugcucgcgaaggcccugcgcaaggugccgaccgacaacuacaucacgaccuaccccgggcagggccugaacggguacaccgucgaggaggccaagaccgugcucaagaagugcaaguccgccuucuacauccugcccagcaucaucuccaacgagaagcaggagauccugggcaccgugagcuggaaccuccgggagaugcuggcgcacgccgaggagacgcgcaagcugaugcccgucugcguggagaccaaggccaucguguccaccauccagcggaaguacaagggcaucaagauccaggagggggucguggacuacggcgcccgcuucuacuucuacaccagcaagacgaccguggccucccugaucaacacccucaacgaccugaacgagacccuggucacgaugccgcucggguacgugacccacggccugaaccuggaggaggcggcccgguacaugcgcagccucaaggugcccgccaccgucuccgugagcucccccgacgccgugaccgccuacaacggguaccugacgagcuccagcaagacccccgaggagcacuucaucgagaccaucucccuggcgggcagcuacaaggacuggagcuacuccggccagagcacccagcucgggaucgaguuccugaagcggggcgacaaguccgucuacuacacgagcaacccgaccaccuuccaccuggacggggaggugaucaccuucgacaaccucaagacgcugcugucccuccgcgaggugcggaccaucaaggucuucaccaccguggacaacaucaaccugcacacgcagguggucgacaugagcaugaccuacggccagcaguucggccccaccuaccuggacggggccgacgugaccaagaucaagccccacaacucccacgagggcaagacguucuacgugcucccgaacgacgacacccugcgcgucgaggccuucgaguacuaccacaccaccgaccccagcuuccuggggcgguacauguccgcccucaaccacacgaagaaguggaaguacccccaggugaacggccugaccagcaucaagugggccgacaacaacugcuaccuggcgaccgcccuccugacccugcagcagaucgagcucaaguucaaccccccggcccugcaggacgccuacuaccgcgcgcgggccggggaggccgccaacuucugcgcccugauccucgcguacugcaacaagacggugggcgagcugggcgacguccgcgagaccauguccuaccuguuccagcacgccaaccucgacagcugcaagcgggugcugaacgucgugugcaagaccugcgggcagcagcagaccacccugaagggcguggaggccgucauguacauggggacgcucuccuacgagcaguucaagaagggcgugcagauccccugcaccugcgggaagcaggccaccaaguaccuggugcagcaggagagccccuucgucaugauguccgcccccccggcgcaguacgagcugaagcacggcaccuucacgugcgccagcgaguacaccggcaacuaccagugcgggcacuacaagcacaucaccuccaaggagacccucuacugcaucgacggcgcccugcugacgaagagcagcgaguacaaggggcccaucaccgacguguucuacaaggagaacuccuacaccaccacgaucaagcccgugaccuacaagcucgacggcgucgugugcaccgagaucgaccccaagcuggacaacuacuacaagaaggacaacagcuacuucaccgagcagccgaucgaccuggugcccaaccagcccuaccccaacgccuccuucgacaacuucaaguucgucugcgacaacaucaaguucgccgacgaccucaaccagcugacgggguacaagaagccggcgagccgcgagcugaaggugaccuucuuccccgaccucaacggcgacguggucgccaucgacuacaagcacuacacccccuccuucaagaagggcgccaagcugcugcacaagcccaucguguggcacgugaacaacgccaccaacaaggcgacguacaagccgaacaccuggugcauccggugccucuggagcaccaagcccgucgagaccuccaacagcuucgacgugcugaaguccgaggacgcccaggggauggacaaccuggccugcgaggaccucaagcccgugagcgaggaggucguggagaaccccacgauccagaaggacgugcuggagugcaacgucaagaccaccgagguggugggcgacaucauccugaagccggccaacaacucccucaagaucaccgaggaggucgggcacacggaccugauggccgcguacguggacaacagcucccugaccaucaagaagcccaacgagcucagccgcgugcugggccugaagacccucgccacccacgggcuggccgccgucaacuccgugcccugggacacgaucgccaacuacgcgaagccguuccugaacaagguggucagcaccaccaccaacaucgugacgcgcugccucaaccgggugugcaccaacuacaugcccuacuucuucacccugcugcuccagcugugcaccuucacccgcuccacgaacagccggaucaaggccuccaugcccaccaccaucgccaagaacaccgucaagagcgugggcaaguucugccuggaggccagcuucaacuaccucaagucccccaacuucagcaagcugaucaacaucaucaucugguuccugcuccuguccgugugccugggcagccucaucuacuccacggccgcgcuggggguccugaugagcaaccucggcaugccguccuacugcaccggguaccgcgagggcuaccugaacagcaccaacgugaccaucgccacguacugcaccggcuccauccccugcagcgugugccuguccgggcucgacagccuggacaccuaccccucccuggagaccauccagaucacgaucagcuccuucaagugggaccucaccgccuucggccuggucgccgagugguuccuggccuacauccucuucacccgguucuucuacgugcuggggcuggcggccaucaugcagcucuucuucagcuacuucgccgugcacuucaucuccaacagcuggcugauguggcugaucaucaaccugguccagauggcccccaucuccgcgauggugcgcauguacaucuucuucgccagcuucuacuacguguggaagagcuacguccacgugguggacggcugcaacuccagcaccugcaugaugugcuacaagcggaaccgcgccacgcgggucgagugcaccaccaucgugaacgggguccgccgguccuucuacguguacgccaacggcggcaagggguucugcaagcuccacaacuggaacugcgugaacugcgacaccuucugcgccggcagcacguucaucuccgacgaggucgcgcgcgaccugagccugcaguucaagcggccgaucaaccccaccgaccaguccagcuacaucguggacuccgugaccgucaagaacgggagcauccaccucuacuucgacaaggccggccagaagaccuacgagcgccacucccugagccacuucgugaaccuggacaaccuccgggccaacaacacgaaggggucccugcccaucaacgugaucgucuucgacggcaagagcaagugcgaggaguccagcgccaaguccgccagcguguacuacucccagcugaugugccagcccauccuccugcuggaccaggcgcucgugagcgacgucggcgacagcgccgagguggccgugaagauguucgacgccuacgucaacaccuucuccagcaccuucaacgugccgauggagaagcugaagacccugguggccacggcggaggccgagcucgccaagaacgucucccuggacaacgugcugagcaccuucaucuccgccgcgcgccagggguucguggacagcgacgucgagaccaaggacgugguggagugccucaagcugucccaccagagcgacaucgaggucaccggcgacuccugcaacaacuacaugcugacguacaacaagguggagaacaugaccccccgggaccucggggcccgcaucgacugcagcgcccggcacaucaacgcccagguggccaagucccacaacaucgcgcugaucuggaacgucaaggacuucaugagccuguccgagcagcuccgcaagcagauccgcagcgccgccaagaagaacaaccugcccuucaagcugaccugcgccaccacgcggcagguggugaacgucgugaccaccaagaucgcccucaagggcgggugaggacuaguuauaagacugacuagcccgaugggccucccaacgggcccuccuccccuccuugcaccgagauuaauaaaaaaaaaaaaaaaaaaaaaaaaaaaaaaaaaaaaaaaaaaaaaaaaaaaaaaaaaaaaaaaaugcaucccccccccccccccccccccccccccccccaaaggcucuuuucagagccaccagaauu

SEQ ID NO: 21399 - RNA, 6058 nt, Artificial Sequence
  SARS-CoV-2__MT911561.1__non-structural protein 3 (NSP3) mRNA gc
aggagaaagcuuaccauggcccccaccaaggugaccuucggcgacgacacggucaucgaggugcagggguacaagagcgugaacaucaccuucgagcuggacgagcgcaucgacaagguccucaacgagaagugcuccgccuacaccguggagcugggcaccgaggugaacgaguucgcgugcgucguggccgacgccgugaucaagacgcugcagccggucagcgagcuccugaccccccuggggaucgaccucgacgagugguccauggccaccuacuaccuguucgacgagagcggcgaguucaagcuggccucccacauguacugcagcuucuacccccccgacgaggacgaggaggagggggacugcgaggaggaggaguucgagccguccacccaguacgaguacggcacggaggacgacuaccagggcaagccccucgaguucggggcgaccagcgccgcccugcagcccgaggaggagcaggaggaggacuggcuggacgacgacucccagcagaccgugggccagcaggacgggagcgaggacaaccagaccacgaccauccagaccaucguggagguccagccccagcucgagauggagcugaccccgguggugcagacgaucgaggucaacuccuucagcggcuaccugaagcucaccgacaacguguacaucaagaacgccgacaucguggaggaggcgaagaaggucaagcccaccgugguggucaacgccgccaacguguaccugaagcacgggggcggcguggccggggcccugaacaaggcgaccaacaacgccaugcaggucgaguccgacgacuacaucgccacgaacggcccccucaagguggggggcagcugcguccuguccggccacaaccuggccaagcacugccuccacgugguggggcccaacgucaacaagggcgaggacauccagcugcugaagagcgccuacgagaacuucaaccagcacgaggugcuccuggcgccgcugcucuccgccgggaucuucggcgccgaccccauccacagccugcgggugugcgucgacaccgugcgcaccaacguguaccuggccgucuucgacaagaaccucuacgacaagcugguguccagcuuccuggagaugaagagcgagaagcagguggagcagaagaucgccgagauccccaaggaggaggucaagcccuucaucaccgaguccaagccgagcguggagcagcggaagcaggacgacaagaagaucaaggcgugcguggaggaggucacgaccacccucgaggagaccaaguuccugacggagaaccugcuccuguacaucgacaucaacgggaaccugcaccccgacuccgccacccucgugagcgacaucgacaucaccuuccugaagaaggacgcccccuacaucgugggcgacgucgugcaggagggcgugcugaccgccgucgugauccccacgaagaaggccgggggcaccaccgagaugcucgcgaaggcccugcgcaaggugccgaccgacaacuacaucacgaccuaccccgggcagggccugaacggguacaccgucgaggaggccaagaccgugcucaagaagugcaaguccgccuucuacauccugcccagcaucaucuccaacgagaagcaggagauccugggcaccgugagcuggaaccuccgggagaugcuggcgcacgccgaggagacgcgcaagcugaugcccgucugcguggagaccaaggccaucguguccaccauccagcggaaguacaagggcaucaagauccaggagggggucguggacuacggcgcccgcuucuacuucuacaccagcaagacgaccguggccucccugaucaacacccucaacgaccugaacgagacccuggucacgaugccgcucggguacgugacccacggccugaaccuggaggaggcggcccgguacaugcgcagccucaaggugcccgccaccgucuccgugagcucccccgacgccgugaccgccuacaacggguaccugacgagcuccagcaagacccccgaggagcacuucaucgagaccaucucccuggcgggcagcuacaaggacuggagcuacuccggccagagcacccagcucgggaucgaguuccugaagcggggcgacaaguccgucuacuacacgagcaacccgaccaccuuccaccuggacggggaggugaucaccuucgacaaccucaagacgcugcugucccuccgcgaggugcggaccaucaaggucuucaccaccguggacaacaucaaccugcacacgcagguggucgacaugagcaugaccuacggccagcaguucggccccaccuaccuggacggggccgacgugaccaagaucaagccccacaacucccacgagggcaagacguucuacgugcucccgaacgacgacacccugcgcgucgaggccuucgaguacuaccacaccaccgaccccagcuuccuggggcgguacauguccgcccucaaccacacgaagaaguggaaguacccccaggugaacggccugaccagcaucaagugggccgacaacaacugcuaccuggcgaccgcccuccugacccugcagcagaucgagcucaaguucaaccccccggcccugcaggacgccuacuaccgcgcgcgggccggggaggccgccaacuucugcgcccugauccucgcguacugcaacaagacggugggcgagcugggcgacguccgcgagaccauguccuaccuguuccagcacgccaaccucgacagcugcaagcgggugcugaacgucgugugcaagaccugcgggcagcagcagaccacccugaagggcguggaggccgucauguacauggggacgcucuccuacgagcaguucaagaagggcgugcagauccccugcaccugcgggaagcaggccaccaaguaccuggugcagcaggagagccccuucgucaugauguccgcccccccggcgcaguacgagcugaagcacggcaccuucacgugcgccagcgaguacaccggcaacuaccagugcgggcacuacaagcacaucaccuccaaggagacccucuacugcaucgacggcgcccugcugacgaagagcagcgaguacaaggggcccaucaccgacguguucuacaaggagaacuccuacaccaccacgaucaagcccgugaccuacaagcucgacggcgucgugugcaccgagaucgaccccaagcuggacaacuacuacaagaaggacaacagcuacuucaccgagcagccgaucgaccuggugcccaaccagcccuaccccaacgccuccuucgacaacuucacguucgucugcgacaacaucaaguucgccgacgaccucaaccagcugaccggguacaagaagccggcgagccgcgagcugaaggugaccuucuuccccgaccucaacggcgacguggucgccaucgacuacaagcacuacacccccuccuucaagaagggcgccaagcugcugcacaagcccaucguguggcacgugaacaacgccacgaacaaggcgaccuacaagccgaacaccuggugcauccggugccucuggagcaccaagcccgucgagacguccaacagcuucgacgugcugaaguccgaggacgcccaggggauggacaaccuggccugcgaggaccucaagcccgugagcgaggaggucguggagaaccccaccauccagaaggacgugcuggagugcaacgucaagaccaccgagguggugggcgacaucauccugaagccggccaacaacucccucaagaucacggaggaggucgggcacaccgaccugauggccgcguacguggacaacagcucccugaccaucaagaagcccaacgagcucagccgcgugcugggccugaagacccucgccacgcacgggcuggccgccgucaacuccgugcccugggacaccaucgccaacuacgcgaagccguuccugaacaagguggucagcaccaccacgaacaucgugacccgcugccucaaccgggugugcaccaacuacaugcccuacuucuucacccugcugcuccagcugugcaccuucacgcgcuccaccaacagccggaucaaggccuccaugcccaccaccaucgccaagaacacggucaagagcgugggcaaguucugccuggaggccagcuucaacuaccucaagucccccaacuucagcaagcugaucaacaucaucaucugguuccugcuccuguccgugugccugggcagccucaucuacuccaccgccgcgcuggggguccugaugagcaaccucggcaugccguccuacugcaccggguaccgcgagggcuaccugaacagcaccaacgugacgaucgccaccuacugcaccggcuccauccccugcagcgugugccuguccgggcucgacagccuggacaccuaccccucccuggagacgauccagaucaccaucagcuccuucaagugggaccucaccgccuucggccuggucgccgagugguuccuggccuacauccucuucacccgguucuucuacgugcuggggcuggcggccaucaugcagcucuucuucagcuacuucgccgugcacuucaucuccaacagcuggcugauguggcugaucaucaaccugguccagauggcccccaucuccgcgauggugcgcauguacaucuucuucgccagcuucuacuacguguggaagagcuacguccacgugguggacggcugcaacuccagcacgugcaugaugugcuacaagcggaaccgcgccacccgggucgagugcaccaccaucgugaacgggguccgccgguccuucuacguguacgccaacggcggcaagggguucugcaagcuccacaacuggaacugcgugaacugcgacacguucugcgccggcagcaccuucaucuccgacgaggucgcgcgcgaccugagccugcaguucaagcggccgaucaaccccaccgaccaguccagcuacaucguggacuccgugaccgucaagaacgggagcauccaccucuacuucgacaaggccggccagaagacguacgagcgccacucccugagccacuucgugaaccuggacaaccuccgggccaacaacaccaaggggucccugcccaucaacgugaucgucuucgacggcaagagcaagugcgaggaguccagcgccaaguccgccagcguguacuacucccagcugaugugccagcccauccuccugcuggaccaggcgcucgugagcgacgucggcgacagcgccgagguggccgugaagauguucgacgccuacgucaacaccuucuccagcaccuucaacgugccgauggagaagcugaagacgcugguggccaccgcggaggccgagcucgccaagaacgucucccuggacaacgugcugagcaccuucaucuccgccgcgcgccagggguucguggacagcgacgucgagaccaaggacgugguggagugccucaagcugucccaccagagcgacaucgaggucacgggcgacuccugcaacaacuacaugcugaccuacaacaagguggagaacaugaccccccgggaccucggggccugcaucgacugcagcgcccgccacaucaacgcccagguggccaagucccacaacaucgcgcugaucuggaacgucaaggacuucaugagccuguccgagcagcuccggaagcagauccgcagcgccgccaagaagaacaaccugcccuucaagcugaccugcgccacgacccgccagguggugaacgucgugaccaccaagaucgcccucaagggcgggugaggacuaguuauaagacugacuagcccgaugggccucccaacgggcccuccuccccuccuugcaccgagauuaauaaaaaaaaaaaaaaaaaaaaaaaaaaaaaaaaaaaaaaaaaaaaaaaaaaaaaaaaaaaaaaaaugcaucccccccccccccccccccccccccccccccaaaggcucuuuucagagccaccagaauu

SEQ ID NO: 21400 - RNA, 6058 nt, Artificial Sequence
  SARS-CoV-2__MT911803.1__non-structural protein 3 (NSP3) mRNA gc
aggagaaagcuuaccauggcccccaccaaggugaccuucggcgacgacacggucaucgaggugcagggguacaagagcgugaacaucaccuucgagcuggacgagcgcaucgacaagguccucaacgagaagugcuccgccuacaccguggagcugggcaccgaggugaacgaguucgcgugcgucguggccgacgccgugaucaagacgcugcagccggucagcgagcuccugaccccccuggggaucgaccucgacgagugguccauggccaccuacuaccuguucgacgagagcggcgaguucaagcuggccucccacauguacugcagcuucuacccccccgacgaggacgaggaggagggggacugcgaggaggaggaguucgagccguccacccaguacgaguacggcacggaggacgacuaccagggcaagccccucgaguucggggcgaccagcgccgcccugcagcccgaggaggagcaggaggaggacuggcuggacgacgacucccagcagaccgugggccagcaggacgggagcgaggacaaccagaccacgaccauccagaccaucguggagguccagccccagcucgagauggagcugaccccgguggugcagacgaucgaggucaacuccuucagcggcuaccugaagcucaccgacaacguguacaucaagaacgccgacaucguggaggaggcgaagaaggucaagcccaccgugguggucaacgccgccaacguguaccugaagcacgggggcggcguggccggggcccugaacaaggcgaccaacaacgccaugcaggucgaguccgacgacuacaucgccacgaacggcccccucaagguggggggcagcugcguccuguccggccacaaccuggccaagcacugccuccacgugguggggcccaacgucaacaagggcgaggacauccagcugcugaagagcgccuacgagaacuucaaccagcacgaggugcuccuggcgccgcugcucuccgccgggaucuucggcgccgaccccauccacagccugcgggugugcgucgacaccgugcgcaccaacguguaccuggccgucuucgacaagaaccucuacgacaagcugguguccagcuuccuggagaugaagagcgagaagcagguggagcagaagaucgccgagauccccaaggaggaggucaagcccuucaucaccgaguccaagccgagcguggagcagcggaagcaggacgacaagaagaucaaggcgugcguggaggaggucacgaccacccucgaggagaccaaguuccugacggagaaccugcuccuguacaucgacaucaacgggaaccugcaccccgacuccgccacccucgugagcgacaucgacaucaccuuccugaagaaggacgcccccuacaucgugggcgacgucgugcaggagggcgugcugaccgccgucgugauccccacgaagaaggccgggggcaccaccgagaugcucgcgaaggcccugcgcaaggugccgaccgacaacuacaucacgaccuaccccgggcagggccugaacggguacaccgucgaggaggccaagaccgugcucaagaagugcaaguccgccuucuacauccugcccagcaucaucuccaacgagaagcaggagauccugggcaccgugagcuggaaccuccgggagaugcuggcgcacgccgaggagacgcgcaagcugaugcccgucugcguggagaccaaggccaucguguccaccauccagcggaaguacaagggcaucaagauccaggagggggucguggacuacggcgcccgcuucuacuucuacaccagcaagacgaccguggccucccugaucaacacccucaacgaccugaacgagacccuggucacgaugccgcucggguacgugacccacggccugaaccuggaggaggcggcccgguacaugcgcagccucaaggugcccgccaccgucuccgugagcucccccgacgccgugaccgccuacaacggguaccugacgagcuccagcaagacccccgaggagcacuucaucgagaccaucucccuggcgggcagcuacaaggacuggagcuacuccggccagagcacccagcucgggaucgaguuccugaagcggggcgacaaguccgucuacuacacgagcaacccgaccaccuuccaccuggacggggaggugaucaccuucgacaaccucaagacgcugcugucccuccgcgaggugcggaccaucaaggucuucaccaccguggacaacaucaaccugcacacgcagguggucgacaugagcaugaccuacggccagcaguucggccccaccuaccuggacggggccgacgugaccaagaucaagccccacaacucccacgagggcaagacguucuacgugcucccgaacgacgacacccugcgcgucgaggccuucgaguacuaccacaccaccgaccccagcuuccuggggcgguacauguccgcccucaaccacacgaagaaguggaaguacccccaggugaacggccugaccagcaucaagugggccgacaacaacugcuaccuggcgaccgcccuccugacccugcagcagaucgagcucaaguucaaccccccggcccugcaggacgccuacuaccgcgcgcgggccggggaggccgccaacuucugcgcccugauccucgcguacugcaacaagacggugggcgagcugggcgacguccgcgagaccauguccuaccuguuccagcacgccaaccucgacagcugcaagcgggugcugaacgucgugugcaagaccugcgggcagcagcgcaccacccugaagggcguggaggccgucauguacauggggacgcucuccuacgagcaguucaagaagggcgugcagauccccugcaccugcgggaagcaggccaccaaguaccuggugcagcaggagagccccuucgucaugauguccgcccccccggcgcaguacgagcugaagcacggcaccuucacgugcgccagcgaguacaccggcaacuaccagugcgggcacuacaagcacaucaccuccaaggagacccucuacugcaucgacggcgcccugcugacgaagagcagcgaguacaaggggcccaucaccgacguguucuacaaggagaacuccuacaccaccacgaucaagcccgugaccuacaagcucgacggcgucgugugcaccgagaucgaccccaagcuggacaacuacuacaagaaggacaacagcuacuucaccgagcagccgaucgaccuggugcccaaccagcccuaccccaacgccuccuucgacaacuucaaguucgucugcgacaacaucaaguucgccgacgaccucaaccagcugacgggguacaagaagccggcgagccgggagcugaaggugaccuucuuccccgaccucaacggcgacguggucgccaucgacuacaagcacuacacccccuccuucaagaagggcgccaagcugcugcacaagcccaucguguggcacgugaacaacgccaccaacaaggcgacguacaagccgaacaccuggugcauccgcugccucuggagcaccaagcccgucgagaccuccaacagcuucgacgugcugaaguccgaggacgcccaggggauggacaaccuggccugcgaggaccucaagcccgugagcgaggaggucguggagaaccccacgauccagaaggacgugcuggagugcaacgucaagaccaccgagguggugggcgacaucauccugaagccggccaacaacucccucaagaucaccgaggaggucgggcacacggaccugauggccgcguacguggacaacagcucccugaccaucaagaagcccaacgagcucagccgcgugcugggccugaagacccucgccacccacgggcuggccgccgucaacuccgugcccugggacacgaucgccaacuacgcgaagccguuccugaacaagguggucagcaccaccaccaacaucgugacgcggugccucaaccgcgugugcaccaacuacaugcccuacuucuucacccugcugcuccagcugugcaccuucacccgguccacgaacagccgcaucaaggccuccaugcccaccaccaucgccaagaacaccgucaagagcgugggcaaguucugccuggaggccagcuucaacuaccucaagucccccaacuucagcaagcugaucaacaucaucaucugguuccugcuccuguccgugugccugggcagccucaucuacuccacggccgcgcuggggguccugaugagcaaccucggcaugccguccuacugcaccggguaccgggagggcuaccugaacagcaccaacgugaccaucgccacguacugcaccggcuccauccccugcagcgugugccuguccgggcucgacagccuggacaccuaccccucccuggagaccauccagaucacgaucagcuccuucaagugggaccucaccgccuucggccuggucgccgagugguuccuggccuacauccucuucacccgcuucuucuacgugcuggggcuggcggccaucaugcagcucuucuucagcuacuucgccgugcacuucaucuccaacagcuggcugauguggcugaucaucaaccugguccagauggcccccaucuccgcgauggugcggauguacaucuucuucgccagcuucuacuacguguggaagagcuacguccacgugguggacggcugcaacuccagcaccugcaugaugugcuacaagcgcaaccgggccacgcgcgucgagugcaccaccaucgugaacgggguccggcgcuccuucuacguguacgccaacggcggcaagggguucugcaagcuccacaacuggaacugcgugaacugcgacaccuucugcgccggcagcacguucaucuccgacgaggucgcgcgggaccugagccugcaguucaagcgcccgaucaaccccaccgaccaguccagcuacaucguggacuccgugaccgucaagaacgggagcauccaccucuacuucgacaaggccggccagaagaccuacgagcggcacucccugagccacuucgugaaccuggacaaccuccgcgccaacaacacgaaggggucccugcccaucaacgugaucgucuucgacggcaagagcaagugcgaggaguccagcgccaaguccgccagcguguacuacucccagcugaugugccagcccauccuccugcuggaccaggcgcucgugagcgacgucggcgacagcgccgagguggccgugaagauguucgacgccuacgucaacaccuucuccagcaccuucaacgugccgauggagaagcugaagacccugguggccacggcggaggccgagcucgccaagaacgucucccuggacaacgugcugagcaccuucaucuccgccgcgcggcagggguucguggacagcgacgucgagaccaaggacgugguggagugccucaagcugucccaccagagcgacaucgaggucaccggcgacuccugcaacaacuacaugcugacguacaacaagguggagaacaugaccccccgcgaccucggggccugcaucgacugcagcgcccggcacaucaacgcccagguggccaagucccacaacaucgcgcugaucuggaacgucaaggacuucaugagccuguccgagcagcuccgcaagcagauccgcagcgccgccaagaagaacaaccugcccuucaagcugaccugcgccaccacgcggcagguggugaacgucgugaccaccaagaucgcccucaagggcgggugaggacuaguuauaagacugacuagcccgaugggccucccaacgggcccuccuccccuccuugcaccgagauuaauaaaaaaaaaaaaaaaaaaaaaaaaaaaaaaaaaaaaaaaaaaaaaaaaaaaaaaaaaaaaaaaaugcaucccccccccccccccccccccccccccccccaaaggcucuuuucagagccaccagaauu

SEQ ID NO: 21401 - RNA, 6058 nt, Artificial Sequence
  SARS-CoV-2__MT911815.1__non-structural protein 3 (NSP3) mRNA gc
aggagaaagcuuaccauggcccccaccaaggugaccuucggcgacgacacggucaucgaggugcagggguacaagagcgugaacaucaccuucgagcuggacgagcgcaucgacaagguccucaacgagaagugcuccgccuacaccguggagcugggcaccgaggugaacgaguucgcgugcgucguggccgacgccgugaucaagacgcugcagccggucagcgagcuccugaccccccuggggaucgaccucgacgagugguccauggccaccuacuaccuguucgacgagagcggcgaguucaagcuggccucccacauguacugcagcuucuacccccccgacgaggacgaggaggagggggacugcgaggaggaggaguucgagccguccacccaguacgaguacggcacggaggacgacuaccagggcaagccccucgaguucggggcgaccagcguggcccugcagcccgaggaggagcaggaggaggacuggcuggacgacgacucccagcagaccgugggccagcaggacgggagcgaggacaaccagaccacgaccauccagaccaucgucgaggugcagccccagcucgagauggagcugaccccggugguccagacgaucgaggugaacuccuucagcggcuaccugaagcucaccgacaacguguacaucaagaacgccgacaucgucgaggaggccaagaaggugaagcccaccguggucgugaacgcggccaacguguaccugaagcacgggggcggcgucgccggggcccugaacaaggccaccaacaacgcgaugcagguggaguccgacgacuacaucgccacgaacggcccccucaaggucgggggcagcugcgugcuguccggccacaaccuggccaagcacugccuccacguggucgggcccaacgugaacaagggcgaggacauccagcugcugaagagcgccuacgagaacuucaaccagcacgaggugcuccuggccccgcugcucuccgcggggaucuucggcgccgaccccauccacagccugcgggucugcguggacaccgugcgcaccaacgucuaccuggccguguucgacaagaaccucuacgacaagcugguguccagcuuccuggagaugaagagcgagaagcaggucgagcagaagaucgccgagauccccaaggaggaggugaagcccuucaucaccgaguccaagccgagcguggagcagcggaagcaggacgacaagaagaucaaggccugcgucgaggaggugacgaccacccucgaggagaccaaguuccugacggagaaccugcuccuguacaucgacaucaacgggaaccugcaccccgacuccgcgacccucgugagcgacaucgacaucaccuuccugaagaaggacgcccccuacaucgucggcgacguggugcaggagggcguccugaccgccguggugauccccacgaagaaggccgggggcaccaccgagaugcucgccaaggcgcugcgcaaggucccgaccgacaacuacaucacgaccuaccccgggcagggccugaacggguacaccguggaggaggccaagaccgugcucaagaagugcaaguccgccuucuacauccugcccagcaucaucuccaacgagaagcaggagauccugggcaccgucagcuggaaccuccgggagaugcuggcccacgcggaggagacgcgcaagcugaugcccgugugcguggagaccaaggccaucgucuccaccauccagcggaaguacaagggcaucaagauccaggagggggugguggacuacggcgcccgcuucuacuucuacaccagcaagacgaccgucgccucccugaucaacacccucaacgaccugaacgagacccuggugacgaugccgcucggguacgugacccacggccugaaccuggaggaggccgcgcgguacaugcgcagccucaagguccccgccaccguguccgugagcucccccgacgccgucaccgccuacaacggguaccugacgagcuccagcaagacccccgaggagcacuucaucgagaccaucucccuggccggcagcuacaaggacuggagcuacuccggccagagcacccagcucgggaucgaguuccugaagcggggcgacaaguccguguacuacacgagcaacccgaccaccuuccaccuggacggggaggugaucaccuucgacaaccucaagacgcugcugucccuccgcgagguccggaccaucaagguguucaccaccguggacaacaucaaccugcacacgcaggucguggacaugagcaugaccuacggccagcaguucggccccaccuaccuggacggggcggacgugaccaagaucaagccccacaacucccacgagggcaagacguucuacguccucccgaacgacgacacccugcgcguggaggccuucgaguacuaccacaccaccgaccccagcuuccuggggcgguacauguccgcccucaaccacacgaagaaguggaaguacccccaggugaacggccugaccagcaucaagugggccgacaacaacugcuaccuggccaccgcgcuccugacccugcagcagaucgagcucaaguucaaccccccggcccugcaggacgccuacuaccgcgcccgggcgggggaggccgccaacuucugcgcccugauccucgccuacugcaacaagacggucggcgagcugggcgacgugcgcgagaccauguccuaccuguuccagcacgcgaaccucgacagcugcaagcggguccugaacguggugugcaagaccugcgggcagcagcagaccacccugaagggcgucgaggccgugauguacauggggacgcucuccuacgagcaguucaagaagggcgugcagauccccugcaccugcgggaagcaggccaccaaguaccugguccagcaggagagccccuucgugaugauguccgcccccccggcccaguacgagcugaagcacggcaccuucacgugcgcgagcgaguacaccggcaacuaccagugcgggcacuacaagcacaucaccuccaaggagacccucuacugcaucgacggcgcccugcugacgaagagcagcgaguacaaggggcccaucaccgacguguucuacaaggagaacuccuacaccaccacgaucaagcccgucaccuacaagcucgacggcguggugugcaccgagaucgaccccaagcuggacaacuacuacaagaaggacaacagcuacuucaccgagcagccgaucgaccugguccccaaccagcccuaccccaacgccuccuucgacaacuucaaguucgugugcgacaacaucaaguucgccgacgaccucaaccagcugacgggguacaagaagccggccagccgcgagcugaaggugaccuucuuccccgaccucaacggcgacgucguggcgaucgacuacaagcacuacacccccuccuucaagaagggcgccaagcugcugcacaagcccaucguguggcacgucaacaacgccaccaacaaggccacguacaagccgaacaccuggugcauccggugccucuggagcaccaagcccguggagaccuccaacagcuucgacgugcugaaguccgaggacgcgcaggggauggacaaccuggccugcgaggaccucaagcccgucagcgaggaggugguggagaaccccacgauccagaaggacguccuggagugcaacgugaagaccaccgagguggucggcgacaucauccugaagccggccaacaacucccucaagaucaccgaggagguggggcacacggaccugauggccgccuacguggacaacagcucccugaccaucaagaagcccaacgagcucagccgcguccugggccugaagacccucgcgacccacgggcuggccgccgugaacuccgugcccugggacacgaucgccaacuacgccaagccguuccugaacaaggucgugagcaccaccaccaacaucgugacgcgcugccucaaccgggucugcaccaacuacaugcccuacuucuucacccugcugcuccagcugugcaccuucacccgcuccacgaacagccggaucaaggcguccaugcccaccaccaucgccaagaacaccgugaagagcgugggcaaguucugccuggaggccagcuucaacuaccucaagucccccaacuucagcaagcugaucaacaucaucaucugguuccugcuccuguccgucugccugggcagccucaucuacuccacggccgcccugggggugcugaugagcaaccucggcaugccguccuacugcaccggguaccgcgagggcuaccugaacagcaccaacgugaccaucgcgacguacugcaccggcuccauccccugcagcgucugccuguccgggcucgacagccuggacaccuaccccucccuggagaccauccagaucacgaucagcuccuucaagugggaccucaccgccuucggccugguggccgagugguuccuggccuacauccucuucacccgguucuucuacgugcuggggcuggccgcgaucaugcagcucuucuucagcuacuucgccguccacuucaucuccaacagcuggcugauguggcugaucaucaaccuggugcagauggcccccaucuccgccauggugcgcauguacaucuucuucgcgagcuucuacuacgucuggaagagcuacgugcacguggucgacggcugcaacuccagcaccugcaugaugugcuacaagcggaaccgcgccacgcggguggagugcaccaccaucgucaacggggugcgccgguccuucuacguguacgccaacggcggcaagggguucugcaagcuccacaacuggaacugcgucaacugcgacaccuucugcgccggcagcacguucaucuccgacgagguggcccgcgaccugagccugcaguucaagcggccgaucaaccccaccgaccaguccagcuacaucguggacuccgucaccgugaagaacgggagcauccaccucuacuucgacaaggcgggccagaagaccuacgagcgccacucccugagccacuucgugaaccuggacaaccuccgggccaacaacacgaaggggucccugcccaucaacgucaucguguucgacggcaagagcaagugcgaggaguccagcgccaaguccgccagcguguacuacucccagcugaugugccagcccauccuccugcuggaccaggcccucgucagcgacgugggcgacagcgcggagguggccgucaagauguucgacgccuacgugaacaccuucuccagcaccuucaacgugccgauggagaagcugaagacccuggucgccacggccgaggcggagcucgccaagaacgugucccuggacaacgugcugagcaccuucaucuccgccgcccgccagggguucgucgacagcgacguggagaccaaggacguggucgagugccucaagcugucccaccagagcgacaucgaggugaccggcgacuccugcaacaacuacaugcugacguacaacaagguggagaacaugaccccccgggaccucggggcgugcaucgacugcagcgcccgccacaucaacgcccaggucgccaagucccacaacaucgcccugaucuggaacgugaaggacuucaugagccuguccgagcagcuccggaagcagauccgcagcgcggccaagaagaacaaccugcccuucaagcugaccugcgccaccacgcgccagguggucaacguggugaccaccaagaucgcccucaagggcgggugaggacuaguuauaagacugacuagcccgaugggccucccaacgggcccuccuccccuccuugcaccgagauuaauaaaaaaaaaaaaaaaaaaaaaaaaaaaaaaaaaaaaaaaaaaaaaaaaaaaaaaaaaaaaaaaaugcaucccccccccccccccccccccccccccccccaaaggcucuuuucagagccaccagaauu

SEQ ID NO: 21402 - RNA, 6058 nt, Artificial Sequence
  SARS-CoV-2__MT911818.1__non-structural protein 3 (NSP3) mRNA gc
aggagaaagcuuaccauggcccccaccaaggugaccuucggcgacgacacggucaucgaggugcagggguacaagagcgugaacaucaccuucgagcuggacgagcgcaucgacaagguccucaacgagaagugcuccgccuacaccguggagcugggcaccgaggugaacgaguucgcgugcgucguggccgacgccgugaucaagacgcugcagccggucagcgagcuccugaccccccuggggaucgaccucgacgagugguccauggccaccuacuaccuguucgacgagagcggcgaguucaagcuggccucccacauguacugcagcuucuacccccccgacgaggacgaggaggagggggacugcgaggaggaggaguucgagccguccacccaguacgaguacggcacggaggacgacuaccagggcaagccccucgaguucggggcgaccagcgccgcccugcagcccgaggaggagcaggaggaggacuggcuggacgacgacucccagcagaccgugggccagcaggacgggagcgaggacaaccagaccacgaccauccagaccaucguggagguccagccccagcucgagauggagcugaccccgguggugcagacgaucgaggucaacuccuucagcggcuaccugaagcucaccgacaacguguacaucaagaacgccgacaucguggaggaggcgaagaaggucaagcccaccgugguggucaacgccgccaacguguaccugaagcacgggggcggcguggccggggcccugaacaaggcgaccaacaacgccaugcaggucgaguccgacgacuacaucgccacgaacggcccccucaagguggggggcagcugcguccuguccggccacaaccuggccaagcacugccuccacgugguggggcccaacgucaacaagggcgaggacauccagcugcugaagagcgccuacgagaacuucaaccagcacgaggugcuccuggcgccgcugcucuccgccgggaucuucggcgccgaccccauccacagccugcgggugugcgucgacaccgugcgcaccaacguguaccuggccgucuucgacaagaaccucuacgacaagcugguguccagcuuccuggagaugaagagcgagaagcagguggagcagaagaucgccgagauccccaaggaggaggucaagcccuucaucaccgaguccaagccgagcguggagcagcggaagcaggacgacaagaagaucaaggcgugcguggaggaggucacgaccacccucgaggagaccaaguuccugacggagaaccugcuccuguacaucgacaucaacgggaaccugcaccccgacuccgccacccucgugagcgacaucgacaucaccuuccugaagaaggacgcccccuacaucgugggcgacgucgugcaggagggcgugcugaccgccgucgugauccccacgaagaaggccgggggcaccaccgagaugcucgcgaaggcccugcgcaaggugccgaccgacaacuacaucacgaccuaccccgggcagggccugaacggguacaccgucgaggaggccaagaccgugcucaagaagugcaaguccgccuucuacauccugcccagcaucaucuccaacgagaagcaggagauccugggcaccgugagcuggaaccuccgggagaugcuggcgcacgccgaggagacgcgcaagcugaugcccgucugcguggagaccaaggccaucguguccaccauccagcggaaguacaagggcaucaagauccaggagggggucguggacuacggcgcccgcuucuacuucuacaccagcaagacgaccguggccucccugaucaacacccucaacgaccugaacgagacccuggucacgaugccgcucggguacgugacccacggccugaaccuggaggaggcggcccgguacaugcgcagccucaaggugcccgccaccgucuccgugagcucccccgacgccgugaccgccuacaacggguaccugacgagcuccagcaagacccccgaggagcacuucaucgagaccaucucccuggcgggcagcuacaaggacuggagcuacuccggccagagcacccagcucgggaucgaguuccugaagcggggcgacaaguccgucuacuacacgagcaacccgaccaccuuccaccuggacggggaggugaucaccuucgacaaccucaagacgcugcugucccuccgcgaggugcggaccaucaaggucuucaccaccguggacaacaucaaccugcacacgcagguggucgacaugagcaugaccuacggccagcaguucggccccaccuaccuggacggggccgacgugaccaagaucaagccccacaacucccacgagggcaagacguucuacgugcucccgaacgacgacacccugcgcgucgaggccuucgaguacuaccacaccaccgaccccagcuuccuggggcgguacauguccgcccucaaccacacgaagaaguggaaguacccccaggugaacggccugaccagcaucaagugggccgacaacaacugcuaccuggcgaccgcccuccugacccugcagcagaucgagcucaaguucaaccccccggcccugcaggacgccuacuaccgcgcgcgggccggggaggccgccaacuucugcgcccugauccucgcguacugcaacaagacggugggcgagcugggcgacguccgcgagaccauguccuaccuguuccagcacgccaaccucgacagcugcaagcgggugcugaacgucgugugcaagaccugcgggcagcagcagaccacccugaaguccguggaggccgucauguacaugggcacgcucagcuacgagcaguucaagaagggggugcagauccccugcaccugcggcaagcaggccaccaaguaccuggugcagcaggagucccccuucgucaugaugagcgcccccccggcgcaguacgagcugaagcacgggaccuucacgugcgccuccgaguacaccggcaacuaccagugcggccacuacaagcacaucaccagcaaggagacccucuacugcaucgacggggcccugcugacgaagagcuccgaguacaagggccccaucaccgacguguucuacaaggagaacagcuacaccaccacgaucaagcccgugaccuacaagcucgacggggucgugugcaccgagaucgaccccaagcuggacaacuacuacaagaaggacaacuccuacuucaccgagcagccgaucgaccuggugcccaaccagcccuaccccaacgccagcuucgacaacuucaaguucgucugcgacaacaucaaguucgccgacgaccucaaccagcugacgggcuacaagaagccggcgucccgcgagcugaaggugaccuucuuccccgaccucaacggggacguggucgccaucgacuacaagcacuacacccccagcuucaagaagggcgccaagcugcugcacaagcccaucguguggcacgugaacaacgccaccaacaaggcgacguacaagccgaacaccuggugcauccggugccucugguccaccaagcccgucgagaccagcaacuccuucgacgugcugaagagcgaggacgcccagggcauggacaaccuggccugcgaggaccucaagcccguguccgaggaggucguggagaaccccacgauccagaaggacgugcuggagugcaacgucaagaccaccgagguggugggggacaucauccugaagccggccaacaacagccucaagaucaccgaggaggucggccacacggaccugauggccgcguacguggacaacuccagccugaccaucaagaagcccaacgagcucucccgcgugcuggggcugaagacccucgccacccacggccuggccgccgucaacagcgugcccugggacacgaucgccaacuacgcgaagccguuccugaacaagguggucuccaccaccaccaacaucgugacgcgcugccucaaccgggugugcaccaacuacaugcccuacuucuucacccugcugcuccagcugugcaccuucacccgcagcacgaacucccggaucaaggccagcaugcccaccaccaucgccaagaacaccgucaagagcguggggaaguucugccuggaggccuccuucaacuaccucaagagccccaacuucuccaagcugaucaacaucaucaucugguuccugcuccugagcgugugccugggcucccucaucuacagcacggccgcgcugggcguccugauguccaaccucgggaugccgagcuacugcaccggcuaccgcgagggguaccugaacuccaccaacgugaccaucgccacguacugcaccggcagcauccccugcuccgugugccugagcggccucgacucccuggacaccuaccccagccuggagaccauccagaucacgaucuccagcuucaagugggaccucaccgccuucgggcuggucgccgagugguuccuggccuacauccucuucacccgguucuucuacgugcugggccuggcggccaucaugcagcucuucuucuccuacuucgccgugcacuucaucagcaacuccuggcugauguggcugaucaucaaccugguccagauggcccccaucagcgcgauggugcgcauguacaucuucuucgccagcuucuacuacguguggaaguccuacguccacgugguggacgggugcaacagcuccaccugcaugaugugcuacaagcggaaccgcgccacgcgggucgagugcaccaccaucgugaacggcguccgccggagcuucuacguguacgccaacgggggcaagggcuucugcaagcuccacaacuggaacugcgugaacugcgacaccuucugcgccggguccacguucaucagcgacgaggucgcgcgcgaccugucccugcaguucaagcggccgaucaaccccaccgaccagagcuccuacaucguggacagcgugaccgucaagaacggcuccauccaccucuacuucgacaaggccgggcagaagaccuacgagcgccacagccugucccacuucgugaaccuggacaaccuccgggccaacaacacgaagggcagccugcccaucaacgugaucgucuucgacgggaaguccaagugcgaggagagcuccgccaagagcgccuccguguacuacagccagcugaugugccagcccauccuccugcuggaccaggcgcucgugagcgacgucggcgacuccgccgagguggccgugaagauguucgacgccuacgucaacaccuucagcuccaccuucaacgugccgauggagaagcugaagacccugguggccacggcggaggccgagcucgccaagaacgucagccuggacaacgugcuguccaccuucaucagcgccgcgcgccagggcuucguggacuccgacgucgagaccaaggacgugguggagugccucaagcugagccaccaguccgacaucgaggucaccggggacagcugcaacaacuacaugcugacguacaacaagguggagaacaugaccccccgggaccucggcgccugcaucgacugcuccgcccgccacaucaacgcccagguggccaagagccacaacaucgcgcugaucuggaacgucaaggacuucaugucccugagcgagcagcuccggaagcagauccgcuccgccgccaagaagaacaaccugcccuucaagcugaccugcgccaccacgcgccagguggugaacgucgugaccaccaagaucgcccucaaggggggcugaggacuaguuauaagacugacuagcccgaugggccucccaacgggcccuccuccccuccuugcaccgagauuaauaaaaaaaaaaaaaaaaaaaaaaaaaaaaaaaaaaaaaaaaaaaaaaaaaaaaaaaaaaaaaaaaugcaucccccccccccccccccccccccccccccccaaaggcucuuuucagagccaccagaauu

SEQ ID NO: 21403 - RNA, 6058 nt, Artificial Sequence
  SARS-CoV-2__MT911819.1__non-structural protein 3 (NSP3) mRNA gc
aggagaaagcuuaccauggcccccaccaaggugaccuucggcgacgacacggucaucgaggugcagggguacaagagcgugaacaucaccuucgagcuggacgagcgcaucgacaagguccucaacgagaagugcuccgccuacaccguggagcugggcaccgaggugaacgaguucgcgugcgucguggccgacgccgugaucaagacgcugcagccggucagcgagcuccugaccccccuggggaucgaccucgacgagugguccauggccaccuacuaccuguucgacgagagcggcgaguucaagcuggccucccacauguacugcagcuucuacccccccgacgaggacgaggaggagggggacugcgaggaggaggaguucgagccguccacccaguacgaguacggcacggaggacgacuaccagggcaagccccucgaguucggggcgaccagcgccgcccugcagcccgaggaggagcaggaggaggacuggcuggacgacgacucccagcagaccgugggccagcaggacgggagcgaggacaaccagaccacgaccauccagaccaucguggagguccagccccagcucgagauggagcugaccccgguggugcagacgaucgaggucaacuccuucagcggcuaccugaagcucaccgacaacguguacaucaagaacgccgacaucguggaggaggcgaagaaggucaagcccaccgugguggucaacgccgccaacguguaccugaagcacgggggcggcguggccggggcccugaacaaggcgaccaacaacgccaugcaggucgaguccgacgacuacaucgccacgaacggcccccucaagguggggggcagcugcguccuguccggccacaaccuggccaagcacugccuccacgugguggggcccaacgucaacaagggcgaggacauccagcugcugaagagcgccuacgagaacuucaaccagcacgaggugcuccuggcgccgcugcucuccgccgggaucuucggcgccgaccccauccacagccugcgggugugcgucgacaccgugcgcaccaacguguaccuggccgucuucgacaagaaccucuacgacaagcugguguccagcuuccuggagaugaagagcgagaagcagguggagcagaagaucgccgagauccccaaggaggaggucaagcccuucaucaccgaguccaagccgagcguggagcagcggaagcaggacgacaagaagaucaaggcgugcguggaggaggucacgaccacccucgaggagaccaaguuccugacggagaaccugcuccuguacaucgacaucaacgggaaccugcaccccgacuccgccacccucgugagcgacaucgacaucaccuuccugaagaaggacgcccccuacaucgugggcgacgucgugcaggagggcgugcugaccgccgucgugauccccacgaagaaggccgggggcaccaccgagaugcucgcgaaggcccugcgcaaggugccgaccgacaacuacaucacgaccuaccccgggcagggccugaacggguacaccgucgaggaggccaagaccgugcucaagaagugcaaguccgccuucuacauccugcccagcaucaucuccaacgagaagcaggagauccugggcaccgugagcuggaaccuccgggagaugcuggcgcacgccgaggagacgcgcaagcugaugcccgucugcguggagaccaaggccaucguguccaccauccagcggaaguacaagggcaucaagauccaggagggggucguggacuacggcgcccgcuucuacuucuacaccagcaagacgaccguggccucccugaucaacacccucaacgaccugaacgagacccuggucacgaugccgcucggguacgugacccacggccugaaccuggaggaggcggcccgguacaugcgcagccucaaggugcccgccaccgucuccgugagcucccccgacgccgugaccgccuacaacggguaccugacgagcuccagcaagacccccgaggagcacuucaucgagaccaucucccuggcgggcagcuacaaggacuggagcuacuccggccagagcacccagcucgggaucgaguuccugaagcggggcgacaaguccgucuacuacacgagcaacccgaccaccuuccaccuggacggggaggugaucaccuucgacaaccucaagacgcugcugucccuccgcgaggugcggaccaucaaggucuucaccaccguggacaacaucaaccugcacacgcagguggucgacaugagcaugaccuacggccagcaguucggccccaccuaccuggacggggccgacgugaccaagaucaagccccacaacucccacgagggcaagacguucuacgugcucccgaacgacgacacccugcgcgucgaggccuucgaguacuaccacaccaccgaccccagcuuccuggggcgguacauguccgcccucaaccacacgaagaaguggaaguacccccaggugaacggccugaccagcaucaagugggccgacaacaacugcuaccuggcgaccgcccuccugacccugcagcagaucgagcucaaguucaaccccccggcccugcaggacgccuacuaccgcgcgcgggccggggaggccgccaacuucugcgcccugauccucgcguacugcaacaagacggugggcgagcugggcgacguccgcgagaccauguccuaccuguuccagcacgccaaccucgacagcugcaagcgggugcugaacgucgugugcaagaccugcgggcagcagcagaccacccugaagggcguggaggccgucauguacauggggacgcucuccuacgagcaguucaagaagggcgugcagauccccugcaccugcgggaagcaggccaccaaguaccuggugcagcaggagagccccuucgucaugauguccgcccccccggcgcaguacgagcugaagcacggcaccuucacgugcgccagcgaguacaccggcaacuaccagugcgggcacuacaagcacaucaccuccaaggagacccucuacugcaucgacggcgcccugcugacgaagagcagcgaguacaaggggcccaucaccgacguguucuacaaggagaacuccuacaccaccacgaucaagcccgugaccuacaagcucgacggcgucgugugcaccgagaucgaccccaagcuggacaacuacuacaagaaggacaacagcuacuucaccgagcagccgaucgaccuggugcccaaccagcccuaccccaacgccuccuucgacaacuucaaguucgucugcgacaacaucaaguucgccgacgaccucaaccagcugacgggguacaagaagccggcgagccgcgagcugaaggugaccuucuuccccgaccucaacggcgacguggucgccaucgacuacaagcacuacacccccuccuucaagaagggcgccaagcugcugcacaagcccaucguguggcacgugaacaacgccaccaacaaggcgacguacaagccgaacaccuggugcauccggugccucuggagcaccaagcccgucgagaccuccaacagcuucgacgugcugaaguccgaggacgcccaggggauggacaaccuggccugcgaggaccucaagcccgugagcgaggaggucguggagaaccccacgauccagaaggacgugcuggagugcaacgucaagaccaccgagguggugggcgacaucauccugaagccggccaacaacucccucaagaucaccgaggaggucgggcacacggaccugauggccgcguacguggacaacagcucccugaccaucaagaagcccaacgagcucagccgcgugcugggccugaagacccucgccacccacgggcuggccgccgucaacuccgugcccugggacacgaucgccaacuacgcgaagccguuccugaacaagguggucagcaccaccaccaacaucgugacgcgcugccucaaccgggugugcaccaacuacaugcccuacuucuucacccugcugcuccagcugugcaccuucacccgcuccacgaacagccggaucaaggccuccaugcccaccaccaucgccaagaacaccgucaagagcgugggcaaguucugccuggaggccagcuucaacuaccucaagucccccaacuucagcaagcugaucaacaucaucaucugguuccugcuccuguccgugugccugggcagccucaucuacuccacggccgcgcuggggguccugaugagcaaccucggcaugccguccuacugcaccggguaccgcgagggcuaccugaacagcaccaacgugaccaucgccacguacugcaccggcuccauccccugcagcgugugccuguccgggcucgacagccuggacaccuaccccucccuggagaccauccagaucacgaucagcuccuucaagugggaccucaccgccuucggccuggucgccgagugguuccuggccuacauccucuucacccgguucuucuacgugcuggggcuggcggccaucaugcagcucuucuucagcuacuucgccgugcacuucaucuccaacagcuggcugauguggcugaucaucaaccugguccagauggcccccaucuccgcgauggugcgcauguacaucuucuucgccagcuucuacuacguguggaagagcuacguccacgugguggacggcugcaaccucuccaccugcaugaugugcuacaagcggaaccgcgccacgcgggucgagugcaccaccaucgugaacgggguccgccggagcuucuacguguacgccaacggcggcaagggguucugcaagcugcacaacuggaacugcgugaacugcgacaccuucugcgccggcuccacguucaucagcgacgaggucgcgcgcgaccugucccuccaguucaagcggccgaucaaccccaccgaccagagcuccuacaucguggacagcgugaccgucaagaacggguccauccaccuguacuucgacaaggccggccagaagaccuacgagcgccacagccugucccacuucgugaaccucgacaaccugcgggccaacaacacgaaggggagccugcccaucaacgugaucgucuucgacggcaaguccaagugcgaggagagcuccgccaagagcgccuccguguacuacagccagcucaugugccagcccauccugcugcucgaccaggcgcugguguccgacgucggcgacagcgccgagguggccgugaagauguucgacgccuacgucaacaccuucagcuccaccuucaacgugccgauggagaagcugaagacccucguggccacggcggaggccgagcuggccaagaacgucagccuggacaacgugcucuccaccuucaucagcgccgcgcgccagggguucguggacuccgacgucgagaccaaggacgugguggagugccugaagcugagccaccaguccgacaucgaggucaccggcgacagcugcaacaacuacaugcucacguacaacaagguggagaacaugaccccccgggaccugggggccugcaucgacugcuccgcccgccacaucaacgcccagguggccaagagccacaacaucgcgcugaucuggaacgucaaggacuucaugucccucagcgagcagcugcggaagcagauccgcuccgccgccaagaagaacaaccugcccuucaagcucaccugcgccaccacgcgccagguggugaacgucgugaccaccaagaucgcccugaagggcgggugaggacuaguuauaagacugacuagcccgaugggccucccaacgggcccuccuccccuccuugcaccgagauuaauaaaaaaaaaaaaaaaaaaaaaaaaaaaaaaaaaaaaaaaaaaaaaaaaaaaaaaaaaaaaaaaaugcaucccccccccccccccccccccccccccccccaaaggcucuuuucagagccaccagaauu

SEQ ID NO: 21404 - RNA, 6058 nt, Artificial Sequence
  SARS-CoV-2__MT911823.1__non-structural protein 3 (NSP3) mRNA gc
aggagaaagcuuaccauggcccccaccaaggugaccuucggcgacgacacggucaucgaggugcagggguacaagagcgugaacaucaccuucgagcuggacgagcgcaucgacaagguccucaacgagaagugcuccgccuacaccguggagcugggcaccgaggugaacgaguucgcgugcgucguggccgacgccgugaucaagacgcugcagccggucagcgagcuccugaccccccuggggaucgaccucgacgagugguccauggccaccuacuaccuguucgacgaguucggcgaguucaagcuggccagccacauguacugcuccuucuacccccccgacgaggacgaggaggagggggacugcgaggaggaggaguucgagccgagcacccaguacgaguacggcacggaggacgacuaccagggcaagccccucgaguucggggcgaccuccgccgcccugcagcccgaggaggagcaggaggaggacuggcuggacgacgacagccagcagaccgugggccagcaggacggguccgaggacaaccagaccacgaccauccagaccaucguggagguccagccccagcucgagauggagcugaccccgguggugcagacgaucgaggucaacagcuucuccggcuaccugaagcucaccgacaacguguacaucaagaacgccgacaucguggaggaggcgaagaaggucaagcccaccgugguggucaacgccgccaacguguaccugaagcacgggggcggcguggccggggcccugaacaaggcgaccaacaacgccaugcaggucgagagcgacgacuacaucgccacgaacggcccccucaagguggggggcuccugcguccugagcggccacaaccuggccaagcacugccuccacgugguggggcccaacgucaacaagggcgaggacauccagcugcugaaguccgccuacgagaacuucaaccagcacgaggugcuccuggcgccgcugcucagcgccgggaucuucggcgccgaccccauccacucccugcgggugugcgucgacaccgugcgcaccaacguguaccuggccgucuucgacaagaaccucuacgacaagcuggugagcuccuuccuggagaugaagagcgagaagcagguggagcagaagaucgccgagauccccaaggaggaggucaagcccuucaucaccgagagcaagccguccguggagcagcggaagcaggacgacaagaagaucaaggcgugcguggaggaggucacgaccacccucgaggagaccaaguuccugacggagaaccugcuccuguacaucgacaucaacgggaaccugcaccccgacagcgccacccucguguccgacaucgacaucaccuuccugaagaaggacgcccccuacaucgugggcgacgucgugcaggagggcgugcugaccgccgucgugauccccacgaagaaggccgggggcaccaccgagaugcucgcgaaggcccugcgcaaggugccgaccgacaacuacaucacgaccuaccccgggcagggccugaacggguacaccgucgaggaggccaagaccgugcucaagaagugcaagagcgccuucuacauccugcccuccaucaucagcaacgagaagcaggagauccugggcaccguguccuggaaccuccgggagaugcuggcgcacgccgaggagacgcgcaagcugaugcccgucugcguggagaccaaggccaucgugagcaccauccagcggaaguacaagggcaucaagauccaggagggggucguggacuacggcgcccgcuucuacuucuacaccuccaagacgaccguggccagccugaucaacacccucaacgaccugaacgagacccuggucacgaugccgcucggguacgugacccacggccugaaccuggaggaggcggcccgguacaugcgcucccucaaggugcccgccaccgucagcguguccagccccgacgccgugaccgccuacaacggguaccugacguccagcuccaagacccccgaggagcacuucaucgagaccaucagccuggcgggcuccuacaaggacuggagcuacagcggccaguccacccagcucgggaucgaguuccugaagcggggcgacaagagcgucuacuacacguccaacccgaccaccuuccaccuggacggggaggugaucaccuucgacaaccucaagacgcugcugagccuccgcgaggugcggaccaucaaggucuucaccaccguggacaacaucaaccugcacacgcagguggucgacauguccaugaccuacggccagcaguucggccccaccuaccuggacggggccgacgugaccaagaucaagccccacaacagccacgagggcaagacguucuacgugcucccgaacgacgacacccugcgcgucgaggccuucgaguacuaccacaccaccgaccccuccuuccuggggcgguacaugagcgcccucaaccacacgaagaaguggaaguacccccaggugaacggccugaccuccaucaagugggccgacaacaacugcuaccuggcgaccgcccuccugacccugcagcagaucgagcucaaguucaaccccccggcccugcaggacgccuacuaccgcgcgcgggccggggaggccgccaacuucugcgcccugauccucgcguacugcaacaagacggugggcgagcugggcgacguccgcgagaccaugagcuaccuguuccagcacgccaaccucgacuccugcaagcgggugcugaacgucgugugcaagaccugcgggcagcagcagaccacccugaagggcguggaggccgucauguacauggggacgcucagcuacgagcaguucaagaagggcgugcagauccccugcaccugcgggaagcaggccaccaaguaccuggugcagcaggagucccccuucgucaugaugagcgcccccccggcgcaguacgagcugaagcacggcaccuucacgugcgccuccgaguacaccggcaacuaccagugcgggcacuacaagcacaucaccagcaaggagacccucuacugcaucgacggcgcccugcugacgaaguccagcgaguacaaggggcccaucaccgacguguucuacaaggagaacagcuacaccaccacgaucaagcccgugaccuacaagcucgacggcgucgugugcaccgagaucgaccccaagcuggacaacuacuacaagaaggacaacuccuacuucaccgagcagccgaucgaccuggugcccaaccagcccuaccccaacgccagcuucgacaacuucaaguucgucugcgacaacaucaaguucgccgacgaccucaaccagcugacgggguacaagaagccggcgucccgcgagcugaaggugaccuucuuccccgaccucaacggcgacguggucgccaucgacuacaagcacuacacccccagcuucaagaagggcgccaagcugcugcacaagcccaucguguggcacgugaacaacgccaccaacaaggcgacguacaagccgaacaccuggugcauccggugccucugguccaccaagcccgucgagaccagcaacuccuucgacgugcugaagagcgaggacgcccaggggauggacaaccuggccugcgaggaccucaagcccguguccgaggaggucguggagaaccccacgauccagaaggacgugcuggagugcaacgucaagaccaccgagguggugggcgacaucauccugaagccggccaacaacagccucaagaucaccgaggaggucgggcacacggaccugauggccgcguacguggacaacuccagccugaccaucaagaagcccaacgagcucucccgcgugcugggccugaagacccucgccacccacgggcuggccgccgucaacagcgugcccugggacacgaucgccaacuacgcgaagccguuccugaacaagguggucuccaccaccaccaacaucgugacgcgcugccucaaccgggugugcaccaacuacaugcccuacuucuucacccugcugcuccagcugugcaccuucacccgcagcacgaacucccggaucaaggccagcaugcccaccaccaucgccaagaacaccgucaaguccgugggcaaguucugccuggaggccagcuucaacuaccucaagagccccaacuucuccaagcugaucaacaucaucaucugguuccugcuccugagcgugugccugggcucccucaucuacagcacggccgcgcuggggguccugauguccaaccucggcaugccgagcuacugcaccggguaccgcgagggcuaccugaacuccaccaacgugaccaucgccacguacugcaccggcagcauccccugcuccgugugccugagcgggcucgacucccuggacaccuaccccagccuggagaccauccagaucacgaucuccagcuucaagugggaccucaccgccuucggccuggucgccgagugguuccuggccuacauccucuucacccgguucuucuacgugcuggggcuggcggccaucaugcagcucuucuucuccuacuucgccgugcacuucaucagcaacuccuggcugauguggcugaucaucaaccugguccagauggcccccaucagcgcgauggugcgcauguacaucuucuucgccuccuucuacuacguguggaagagcuacguccacgugguggacggcugcaacagcuccaccugcaugaugugcuacaagcggaaccgcgccacgcgggucgagugcaccaccaucgugaacgggguccgccggagcuucuacguguacgccaacggcggcaagggguucugcaagcuccacaacuggaacugcgugaacugcgacaccuucugcgccggcuccacguucaucagcgacgaggucgcgcgcgaccugucccugcaguucaagcggccgaucaaccccaccgaccagagcuccuacaucguggacagcgugaccgucaagaacggguccauccaccucuacuucgacaaggccggccagaagaccuacgagcgccacagccugucccacuucgugaaccuggacaaccuccgggccaacaacacgaaggggagccugcccaucaacgugaucgucuucgacggcaaguccaagugcgaggagagcuccgccaagagcgccuccguguacuacagccagcugaugugccagcccauccuccugcuggaccaggcgcucguguccgacgucggcgacagcgccgagguggccgugaagauguucgacgccuacgucaacaccuucagcuccaccuucaacgugccgauggagaagcugaagacccugguggccacggcggaggccgagcucgccaagaacgucagccuggacaacgugcuguccaccuucaucagcgccgcgcgccagggguucguggacuccgacgucgagaccaaggacgugguggagugccucaagcugagccaccaguccgacaucgaggucaccggcgacagcugcaacaacuacaugcugacguacaacaagguggagaacaugaccccccgggaccucggggccugcaucgacugcuccgcccgccacaucaacgcccagguggccaagagccacaacaucgcgcugaucuggaacgucaaggacuucaugucccugagcgagcagcuccggaagcagauccgcuccgccgccaagaagaacaaccugcccuucaagcugaccugcgccaccacgcgccagguggugaacgucgugaccaccaagaucgcccucaagggcgggugaggacuaguuauaagacugacuagcccgaugggccucccaacgggcccuccuccccuccuugcaccgagauuaauaaaaaaaaaaaaaaaaaaaaaaaaaaaaaaaaaaaaaaaaaaaaaaaaaaaaaaaaaaaaaaaaugcaucccccccccccccccccccccccccccccccaaaggcucuuuucagagccaccagaauu

SEQ ID NO: 21405 - RNA, 6058 nt, Artificial Sequence
  SARS-CoV-2__MT911825.1__non-structural protein 3 (NSP3) mRNA gc
aggagaaagcuuaccauggcccccaccaaggugaccuucggcgacgacacggucaucgaggugcagggguacaagagcgugaacaucaccuucgagcuggacgagcgcaucgacaagguccucaacgagaagugcuccgccuacaccguggagcugggcaccgaggugaacgaguucgcgugcgucguggccgacgccgugaucaagacgcugcagccggucagcgagcuccugaccccccuggggaucgaccucgacgagugguccauggccaccuacuaccuguucgacgagagcggcgaguucaagcuggccucccacauguacugcagcuucuacccccccgacgaggacgaggaggagggggacugcgaggaggaggaguucgagccguccacccaguacgaguacggcacggaggacgacuaccagggcaagccccucgaguucggggcgaccagcgccgcccugcagcccgaggaggagcaggaggaggacuggcuggacgacgacucccagcagaccgugggccagcaggacgggagcgaggacaaccagaccacgaccauccagaccaucguggagguccagccccagcucgagauggagcugaccccgguggugcagacgaucgaggucaacuccuucagcggcuaccugaagcucaccgacaacguguacaucaagaacgccgacaucguggaggaggcgaagaaggucaagcccaccgugguggucaacgccgccaacguguaccugaagcacgggggcggcguggccggggcccugaacaaggcgaccaacaacgccaugcaggucgaguccgacgacuacaucgccacgaacggcccccucaagguggggggcagcugcguccuguccggccacaaccuggccaagcacugccuccacgugguggggcccaacgucaacaagggcgaggacauccagcugcugaagagcgccuacgagaacuucaaccagcacgaggugcuccuggcgccgcugcucuccgccgggaucuucggcgccgaccccauccacagccugcgggugugcgucgacaccgugcgcaccaacguguaccuggccgucuucgacaagaaccucuacgacaagcugguguccagcuuccuggagaugaagagcgagaagcagguggagcagaagaucgccgagauccccaaggaggaggucaagcccuucaucaccgaguccaagccgagcguggagcagcggaagcaggacgacaagaagaucaaggcgugcguggaggaggucacgaccacccucgaggagaccaaguuccugacggagaaccugcuccuguacaucgacaucaaggggaaccugcaccccgacuccgccacccucgugagcgacaucgacaucaccuuccugaagaaggacgcccccuacaucgugggcgacgucgugcaggagggcgugcugaccgccgucgugauccccacgaagaaggccgggggcaccaccgagaugcucgcgaaggcccugcgcaaggugccgaccgacaacuacaucacgaccuaccccgggcagggccugaacggguacaccgucgaggaggccaagaccgugcucaagaagugcaaguccgccuucuacauccugcccagcaucaucuccaacgagaagcaggagauccugggcaccgugagcuggaaccuccgggagaugcuggcgcacgccgaggagacgcgcaagcugaugcccgucugcguggagaccaaggccaucguguccaccauccagcggaaguacaagggcaucaagauccaggagggggucguggacuacggcgcccgcuucuacuucuacaccagcaagacgaccguggccucccugaucaacacccucaacgaccugaacgagacccuggucacgaugccgcucggguacgugacccacggccugaaccuggaggaggcggcccgguacaugcgcagccucaaggugcccgccaccgucuccgugagcucccccgacgccgugaccgccuacaacggguaccugacgagcuccagcaagacccccgaggagcacuucaucgagaccaucucccuggcgggcagcuacaaggacuggagcuacuccggccagagcacccagcucgggaucgaguuccugaagcggggcgacaaguccgucuacuacacgagcaacccgaccaccuuccaccuggacggggaggugaucaccuucgacaaccucaagacgcugcugucccuccgcgaggugcggaccaucaaggucuucaccaccguggacaacaucaaccugcacacgcagguggucgacaugagcaugaccuacggccagcaguucggccccaccuaccuggacggggccgacgugaccaagaucaagccccacaacucccacgagggcaagacguucuacgugcucccgaacgacgacacccugcgcgucgaggccuucgaguacuaccacaccaccgaccccagcuuccuggggcgguacauguccgcccucaaccacacgaagaaguggaaguacccccaggugaacggccugaccagcaucaagugggccgacaacaacugcuaccuggcgaccgcccuccugacccugcagcagaucgagcucaaguucaaccccccggcccugcaggacgccuacuaccgcgcgcgggccggggaggccgccaacuucugcgcccugauccucgcguacugcaacaagacggugggcgagcugggcgacguccgcgagaccauguccuaccuguuccagcacgccaaccucgacagcugcaagcgggugcugaacgucgugugcaagaccugcgggcagcagcagaccacccugaagggcguggaggccgucauguacauggggacgcucuccuacgagcaguucaagaagggcgugcagauccccugcaccugcgggaagcaggccaccaaguaccuggugcagcaggagagccccuucgucaugauguccgcccccccggcgcaguacgagcugaagcacggcaccuucacgugcgccagcgaguacaccggcaacuaccagugcgggcacuacaagcacaucaccuccaaggagacccucuacugcaucgacggcgcccugcugacgaagagcagcgaguacaaggggcccaucaccgacguguucuacaaggagaacuccuacaccaccacgaucaagcccgugaccuacaagcucgacggcgucgugugcaccgagaucgaccccaagcuggacaacuacuacaagaaggacaacagcuacuucaccgagcagccgaucgaccuggugcccaaccagcccuaccccaacgccuccuucgacaacuucaaguucgucugcgacaacaucaaguucgccgacgaccucaaccagcugacgggguacaagaagccggcgagccgcgagcugaaggugaccuucuuccccgaccucaacggcgacguggucgccaucgacuacaagcacuacacccccuccuucaagaagggcgccaagcugcugcacaagcccaucguguggcacgugaacaacgccaccaacaaggcgacguacaagccgaacaccuggugcauccggugccucuggagcaccaagcccgucgagaccuccaacagcuucgacgugcugaaguccgaggacgcccaggggauggacaaccuggccugcgaggaccucaagcccgugagcgaggaggucguggagaaccccacgauccagaaggacgugcuggagugcaacgucaagaccaccgagguggugggcgacaucauccugaagccggccaacaacucccucaagaucaccgaggaggucgggcacacggaccugauggccgcguacguggacaacagcucccugaccaucaagaagcccaacgagcucagccgcgugcugggccugaagacccucgccacccacgggcuggccgccgucaacuccgugcccugggacacgaucgccaacuacgcgaagccguuccugaacaagguggucagcaccaccaccaacaucgugacgcgcugccucaaccgggugugcaccaacuacaugcccuacuucuucacccugcugcuccagcugugcaccuucacccgcuccacgaacagccggaucaaggccuccaugcccaccaccaucgccaagaacaccgucaagagcgugggcaaguucugccuggaggccagcuucaacuaccucaagucccccaacuucagcaagcugaucaacaucaucaucugguuccugcuccuguccgugugccugggcagccucaucuacuccacggccgcgcuggggguccugaugagcaaccucggcaugccguccuacugcaccggguaccgcgagggcuaccugaacagcaccaacgugaccaucgccacguacugcaccggcuccauccccugcagcgugugccuguccgggcucgacagccuggacaccuaccccucccuggagaccauccagaucacgaucagcuccuucaagugggaccucaccgccuucggccuggucgccgagugguuccuggccuacauccucuucacccgguucuucuacgugcuggggcuggcggccaucaugcagcucuucuucagcuacuucgccgugcacuucaucuccaacagcuggcugauguggcugaucaucaaccugguccagauggcccccaucuccgcgauggugcgcauguacaucuucuucgccagcuucuacuacguguggaagagcuacguccacgugguggacggcugcaacuccagcaccugcaugaugugcuacaagcggaaccgcgccacgcgggucgagugcaccaccaucgugaacgggguccgccgguccuucuacguguacgccaacggcggcaagggguucugcaagcuccacaacuggaacugcgugaacugcgacaccuucugcgccggcagcacguucaucuccgacgaggucgcgcgcgaccugagccugcaguucaagcggccgaucaaccccaccgaccaguccagcuacaucguggacuccgugaccgucaagaacgggagcauccaccucuacuucgacaaggccggccagaagaccuacgagcgccacucccugagccacuucgugaaccuggacaaccuccgggccaacaacacgaaggggucccugcccaucaacgugaucgucuucgacggcaagagcaagugcgaggaguccagcgccaaguccgccagcguguacuacucccagcugaugugccagcccauccuccugcuggaccaggcgcucgugagcgacgucggcgacagcgccgagguggccgugaagauguucgacgccuacgucaacaccuucuccagcaccuucaacgugccgauggagaagcugaagacccugguggccacggcggaggccgagcucgccaagaacgucucccuggacaacgugcugagcaccuucaucuccgccgcgcgccagggguucguggacagcgacgucgagaccaaggacgugguggagugccucaagcugucccaccagagcgacaucgaggucaccggcgacuccugcaacaacuacaugcugacguacaacaagguggagaacaugaccccccgggaccucggggccugcaucgacugcagcgcccgccacaucaacgcccagguggccaagucccacaacaucgcgcugaucuggaacgucaaggacuucaugagccuguccgagcagcuccggaagcagauccgcagcgccgccaagaagaacaaccugcccuucaagcugaccugcgccaccacgcgccagguggugaacgucgugaccaccaagaucgcccucaagggcgggugaggacuaguuauaagacugacuagcccgaugggccucccaacgggcccuccuccccuccuugcaccgagauuaauaaaaaaaaaaaaaaaaaaaaaaaaaaaaaaaaaaaaaaaaaaaaaaaaaaaaaaaaaaaaaaaaugcaucccccccccccccccccccccccccccccccaaaggcucuuuucagagccaccagaauu

SEQ ID NO: 21406 - RNA, 6058 nt, Artificial Sequence
  SARS-CoV-2__MT483878.1__non-structural protein 3 (NSP3) mRNA gc
aggagaaagcuuaccauggcccccaccaaggugaccuucggcgacgacacggucaucgaggugcagggguacaagagcgugaacaucaccuucgagcuggacgagcgcaucgacaagguccucaacgagaagugcuccgccuacaccguggagcugggcaccgaggugaacgaguucgcgugcgucguggccgacgccgugaucaagacgcugcagccggucagcgagcuccugaccccccuggggaucgaccucgacgagugguccauggccaccuacuaccuguucgacgagagcggcgaguucaagcuggccucccacauguacugcagcuucuacccccccgacgaggacgaggaggagggggacugcgaggaggaggaguucgagccguccacccaguacgaguacggcacggaggacgacuaccagggcaagccccucgaguucggggcgaccagcgccgcccugcagcccgaggaggagcaggaggaggacuggcuggacgacgacucccggcagaccgugggccagcaggacgggagcgaggacaaccagaccacgaccauccagaccaucguggagguccagccccagcucgagauggagcugaccccgguggugcagacgaucgaggucaacuccuucagcggcuaccugaagcucaccgacaacguguacaucaagaacgccgacaucguggaggaggcgaagaaggucaagcccaccgugguggucaacgccgccaacguguaccugaagcacgggggcggcguggccggggcccugaacaaggcgaccaacaacgccaugcaggucgaguccgacgacuacaucgccacgaacggcccccucaagguggggggcagcugcguccuguccggccacaaccuggccaagcacugccuccacgugguggggcccaacgucaacaagggcgaggacauccagcugcugaagagcgccuacgagaacuucaaccagcacgaggugcuccuggcgccgcugcucuccgccgggaucuucggcgccgaccccauccacagccugcgcgugugcgucgacaccgugcggaccaacguguaccuggccgucuucgacaagaaccucuacgacaagcugguguccagcuuccuggagaugaagagcgagaagcagguggagcagaagaucgccgagauccccaaggaggaggucaagcccuucaucaccgaguccaagccgagcguggagcagcgcaagcaggacgacaagaagaucaaggcgugcguggaggaggucacgaccacccucgaggagaccaaguuccugacggagaaccugcuccuguacaucgacaucaacgggaaccugcaccccgacuccgccacccucgugagcgacaucgacaucaccuuccugaagaaggacgcccccuacaucgugggcgacgucgugcaggagggcgugcugaccgccgucgugauccccacgaagaaggccgggggcaccaccgagaugcucgcgaaggcccugcggaaggugccgaccgacaacuacaucacgaccuaccccgggcagggccugaacggguacaccgucgaggaggccaagaccgugcucaagaagugcaaguccgccuucuacauccugcccagcaucaucuccaacgagaagcaggagauccugggcaccgugagcuggaaccuccgcgagaugcuggcgcacgccgaggagacgcggaagcugaugcccgucugcguggagaccaaggccaucguguccaccauccagcgcaaguacaagggcaucaagauccaggagggggucguggacuacggcgcccgguucuacuucuacaccagcaagacgaccguggccucccugaucaacacccucaacgaccugaacgagacccuggucacgaugccgcucggguacgugacccacggccugaaccuggaggaggcggcccgcuacaugcggagccucaaggugcccgccaccgucuccgugagcucccccgacgccgugaccgccuacaacggguaccugacgagcuccagcaagacccccgaggagcacuucaucgagaccaucucccuggcgggcagcuacaaggacuggagcuacuccggccagagcacccagcucgggaucgaguuccugaagcgcggcgacaaguccgucuacuacacgagcaacccgaccaccuuccaccuggacggggaggugaucaccuucgacaaccucaagacgcugcugucccuccgggaggugcgcaccaucaaggucuucaccaccguggacaacaucaaccugcacacgcagguggucgacaugagcaugaccuacggccagcaguucggccccaccuaccuggacggggccgacgugaccaagaucaagccccacaacucccacgagggcaagacguucuacgugcucccgaacgacgacacccugcgggucgaggccuucgaguacuaccacaccaccgaccccagcuuccuggggcgcuacauguccgcccucaaccacacgaagaaguggaaguacccccaggugaacggccugaccagcaucaagugggccgacaacaacugcuaccuggcgaccgcccuccugacccugcagcagaucgagcucaaguucaaccccccggcccugcaggacgccuacuaccgggcgcgcgccggggaggccgccaacuucugcgcccugauccucgcguacugcaacaagacggugggcgagcugggcgacguccgggagaccauguccuaccuguuccagcacgccaaccucgacagcugcaagcgcgugcugaacgucgugugcaagaccugcgggcagcagcagaccacccugaagggcguggaggccgucauguacauggggacgcucuccuacgagcaguucaagaagggcgugcagauccccugcaccugcgggaagcaggccaccaaguaccuggugcagcaggagagccccuucgucaugauguccgcccccccggcgcaguacgagcugaagcacggcaccuucacgugcgccagcgaguacaccggcaacuaccagugcgggcacuacaagcacaucaccuccaaggagacccucuacugcaucgacggcgcccugcugacgaagagcagcgaguacaaggggcccaucaccgacguguucuacaaggagaacuccuacaccaccacgaucaagcccgugaccuacaagcucgacggcgucgugugcaccgagaucgaccccaagcuggacaacuacuacaagaaggacaacagcuacuucaccgagcagccgaucgaccuggugcccaaccagcccuaccccaacgccuccuucgacaacuucaaguucgucugcgacaacaucaaguucgccgacgaccucaaccagcugacgggguacaagaagccggcgagccgggagcugaaggugaccuucuuccccgaccucaacggcgacguggucgccaucgacuacaagcacuacacccccuccuucaagaagggcgccaagcugcugcacaagcccaucguguggcacgugaacaacgccaccaacaaggcgacguacaagccgaacaccuggugcauccgcugccucuggagcaccaagcccgucgagaccuccaacagcuucgacgugcugaaguccgaggacgcccaggggauggacaaccuggccugcgaggaccucaagcccgugagcgaggaggucguggagaaccccacgauccagaaggacgugcuggagugcaacgucaagaccaccgagguggugggcgacaucauccugaagccggccaacaacucccucaagaucaccgaggaggucgggcacacggaccugauggccgcguacguggacaacagcucccugaccaucaagaagcccaacgagcucagccgcgugcugggccugaagacccucgccacccacgggcuggccgccgucaacuccgugcccugggacacgaucgccaacuacgcgaagccguuccugaacaagguggucagcaccaccaccaacaucgugacgcggugccucaaccgcgugugcaccaacuacaugcccuacuucuucacccugcugcuccagcugugcaccuucacccgguccacgaacagccgcaucaaggccuccaugcccaccaccaucgccaagaacaccgucaagagcgugggcaaguucugccuggaggccagcuucaacuaccucaagucccccaacuucagcaagcugaucaacaucaucaucugguuccugcuccuguccgugugccugggcagccucaucuacuccacggccgcgcuggggguccugaugagcaaccucggcaugccguccuacugcaccggguaccgggagggcuaccugaacagcaccaacgugaccaucgccacguacugcaccggcuccauccccugcagcgugugccuguccgggcucgacagccuggacaccuaccccucccuggagaccauccagaucacgaucagcuccuucaagugggaccucaccgccuucggccuggucgccgagugguuccuggccuacauccucuucacccgcuucuucuacgugcuggggcuggcggccaucaugcagcucuucuucagcuacuucgccgugcacuucaucuccaacagcuggcugauguggcugaucaucaaccugguccagauggcccccaucuccgcgauggugcggauguacaucuucuucgccagcuucuacuacguguggaagagcuacguccacgugguggacggcugcaacuccagcaccugcaugaugugcuacaagcgcaaccgggccacgcgcgucgagugcaccaccaucgugaacgggguccggcgcuccuucuacguguacgccaacggcggcaagggguucugcaagcuccacaacuggaacugcgugaacugcgacaccuucugcgccggcagcacguucaucuccgacgaggucgcgcgggaccugagccugcaguucaagcgcccgaucaaccccaccgaccaguccagcuacaucguggacuccgugaccgucaagaacgggagcauccaccucuacuucgacaaggccggccagaagaccuacgagcggcacucccugagccacuucgugaaccuggacaaccuccgcgccaacaacacgaaggggucccugcccaucaacgugaucgucuucgacggcaagagcaagugcgaggaguccagcgccaaguccgccagcguguacuacucccagcugaugugccagcccauccuccugcuggaccaggcgcucgugagcgacgucggcgacagcgccgagguggccgugaagauguucgacgccuacgucaacaccuucuccagcaccuucaacgugccgauggagaagcugaagacccugguggccacggcggaggccgagcucgccaagaacgucucccuggacaacgugcugagcaccuucaucuccgccgcgcggcagggguucguggacagcgacgucgagaccaaggacgugguggagugccucaagcugucccaccagagcgacaucgaggucaccggcgacuccugcaacaacuacaugcugacguacaacaagguggagaacaugaccccccgcgaccucggggccugcaucgacugcagcgcccggcacaucaacgcccagguggccaagucccacaacaucgcgcugaucuggaacgucaaggacuucaugagccuguccgagcagcuccgcaagcagauccgcagcgccgccaagaagaacaaccugcccuucaagcugaccugcgccaccacgcggcagguggugaacgucgugaccaccaagaucgcccucaagggcgggugaggacuaguuauaagacugacuagcccgaugggccucccaacgggcccuccuccccuccuugcaccgagauuaauaaaaaaaaaaaaaaaaaaaaaaaaaaaaaaaaaaaaaaaaaaaaaaaaaaaaaaaaaaaaaaaaugcaucccccccccccccccccccccccccccccccaaaggcucuuuucagagccaccagaauu

SEQ ID NO: 21407 - RNA, 6058 nt, Artificial Sequence
  SARS-CoV-2__MT483879.1__non-structural protein 3 (NSP3) mRNA gc
aggagaaagcuuaccauggcccccaccaaggugaccuucggcgacgacacggucaucgaggugcagggguacaagagcgugaacaucaccuucgagcuggacgagcgcaucgacaagguccucaacgagaagugcuccgccuacaccguggagcugggcaccgaggugaacgaguucgcgugcgucguggccgacgccgugaucaagacgcugcagccggucagcgagcuccugaccccccuggggaucgaccucgacgagugguccauggccaccuacuaccuguucgacgagagcggcgaguucaagcuggccucccacauguacugcagcuucuacccccccgacgaggacgaggaggagggggacugcgaggaggaggaguucgagccguccacccaguacgaguacggcacggaggacgacuaccagggcaagccccucgaguucggggcgaccagcgccgcccugcagcccgaggaggagcaggaggaggacuggcuggacgacgacucccagcagaccgugggccagcaggacgggagcgaggacaaccagaccacgaccauccagaccaucguggagguccagccccagcucgagauggagcugaccccgguggugcagacgaucgaggucaacuccuucagcggcuaccugaagcucaccgacaacguguacaucaagaacgccgacaucguggaggaggcgaagaaggucaagcccaccgugguggucaacgccgccaacguguaccugaagcacgggggcggcguggccggggcccugaacaaggcgaccaacaacgccaugcaggucgaguccgacgacuacaucgccacgaacggcccccucaagguggggggcagcugcguccuguccggccacaaccuggccaagcacugccuccacgugguggggcccaacgucaacaagggcgaggacauccagcugcugaagagcgccuacgagaacuucaaccagcacgaggugcuccuggcgccgcugcucuccgccgggaucuucggcgccgaccccauccacagccugcgggugugcgucgacaccgugcgcaccaacguguaccuggccgucuucgacaagaaccucuacgacaagcugguguccagcuuccuggagaugaagagcgagaagcagguggagcagaagaucgccgagauccccaaggaggaggucaagcccuucaucaccgaguccaagccgagcguggagcagcggaagcaggacgacaagaagaucaaggcgugcguggaggaggucacgaccacccucgaggagaccaaguuccugacggagaaccugcuccuguacaucgacaucaacgggaaccugcaccccgacuccgccacccucgugagcgacaucgacaucaccuuccugaagaaggacgcccccuacaucgugggcgacgucgugcaggagggcgugcugaccgccgucgugauccccacgaagaaggccgggggcaccaccgagaugcucgcgaaggcccugcgcaaggugccgaccgacaacuacaucacgaccuaccccgggcagggccugaacggguacaccgucgaggaggccaagaccgugcucaagaagugcaaguccgccuucuacauccugcccagcaucaucuccaacgagaagcaggagauccugggcaccgugagcuggaaccuccgggagaugcuggcgcacgccgaggagacgcgcaagcugaugcccgucugcguggagaccaaggccaucguguccaccauccagcggaaguacaagggcaucaagauccaggagggggucguggacuacggcgcccgcuucuacuucuacaccagcaagacgaccguggccucccugaucaacacccucaacgaccugaacgagacccuggucacgaugccgcucggguacgugacccacggccugaaccuggaggaggcggcccgguacaugcgcagccucaaggugcccgccaccgucuccgugagcucccccgacgccgugaccgccuacaacggguaccugacgagcuccagcaagacccccgaggagcacuucaucgagaccaucucccuggcgggcagcuacaaggacuggagcuacuccggccagagcacccagcucgggaucgaguuccugaagcggggcgacaaguccgucuacuacacgagcaacccgaccaccuuccaccuggacggggaggugaucaccuucgacaaccucaagacgcugcugucccuccgcgaggugcggaccaucaaggucuucaccaccguggacaacaucaaccugcacacgcagguggucgacaugagcaugaccuacggccagcaguucggccccaccuaccuggacggggccgacgugaccaagaucaagccccacaacucccacgagggcaagacguucuacgugcucccgaacgacgacacccugcgcgucgaggccuucgaguacuaccacaccaccgaccccagcuuccuggggcgguacauguccgcccucaaccacacgaagaaguggaaguacccccaggugaacggccugaccagcaucaagugggccgacaacaacugcuaccuggcgaccgcccuccugacccugcagcagaucgagcucaaguucaaccccccggcccugcaggacgccuacuaccgcgcgcgggccggggaggccgccaacuucugcgcccugauccucgcguacugcaacaagacggugggcgagcugggcgacguccgcgagaccauguccuaccuguuccagcacgccaaccucgacagcugcaagcgggugcugaacgucgugugcaagaccugcgggcagcagcagaccacccugaagggcguggaggccgucauguacauggggacgcucuccuacgagcaguucaagaagggcgugcagauccccugcaccugcgggaagcaggccaccaaguaccuggugcagcaggagagccccuucgucaugauguccgcccccccggcgcaguacgagcugaagcacggcaccuucacgugcgccagcgaguacaccggcaacuaccagugcgggcacuacaagcacaucaccuccaaggagacccucuacugcaucgacggcgcccugcugacgaagagcagcgaguacaaggggcccaucaccgacguguucuacaaggagaacuccuacaccaccacgaucaagcccgugaccuacaagcucgacggcgucgugugcaccgagaucgaccccaagcuggacaacuacuacaagaaggacaacagcuacuucaccgagcagccgaucgaccuggugcccaaccagcccuaccccaacgccuccuucgacaacuucaaguucgucugcgacaacaucaaguucgccgacgaccucaaccagcugacgggguacaagaagccggcgagccgcgagcugaaggugaccuucuuccccgaccucaacggcgacguggucgccaucgacuacaagcacuacacccccuccuucaagaagggcgccaagcugcugcacaagcccaucguguggcacgugaacaacgccaccaacaaggcgacguacaagccgaacaccuggugcauccggugccucuggagcaccaagcccgucgagaccuccaacagcuucgacgugcugaaguccgaggacgcccaggggauggacaaccuggccugcgaggaccucaagcccgugagcgaggaggucguggagaaccccacgauccagaaggacgugcuggagugcaacgucaagaccaccgagguggugggcgacaucauccugaagccggccaacaacucccucaagaucaccgaggaggucgggcacacggaccugauggccgcguacguggacaacagcucccugaccaucaagaagcccaacgagcucagccgcgugcugggccugaagacccucgccacccacgggcuggccgccgucaacuccgugcccugggacacgaucgccagcuacgcgaagccguuccugaacaagguggucuccaccaccaccaacaucgugacgcgcugccucaaccgggugugcaccaacuacaugcccuacuucuucacccugcugcuccagcugugcaccuucacccgcagcacgaacucccggaucaaggccagcaugcccaccaccaucgccaagaacaccgucaagagcgugggcaaguucugccuggaggccuccuucaacuaccucaagagccccaacuucuccaagcugaucaacaucaucaucugguuccugcuccugagcgugugccugggcucccucaucuacagcacggccgcgcuggggguccugauguccaaccucggcaugccgagcuacugcaccggguaccgcgagggcuaccugaacuccaccaacgugaccaucgccacguacugcaccggcagcauccccugcuccgugugccugagcgggcucgacucccuggacaccuaccccagccuggagaccauccagaucacgaucuccagcuucaagugggaccucaccgccuucggccuggucgccgagugguuccuggccuacauccucuucacccgguucuucuacgugcuggggcuggcggccaucaugcagcucuucuucuccuacuucgccgugcacuucaucagcaacuccuggcugauguggcugaucaucaaccugguccagauggcccccaucagcgcgauggugcgcauguacaucuucuucgccagcuucuacuacguguggaaguccuacguccacgugguggacggcugcaacagcuccaccugcaugaugugcuacaagcggaaccgcgccacgcgggucgagugcaccaccaucgugaacgggguccgccggagcuucuacguguacgccaacggcggcaagggguucugcaagcuccacaacuggaacugcgugaacugcgacaccuucugcgccggcuccacguucaucagcgacgaggucgcgcgcgaccugucccugcaguucaagcggccgaucaaccccaccgaccagagcuccuacaucguggacagcgugaccgucaagaacggguccauccaccucuacuucgacaaggccggccagaagaccuacgagcgccacagccugucccacuucgugaaccuggacaaccuccgggccaacaacacgaaggggagccugcccaucaacgugaucgucuucgacggcaaguccaagugcgaggagagcuccgccaagagcgccuccguguacuacagccagcugaugugccagcccauccuccugcuggaccaggcgcucgugagcgacgucggcgacuccgccgagguggccgugaagauguucgacgccuacgucaacaccuucagcuccaccuucaacgugccgauggagaagcugaagacccugguggccacggcggaggccgagcucgccaagaacgucagccuggacaacgugcuguccaccuucaucagcgccgcgcgccagggguucguggacuccgacgucgagaccaaggacgugguggagugccucaagcugagccaccaguccgacaucgaggucaccggcgacagcugcaacaacuacaugcugacguacaacaagguggagaacaugaccccccgggaccucggggccugcaucgacugcuccgcccgccacaucaacgcccagguggccaagagccacaacaucgcgcugaucuggaacgucaaggacuucaugucccugagcgagcagcuccggaagcagauccgcuccgccgccaagaagaacaaccugcccuucaagcugaccugcgccaccacgcgccagguggugaacgucgugaccaccaagaucgcccucaagggcgggugaggacuaguuauaagacugacuagcccgaugggccucccaacgggcccuccuccccuccuugcaccgagauuaauaaaaaaaaaaaaaaaaaaaaaaaaaaaaaaaaaaaaaaaaaaaaaaaaaaaaaaaaaaaaaaaaugcaucccccccccccccccccccccccccccccccaaaggcucuuuucagagccaccagaauu

SEQ ID NO: 21408 - RNA, 6058 nt, Artificial Sequence
  SARS-CoV-2__MT893659.1__non-structural protein 3 (NSP3) mRNA gc
aggagaaagcuuaccauggcccccaccaaggugaccuucggcgacgacacggucaucgaggugcagggguacaagagcgugaacaucaccuucgagcuggacgagcgcaucgacaagguccucaacgagaagugcuccgccuacaccguggagcugggcaccgaggugaacgaguucgcgugcgucguggccgacgccgugaucaagacgcugcagccggucagcgagcuccugaccccccuggggaucgaccucgacgagugguccauggccaccuacuaccuguucgacgagagcggcgaguucaagcuggccucccacauguacugcagcuucuacccccccgacgaggacgaggaggagggggacugcgaggaggaggaguucgagccguccacccaguacgaguacggcacggaggacgacuaccagggcaagccccucgaguucggggcgaccagcgccgcccugcagcccgaggaggagcaggaggaggacuggcuggacgacgacucccagcagaccgugggccagcaggacagcuccgaggacaaccagaccacgaccauccagaccaucguggagguccagccccagcucgagauggagcugaccccgguggugcagacgaucgaggucaacagcuucuccggguaccugaagcucaccgacaacguguacaucaagaacgccgacaucguggaggaggcgaagaaggucaagcccaccgugguggucaacgccgccaacguguaccugaagcacggcgggggcguggccggcgcccugaacaaggcgaccaacaacgccaugcaggucgagagcgacgacuacaucgccacgaacgggccccucaaggugggcggguccugcguccugagcggccacaaccuggccaagcacugccuccacguggugggccccaacgucaacaagggggaggacauccagcugcugaaguccgccuacgagaacuucaaccagcacgaggugcuccuggcgccgcugcucagcgccggcaucuucggggccgaccccauccacucccugcgggugugcgucgacaccgugcgcaccaacguguaccuggccgucuucgacaagaaccucuacgacaagcuggugagcagcuuccuggagaugaaguccgagaagcagguggagcagaagaucgccgagauccccaaggaggaggucaagcccuucaucaccgagagcaagccguccguggagcagcggaagcaggacgacaagaagaucaaggcgugcguggaggaggucacgaccacccucgaggagaccaaguuccugacggagaaccugcuccuguacaucgacaucaacggcaaccugcaccccgacagcgccacccucguguccgacaucgacaucaccuuccugaagaaggacgcccccuacaucgugggggacgucgugcaggagggcgugcugaccgccgucgugauccccacgaagaaggccggcgggaccaccgagaugcucgcgaaggcccugcgcaaggugccgaccgacaacuacaucacgaccuaccccggccaggggcugaacggcuacaccgucgaggaggccaagaccgugcucaagaagugcaagagcgccuucuacauccugcccuccaucaucagcaacgagaagcaggagauccuggggaccguguccuggaaccuccgggagaugcuggcgcacgccgaggagacgcgcaagcugaugcccgucugcguggagaccaaggccaucgugagcaccauccagcggaaguacaagggcaucaagauccaggagggcgucguggacuacggggcccgcuucuacuucuacaccuccaagacgaccguggccagccugaucaacacccucaacgaccugaacgagacccuggucacgaugccgcucggcuacgugacccacgggcugaaccuggaggaggcggcccgguacaugcgcucccucaaggugcccgccaccgucagcguguccagccccgacgccgugaccgccuacaacggcuaccugacguccagcuccaagacccccgaggagcacuucaucgagaccaucagccuggcggggagcuacaaggacugguccuacagcggccaguccacccagcucggcaucgaguuccugaagcggggggacaagagcgucuacuacacguccaacccgaccaccuuccaccuggacggcgaggugaucaccuucgacaaccucaagacgcugcugagccuccgcgaggugcggaccaucaaggucuucaccaccguggacaacaucaaccugcacacgcagguggucgacauguccaugaccuacgggcagcaguucggccccaccuaccuggacggcgccgacgugaccaagaucaagccccacaacagccacgaggggaagacguucuacgugcucccgaacgacgacacccugcgcgucgaggccuucgaguacuaccacaccaccgaccccuccuuccugggccgguacaugagcgcccucaaccacacgaagaaguggaaguacccccaggugaacgggcugaccuccaucaagugggccgacaacaacugcuaccuggcgaccgcccuccugacccugcagcagaucgagcucaaguucaaccccccggcccugcaggacgccuacuaccgcgcgcgggccggcgaggccgccaacuucugcgcccugauccucgcguacugcaacaagacggugggggagcugggcgacguccgcgagaccaugagcuaccuguuccagcacgccaaccucgacuccugcaagcgggugcugaacgucgugugcaagaccugcggccagcagcagaccacccugaaggggguggaggccgucauguacaugggcacgcucagcuacgagcaguucaagaagggggugcagauccccugcaccugcggcaagcaggccaccaaguaccuggugcagcaggagucccccuucgucaugaugagcgcccccccggcgcaguacgagcugaagcacgggaccuucacgugcgccuccgaguacaccggcaacuaccagugcggccacuacaagcacaucaccagcaaggagacccucuacugcaucgacggggcccugcugacgaagagcuccgaguacaagggccccaucaccgacguguucuacaaggagaacagcuacaccaccacgaucaagcccgugaccuacaagcucgacggggucgugugcaccgagaucgaccccaagcuggacaacuacuacaagaaggacaacuccuacuucaccgagcagccgaucgaccuggugcccaaccagcccuaccccaacgccagcuucgacaacuucaaguucgucugcgacaacaucaaguucgccgacgaccucaaccagcugacgggcuacaagaagccggcgucccgcgagcugaaggugaccuucuuccccgaccucaacggggacguggucgccaucgacuacaagcacuacacccccagcuucaagaagggcgccaagcugcugcacaagcccaucguguggcacgugaacaacgccaccaacaaggcgacguacaagccgaacaccuggugcauccggugccucugguccaccaagcccgucgagaccagcaacuccuucgacgugcugaagagcgaggacgcccagggcauggacaaccuggccugcgaggaccucaagcccguguccgaggaggucguggagaaccccacgauccagaaggacgugcuggagugcaacgucaagaccaccgagguggugggggacaucauccugaagccggccaacaacagccucaagaucaccgaggaggucggccacacggaccugauggccgcguacguggacaacuccagccugaccaucaagaagcccaacgagcucucccgcgugcuggggcugaagacccucgccacccacggccuggccgccgucaacagcgugcccugggacacgaucgccaacuacgcgaagccguuccugaacaagguggucuccaccaccaccaacaucgugacgcgcugccucaaccgggugugcaccaacuacaugcccuacuucuucacccugcugcuccagcugugcaccuucacccgcagcacgaacucccggaucaaggccagcaugcccaccaccaucgccaagaacaccgucaagagcguggggaaguucugccuggaggccuccuucaacuaccucaagagccccaacuucuccaagcugaucaacaucaucaucugguuccugcuccugagcgugugccugggcucccucaucuacagcacggccgcgcugggcguccugauguccaaccucgggaugccgagcuacugcaccggcuaccgcgagggguaccugaacuccaccaacgugaccaucgccacguacugcaccggcagcauccccugcuccgugugccugagcggccucgacucccuggacaccuaccccagccuggagaccauccagaucacgaucuccagcuucaagugggaccucaccgccuucgggcuggucgccgagugguuccuggccuacauccucuucacccgguucuucuacgugcugggccuggcggccaucaugcagcucuucuucuccuacuucgccgugcacuucaucagcaacuccuggcugauguggcugaucaucaaccugguccagauggcccccaucagcgcgauggugcgcauguacaucuucuucgccagcuucuacuacguguggaaguccuacguccacgugguggacgggugcaacagcuccaccugcaugaugugcuacaagcggaaccgcgccacgcgggucgagugcaccaccaucgugaacggcguccgccggagcuucuacguguacgccaacgggggcaagggcuucugcaagcuccacaacuggaacugcgugaacugcgacaccuucugcgccggguccacguucaucagcgacgaggucgcgcgcgaccugucccugcaguucaagcggccgaucaaccccaccgaccagagcuccuacaucguggacagcgugaccgucaagaacggcuccauccaccucuacuucgacaaggccgggcagaagaccuacgagcgccacagccugucccacuucgugaaccuggacaaccuccgggccaacaacacgaagggcagccugcccaucaacgugaucgucuucgacgggaaguccaagugcgaggagagcuccgccaagagcgccuccguguacuacagccagcugaugugccagcccauccuccugcuggaccaggcgcucgugagcgacgucggcgacuccgccgagguggccgugaagauguucgacgccuacgucaacaccuucagcuccaccuucaacgugccgauggagaagcugaagacccugguggccacggcggaggccgagcucgccaagaacgucagccuggacaacgugcuguccaccuucaucagcgccgcgcgccagggcuucguggacuccgacgucgagaccaaggacgugguggagugccucaagcugagccaccaguccgacaucgaggucaccggggacagcugcaacaacuacaugcugacguacaacaagguggagaacaugaccccccgggaccucggcgccugcaucgacugcuccgcccgccacaucaacgcccagguggccaagagccacaacaucgcgcugaucuggaacgucaaggacuucaugucccugagcgagcagcuccggaagcagauccgcuccgccgccaagaagaacaaccugcccuucaagcugaccugcgccaccacgcgccagguggugaacgucgugaccaccaagaucgcccucaaggggggcugaggacuaguuauaagacugacuagcccgaugggccucccaacgggcccuccuccccuccuugcaccgagauuaauaaaaaaaaaaaaaaaaaaaaaaaaaaaaaaaaaaaaaaaaaaaaaaaaaaaaaaaaaaaaaaaaugcaucccccccccccccccccccccccccccccccaaaggcucuuuucagagccaccagaauu

SEQ ID NO: 21409 - RNA, 6058 nt, Artificial Sequence
  SARS-CoV-2__MT893667.1__non-structural protein 3 (NSP3) mRNA gc
aggagaaagcuuaccauggcccccaccaaggugaccuucggcgacgacacggucaucgaggugcagggguacaagagcgugaacaucaccuucgagcuggacgagcgcaucgacaagguccucaacgagaagugcuccgccuacaccguggagcugggcaccgaggugaacgaguucgcgugcgucguggccgacgccgugaucaagacgcugcagccggucagcgagcuccugaccccccuggggaucgaccucgacgagugguccauggccaccuacuaccuguucgacgagagcggcgaguucaagcuggccucccacauguacugcagcuucuacccccccgacgaggacgaggaggagggggacugcgaggaggaggaguucgagccguccacccaguacgaguacggcacggaggacgacuaccagggcaagccccucgaguucggggcgaccagcgccgcccugcagcccgaggaggagcaggaggaggacuggcuggacgacgacucccagcagaccgugggccagcaggacgggagcgaggacaaccagaccacgaccauccagaccaucguggagguccagccccagcucgagauggagcugaccccgguggugcagacgaucgaggucaacuccuucagcggcuaccugaagcucaccgacaacguguacaucaagaacgccgacaucguggaggaggucaagaaggugaagcccaccguggucgugaacgcggccaacguguaccugaagcacgggggcggcgucgccggggcccugaacaaggccaccaacaacgcgaugcagguggaguccgacgacuacaucgccacgaacggcccccucaaggucgggggcagcugcgugcuguccggccacaaccuggccaagcacugccuccacguggucgggcccaacgugaacaagggcgaggacauccagcugcugaagagcgccuacgagaacuucaaccagcacgaggugcuccuggccccgcugcucuccgcggggaucuucggcgccgaccccauccacagccugcgggucugcguggacaccgugcgcaccaacgucuaccuggccguguucgacaagaaccucuacgacaagcugguguccagcuuccuggagaugaagagcgagaagcaggucgagcagaagaucgccgagauccccaaggaggaggugaagcccuucaucaccgaguccaagccgagcguggagcagcggaagcaggacgacaagaagaucaaggccugcgucgaggaggugacgaccacccucgaggagaccaaguuccugacggagaaccugcuccuguacaucgacaucaacgggaaccugcaccccgacuccgcgacccucgugagcgacaucgacaucaccuuccugaagaaggacgcccccuacaucgucggcgacguggugcaggagggcguccugaccgccguggugauccccacgaagaaggccgggggcaccaccgagaugcucgccaaggcgcugcgcaaggucccgaccgacaacuacaucacgaccuaccccgggcagggccugaacggguacaccguggaggaggccaagaccgugcucaagaagugcaaguccgccuucuacauccugcccagcaucaucuccaacgagaagcaggagauccugggcaccgucagcuggaaccuccgggagaugcuggcccacgcggaggagacgcgcaagcugaugcccgugugcguggagaccaaggccaucgucuccaccauccagcggaaguacaagggcaucaagauccaggagggggugguggacuacggcgcccgcuucuacuucuacaccagcaagacgaccgucgccucccugaucaacacccucaacgaccugaacgagacccuggugacgaugccgcucggguacgugacccacggccugaaccuggaggaggccgcgcgguacaugcgcagccucaagguccccgccaccguguccgugagcucccccgacgccgucaccgccuacaacggguaccugacgagcuccagcaagacccccgaggagcacuucaucgagaccaucucccuggccggcagcuacaaggacuggagcuacuccggccagagcacccagcucgggaucgaguuccugaagcggggcgacaaguccguguacuacacgagcaacccgaccaccuuccaccuggacggggaggugaucaccuucgacaaccucaagacgcugcugucccuccgcgagguccggaccaucaagguguucaccaccguggacaacaucaaccugcacacgcaggucguggacaugagcaugaccuacggccagcaguucggccccaccuaccuggacggggcggacgugaccaagaucaagccccacaacucccacgagggcaagacguucuacguccucccgaacgacgacacccugcgcguggaggccuucgaguacuaccacaccaccgaccccagcuuccuggggcgguacauguccgcccucaaccacacgaagaaguggaaguacccccaggugaacggccugaccagcaucaagugggccgacaacaacugcuaccuggccaccgcgcuccugacccugcagcagaucgagcucaaguucaaccccccggcccugcaggacgccuacuaccgcgcccgggcgggggaggccgccaacuucugcgcccugauccucgccuacugcaacaagacggucggcgagcugggcgacgugcgcgagaccauguccuaccuguuccagcacgcgaaccucgacagcugcaagcggguccugaacguggugugcaagaccugcgggcagcagcagaccacccugaagggcgucgaggccgugauguacauggggacgcucuccuacgagcaguucaagaagggcgugcagauccccugcaccugcgggaagcaggccaccaaguaccugguccagcaggagagccccuucgugaugauguccgcccccccggcccaguacgagcugaagcacggcaccuucacgugcgcgagcgaguacaccggcaacuaccagugcgggcacuacaagcacaucaccuccaaggagacccucuacugcaucgacggcgcccugcugacgaagagcagcgaguacaaggggcccaucaccgacguguucuacaaggagaacuccuacaccaccacgaucaagcccgucaccuacaagcucgacggcguggugugcaccgagaucgaccccaagcuggacaacuacuacaagaaggacaacagcuacuucaccgagcagccgaucgaccugguccccaaccagcccuaccccaacgccuccuucgacaacuucaaguucgugugcgacaacaucaaguucgccgacgaccucaaccagcugacgggguacaagaagccggccagccgcgagcugaaggugaccuucuuccccgaccucaacggcgacgucguggcgaucgacuacaagcacuacacccccuccuucaagaagggcgccaagcugcugcacaagcccaucguguggcacgucaacaacgccaccaacaaggccacguacaagccgaacaccuggugcauccggugccucuggagcaccaagcccguggagaccuccaacagcuucgacgugcugaaguccgaggacgcgcaggggauggacaaccuggccugcgaggaccucaagcccgucagcgaggaggugguggagaaccccacgauccagaaggacguccuggagugcaacgugaagaccaccgagguggucggcgacaucauccugaagccggccaacaacucccucaagaucaccgaggagguggggcacacggaccugauggccgccuacguggacaacagcucccugaccaucaagaagcccaacgagcucagccgcguccugggccugaagacccucgcgacccacgggcuggccgccgugaacuccgugcccugggacacgaucgccaacuacgccaagccguuccugaacaaggucgugagcaccaccaccaacaucgugacgcgcugccucaaccgggucugcaccaacuacaugcccuacuucuucacccugcugcuccagcugugcaccuucacccgcuccacgaacagccggaucaaggcguccaugcccaccaccaucgccaagaacaccgugaagagcgugggcaaguucugccuggaggccagcuucaacuaccucaagucccccaacuucagcaagcugaucaacaucaucaucugguuccugcuccuguccgucugccugggcagccucaucuacuccacggccgcccugggggugcugaugagcaaccucggcaugccguccuacugcaccggguaccgcgagggcuaccugaacagcaccaacgugaccaucgcgacguacugcaccggcuccauccccugcagcgucugccuguccgggcucgacagccuggacaccuaccccucccuggagaccauccagaucacgaucagcuccuucaagugggaccucaccgccuucggccugguggccgagugguuccuggccuacauccucuucacccgguucuucuacgugcuggggcuggccgcgaucaugcagcucuucuucagcuacuucgccguccacuucaucuccaacagcuggcugauguggcugaucaucaaccuggugcagauggcccccaucuccgccauggugcgcauguacaucuucuucgcgagcuucuacuacgucuggaagagcuacgugcacguggucgacggcugcaacuccagcaccugcaugaugugcuacaagcggaaccgcgccacgcggguggagugcaccaccaucgucaacggggugcgccgguccuucuacguguacgccaacggcggcaagggguucugcaagcuccacaacuggaacugcgucaacugcgacaccuucugcgccggcagcacguucaucuccgacgagguggcccgcgaccugagccugcaguucaagcggccgaucaaccccaccgaccaguccagcuacaucguggacuccgucaccgugaagaacgggagcauccaccucuacuucgacaaggcgggccagaagaccuacgagcgccacucccugagccacuucgugaaccuggacaaccuccgggccaacaacacgaaggggucccugcccaucaacgucaucguguucgacggcaagagcaagugcgaggaguccagcgccaaguccgccagcguguacuacucccagcugaugugccagcccauccuccugcuggaccaggcccucgucagcgacgugggcgacagcgcggagguggccgucaagauguucgacgccuacgugaacaccuucuccagcaccuucaacgugccgauggagaagcugaagacccuggucgccacggccgaggcggagcucgccaagaacgugucccuggacaacgugcugagcaccuucaucuccgccgcccgccagggguucgucgacagcgacguggagaccaaggacguggucgagugccucaagcugucccaccagagcgacaucgaggugaccggcgacuccugcaacaacuacaugcugacguacaacaagguggagaacaugaccccccgggaccucggggcgugcaucgacugcagcgcccgccacaucaacgcccaggucgccaagucccacaacaucgcccugaucuggaacgugaaggacuucaugagccuguccgagcagcuccggaagcagauccgcagcgcggccaagaagaacaaccugcccuucaagcugaccugcgccaccacgcgccagguggucaacguggugaccaccaagaucgcccucaagggcgggugaggacuaguuauaagacugacuagcccgaugggccucccaacgggcccuccuccccuccuugcaccgagauuaauaaaaaaaaaaaaaaaaaaaaaaaaaaaaaaaaaaaaaaaaaaaaaaaaaaaaaaaaaaaaaaaaugcaucccccccccccccccccccccccccccccccaaaggcucuuuucagagccaccagaauu

SEQ ID NO: 21410 - RNA, 6058 nt, Artificial Sequence
  SARS-CoV-2__MT893675.1__non-structural protein 3 (NSP3) mRNA gc
aggagaaagcuuaccauggcccccaccaaggugaccuucggcgacgacacggucaucgaggugcagggguacaagagcgugaacaucaccuucgagcuggacgagcgcaucgacaagguccucaacgagaagugcuccgccuacaccguggagcugggcaccgaggugaacgaguucgcgugcgucguggccgacgccgugaucaagacgcugcagccggucagcgagcuccugaccccccuggggaucgaccucgacgagugguccauggccaccuacuaccuguucgacgagagcggcgaguucaagcuggccucccacauguacugcagcuucuacccccccgacgaggacgaggaggagggggacugcgaggaggaggaguucgagccguccacccaguacgaguacggcacggaggacgacuaccagggcaagccccucgaguucggggcgaccagcgccgcccugcagcccgaggaggagcaggaggaggacuggcuggacgacgacucccagcagaccgugggccagcaggacgggagcgaggacaaccagaccacgaccauccagaccaucguggagguccagccccagcucgagauggagcugaccccgguggugcagacgaucgaggucaacuccuucagcggcuaccugaagcucaccgacaacguguacaucaagaacgccgacaucguggaggaggcgaagaaggucaagcccaccgugguggucaacgccgccaacguguaccugaagcacgggggcggcguggccggggcccugaacaaggcgaccaacaacgccaugcaggucgaguccgacgacuacaucgccacgaacggcccccucaagguggggggcagcugcguccuguccggccacaaccuggccaagcacugccuccacgugguggggcccaacgucaacaagggcgaggacauccagcugcugaagagcgccuacgagaacuucaaccagcacgaggugcuccuggcgccgcugcucuccgccgggaucuucggcgccgaccccauccacagccugcgggugugcgucgacaccgugcgcaccaacguguaccuggccgucuucgacaagaaccucuacgacaagcuggugcuguccuuccucgagaugaagagcgagaagcagguggagcagaagaucgccgagauccccaaggaggaggucaagcccuucaucaccgagagcaagccguccguggagcagcggaagcaggacgacaagaagaucaaggcgugcguggaggaggucacgaccacccuggaggagaccaaguuccugacggagaaccuccugcuguacaucgacaucaacgggaaccuccaccccgacagcgccacccugguguccgacaucgacaucaccuuccugaagaaggacgcccccuacaucgugggcgacgucgugcaggagggcgugcucaccgccgucgugauccccacgaagaaggccgggggcaccaccgagaugcuggcgaaggcccugcgcaaggugccgaccgacaacuacaucacgaccuaccccgggcagggccucaacggguacaccgucgaggaggccaagaccgugcugaagaagugcaagagcgccuucuacauccugcccuccaucaucagcaacgagaagcaggagauccucggcaccguguccuggaaccugcgggagaugcuggcgcacgccgaggagacgcgcaagcugaugcccgucugcguggagaccaaggccaucgugagcaccauccagcggaaguacaagggcaucaagauccaggagggggucguggacuacggcgcccgcuucuacuucuacaccuccaagacgaccguggccagccucaucaacacccugaacgaccugaacgagacccucgucacgaugccgcugggguacgugacccacggccugaaccucgaggaggcggcccgguacaugcgcucccugaaggugcccgccaccgucagcguguccagccccgacgccgugaccgccuacaacggguaccugacguccagcuccaagacccccgaggagcacuucaucgagaccaucagccucgcgggcuccuacaaggacuggagcuacagcggccaguccacccagcuggggaucgaguuccugaagcggggcgacaagagcgucuacuacacguccaacccgaccaccuuccaccucgacggggaggugaucaccuucgacaaccugaagacgcugcucagccugcgcgaggugcggaccaucaaggucuucaccaccguggacaacaucaaccugcacacgcagguggucgacauguccaugaccuacggccagcaguucggccccaccuaccucgacggggccgacgugaccaagaucaagccccacaacagccacgagggcaagacguucuacgugcugccgaacgacgacacccugcgcgucgaggccuucgaguacuaccacaccaccgaccccuccuuccucgggcgguacaugagcgcccugaaccacacgaagaaguggaaguacccccaggugaacggccugaccuccaucaagugggccgacaacaacugcuaccucgcgaccgcccugcugacccuccagcagaucgagcugaaguucaaccccccggcccugcaggacgccuacuaccgcgcgcgggccggggaggccgccaacuucugcgcccucauccuggcguacugcaacaagacggugggcgagcugggcgacguccgcgagaccaugagcuaccucuuccagcacgccaaccuggacuccugcaagcgggugcugaacgucgugugcaagaccugcgggcagcagcagaccacccucaagggcguggaggccgucauguacauggggacgcugagcuacgagcaguucaagaagggcgugcagauccccugcaccugcgggaagcaggccaccaaguaccuggugcagcaggagucccccuucgucaugaugagcgcccccccggcgcaguacgagcucaagcacggcaccuucacgugcgccuccgaguacaccggcaacuaccagugcgggcacuacaagcacaucaccagcaaggagacccuguacugcaucgacggcgcccugcucacgaaguccagcgaguacaaggggcccaucaccgacguguucuacaaggagaacagcuacaccaccacgaucaagcccgugaccuacaagcuggacggcgucgugugcaccgagaucgaccccaagcuggacaacuacuacaagaaggacaacuccuacuucaccgagcagccgaucgaccucgugcccaaccagcccuaccccaacgccagcuucgacaacuucaaguucgucugcgacaacaucaaguucgccgacgaccugaaccagcugacgggguacaagaagccggcgucccgcgagcucaaggugaccuucuuccccgaccugaacggcgacguggucgccaucgacuacaagcacuacacccccagcuucaagaagggcgccaagcugcuccacaagcccaucguguggcacgugaacaacgccaccaacaaggcgacguacaagccgaacaccuggugcauccggugccugugguccaccaagcccgucgagaccagcaacuccuucgacgugcugaagagcgaggacgcccaggggauggacaaccucgccugcgaggaccugaagcccguguccgaggaggucguggagaaccccacgauccagaaggacgugcuggagugcaacgucaagaccaccgagguggugggcgacaucauccucaagccggccaacaacagccugaagaucaccgaggaggucgggcacacggaccugauggccgcguacguggacaacuccagccucaccaucaagaagcccaacgagcugucccgcgugcugggccucaagacccuggccacccacgggcuggccgccgucaacagcgugcccugggacacgaucgccaacuacgcgaagccguuccucaacaagguggucuccaccaccaccaacaucgugacgcgcugccugaaccgggugugcaccaacuacaugcccuacuucuucacccugcuccugcagcugugcaccuucacccgcagcacgaacucccggaucaaggccagcaugcccaccaccaucgccaagaacaccgucaaguccgugggcaaguucugccucgaggccagcuucaacuaccugaagagccccaacuucuccaagcugaucaacaucaucaucugguuccuccugcugagcgugugccucggcucccugaucuacagcacggccgcgcuggggguccucauguccaaccugggcaugccgagcuacugcaccggguaccgcgagggcuaccugaacuccaccaacgugaccaucgccacguacugcaccggcagcauccccugcuccgugugccucagcgggcuggacucccuggacaccuaccccagccucgagaccauccagaucacgaucuccagcuucaagugggaccugaccgccuucggccuggucgccgagugguuccucgccuacauccuguucacccgguucuucuacgugcuggggcucgcggccaucaugcagcuguucuucuccuacuucgccgugcacuucaucagcaacuccuggcugauguggcugaucaucaaccucguccagauggcccccaucagcgcgauggugcgcauguacaucuucuucgccuccuucuacuacguguggaagagcuacguccacgugguggacggcugcaacagcuccaccugcaugaugugcuacaagcggaaccgcgccacgcgggucgagugcaccaccaucgugaacgggguccgccggagcuucuacguguacgccaacggcggcaagggguucugcaagcugcacaacuggaacugcgugaacugcgacaccuucugcgccggcuccacguucaucagcgacgaggucgcgcgcgaccugucccuccaguucaagcggccgaucaaccccaccgaccagagcuccuacaucguggacagcgugaccgucaagaacggguccauccaccuguacuucgacaaggccggccagaagaccuacgagcgccacagccugucccacuucgugaaccucgacaaccugcgggccaacaacacgaaggggagccugcccaucaacgugaucgucuucgacggcaaguccaagugcgaggagagcuccgccaagagcgccuccguguacuacagccagcucaugugccagcccauccugcugcucgaccaggcgcugguguccgacgucggcgacagcgccgagguggccgugaagauguucgacgccuacgucaacaccuucagcuccaccuucaacgugccgauggagaagcugaagacccucguggccacggcggaggccgagcuggccaacaacgucagccuggacaacgugcucuccaccuucaucagcgccgcgcgccagggguucguggacuccgacgucgagaccaaggacgugguggagugccugaagcugagccaccaguccgacaucgaggucaccggcgacagcugcaacaacuacaugcucacguacaacaagguggagaacaugaccccccgggaccugggggccugcaucgacugcuccgcccgccacaucaacgcccagguggccaagagccacaacaucgcgcugaucuggaacgucaaggacuucaugucccucagcgagcagcugcggaagcagauccgcuccgccgccaagaagaacaaccugcccuucaagcucaccugcgccaccacgcgccagguggugaacgucgugaccaccaagaucgcccugaagggcgggugaggacuaguuauaagacugacuagcccgaugggccucccaacgggcccuccuccccuccuugcaccgagauuaauaaaaaaaaaaaaaaaaaaaaaaaaaaaaaaaaaaaaaaaaaaaaaaaaaaaaaaaaaaaaaaaaugcaucccccccccccccccccccccccccccccccaaaggcucuuuucagagccaccagaauu

SEQ ID NO: 21411 - RNA, 6058 nt, Artificial Sequence
  SARS-CoV-2__MT893685.1__non-structural protein 3 (NSP3) mRNA gc
aggagaaagcuuaccauggcccccaccaaggugaccuucggcgacgacacggucaucgaggugcagggguacaagagcgugaacaucaccuucgagcuggacgagcgcaucgacaagguccucaacgagaagugcuccgccuacaccguggagcugggcaccgaggugaacgaguucgcgugcgucguggccgacgccgugaucaagacgcugcagccggucagcgagcuccugaccccccuggggaucgaccucgacgagugguccauggccaccuacuaccuguucgacgagagcggcgaguucaagcuggccucccacauguacugcagcuucuacccccccgacgaggacgaggaggagggggacugcgaggaggaggaguucgagccguccacccaguacgaguacggcacggaggacgacuaccagggcaagccccucgaguucggggcgaccagcgccgcccugcagcccgaggaggagcaggaggaggacuggcuggacgacgacucccagcagaccgugggccagcaggacgggagcgaggacaaccagaccacgaccauccagaccaucguggagguccagccccagcucgagauggagcugaccccgguggugcagacgaucgaggucaacuccuucagcggcuaccugaagcucaccgacaacguguacaucaagaacgccgacaucguggaggaggcgaagaaggucaagcccaccgugguggucaacgccgccaacguguaccugaagcacgggggcggcguggccggggcccugaacaaggcgaccaacaacgccaugcaggucgaguccgacgacuacaucgccacgaacggcccccucaagguggggggcagcugcguccuguccggccacaaccuggccaagcacugccuccacgugguggggcccaacgucaacaagggcgaggacauccagcugcugaagagcgccuacgagaacuucaaccagcacgaggugcuccuggcgccgcugcucuccgccgggaucuucggcgccgaccccauccacagccugcgggugugcgucgacaccgugcgcaccaacguguaccuggccgucuucgacaagaaccucuacgacaagcugguguccagcuuccuggagaugaagagcgagaagcagguggagcagaagaucgccgagauccccaaggaggaggucaagcccuucaucaccgaguccaagccgagcguggagcagcggaagcaggacgacaagaagaucaaggcgugcguggaggaggucacgaccacccucgaggagaccaaguuccugacggagaaccugcuccuguacaucgacaucaacgggaaccugcaccccgacuccgccacccucgugagcgacaucgacaucaccuuccugaagaaggacgcccccuacaucgugggcgacgucgugcaggagggcgugcugaccgccgucgugauccccacgaagaaggccgggggcaccaccgagaugcucgcgaaggcccugcgcaaggugccgaccgacaacuacaucacgaccuaccccgggcagggccugaacggguacaccgucgaggaggccaagaccgugcucaagaagugcaaguccgccuucuacauccugcccagcaucaucuccaacgagaagcaggagauccugggcaccgugagcuggaaccuccgggagaugcuggcgcacgccgaggagacgcgcaagcugaugcccgucugcguggagaccaaggccaucguguccaccauccagcggaaguacaagggcaucaagauccaggagggggucguggacuacggcgcccgcuucuacuucuacaccagcaagacgaccguggccucccugaucaacacccucaacgaccugaacgagacccuggucacgaugccgcucggguacgugacccacggccugaaccuggaggaggcggcccgguacaugcgcagccucaaggugcccgccaccgucuccgugagcucccccgacgccgugaccgccuacaacggguaccugacgagcuccagcaagacccccgaggagcacuucaucgagaccaucucccuggcgggcagcuacaaggacuggagcuacuccggccagagcacccagcucgggaucgaguuccugaagcggggcgacaaguccgucuacuacacgagcaacccgaccaccuuccaccuggacggggaggugaucaccuucgacaaccucaagacgcugcugucccuccgcgaggugcggaccaucaaggucuucaccaccguggacaacaucaaccugcacacgcagguggucgacaugagcaugaccuacggccagcaguucggccccaccuaccuggacggggccgacgugaccaagaucaagccccacaacucccacgagggcaagacguucuacgugcucccgaacgacgacacccugcgcgucgaggccuucgaguacuaccacaccaccgaccccagcuuccuggggcgguacauguccgcccucaaccacacgaagaaguggaaguacccccaggugaacggccugaccagcaucaagugggccgacaacaacugcuaccuggcgaccgcccuccugacccugcagcagaucgagcucaaguucaaccccccggcccugcaggacgccuacuaccgcgcgcgggccggggaggccgccaacuucugcgcccugauccucgcguacugcaacaagacggugggcgagcugggcgacguccgcgagaccauguccuaccuguuccagcacgccaaccucgacagcugcaagcgggugcugaacgucgugugcaagaccugcgggcagcagcagaccacccugaagggcguggaggccgucauguacauggggacgcucuccuacgagcaguucaagaagggcgugcagauccccugcaccugcgggaagcaggccaccaaguaccuggugcagcaggagagccccuucgucaugauguccgcccccccggcgcaguacgagcugaagcacggcaccuucacgugcgccagcgaguacaccggcaacuaccagugcgggcacuacaagcacaucaccuccaaggagacccucuacugcaucgacggcgcccugcugacgaagagcagcgaguacaaggggcccaucaccgacguguucuacaaggagaacuccuacaccaccacgaucaagcccgugaccuacaagcucgacggcgucgugugcaccgagaucgaccccaagcuggacaacuacuacaagaaggacaacagcuacuucaccgagcagccgaucgaccuggugcccaaccagcccuaccccaacgccuccuucgacaacuucaaguucgucugcgacaacaucaaguucgccgacgaccucaaccagcugacgggguacaagaagccggcgagccgcgagcugaaggugaccuucuuccccgaccucaacggcgacguggucgccaucgacuacaagcacuacacccccuccuucaagaagggcgccaagcugcugcacaagcccaucguguggcacgugaacaacgccaccaacaaggcgacguacaagccgaacaccuggugcauccggugccucuggagcaccaagcccgucgagaccuccaacagcuucgacgugcugaaguccgaggacgcccaggggauggacaaccuggccugcgaggaccucaagcccgugagcgaggaggucguggagaaccccacgauccagaaggacgugcuggagugcaacgucaagaccaccgagguggugggcgacaucauccugaagccggccaacaacucccucaagaucaccgaggaggucgggcacacggaccugauggccgcguacguggacaacagcucccugaucaucaagaagcccaacgagcucagccgcgugcugggccugaagacccucgccacccacgggcuggccgccgucaacuccgugcccugggacaccaucgccaacuacgcgaagccguuccugaacaagguggucagcacgaccaccaacaucgugacccgcugccucaaccgggugugcacgaacuacaugcccuacuucuucacccugcugcuccagcugugcaccuucacccgcuccaccaacagccggaucaaggccuccaugcccacgaccaucgccaagaacaccgucaagagcgugggcaaguucugccuggaggccagcuucaacuaccucaagucccccaacuucagcaagcugaucaacaucaucaucugguuccugcuccuguccgugugccugggcagccucaucuacuccaccgccgcgcuggggguccugaugagcaaccucggcaugccguccuacugcacgggguaccgcgagggcuaccugaacagcaccaacgugaccaucgccaccuacugcacgggcuccauccccugcagcgugugccuguccgggcucgacagccuggacaccuaccccucccuggagaccauccagaucaccaucagcuccuucaagugggaccucacggccuucggccuggucgccgagugguuccuggccuacauccucuucacccgguucuucuacgugcuggggcuggcggccaucaugcagcucuucuucagcuacuucgccgugcacuucaucuccaacagcuggcugauguggcugaucaucaaccugguccagauggcccccaucuccgcgauggugcgcauguacaucuucuucgccagcuucuacuacguguggaagagcuacguccacgugguggacggcugcaacuccagcaccugcaugaugugcuacaagcggaaccgcgccacccgggucgagugcacgaccaucgugaacgggguccgccgguccuucuacguguacgccaacggcggcaagggguucugcaagcuccacaacuggaacugcgugaacugcgacaccuucugcgccggcagcaccuucaucuccgacgaggucgcgcgcgaccugagccugcaguucaagcggccgaucaaccccacggaccaguccagcuacaucguggacuccgugaccgucaagaacgggagcauccaccucuacuucgacaaggccggccagaagaccuacgagcgccacucccugagccacuucgugaaccuggacaaccuccgggccaacaacaccaaggggucccugcccaucaacgugaucgucuucgacggcaagagcaagugcgaggaguccagcgccaaguccgccagcguguacuacucccagcugaugugccagcccauccuccugcuggaccaggcgcucgugagcgacgucggcgacagcgccgagguggccgugaagauguucgacgccuacgucaacacguucuccagcaccuucaacgugccgauggagaagcugaagacccugguggccaccgcggaggccgagcucgccaagaacgucucccuggacaacgugcugagcacguucaucuccgccgcgcgccagggguucguggacagcgacgucgagaccaaggacgugguggagugccucaagcugucccaccagagcgacaucgaggucaccggcgacuccugcaacaacuacaugcugaccuacaacaagguggagaacaugacgccccgggaccucggggccugcaucgacugcagcgcccgccacaucaacgcccagguggccaagucccacaacaucgcgcugaucuggaacgucaaggacuucaugagccuguccgagcagcuccggaagcagauccgcagcgccgccaagaagaacaaccugcccuucaagcugaccugcgccaccacccgccagguggugaacgucgugacgaccaagaucgcccucaagggcgggugaggacuaguuauaagacugacuagcccgaugggccucccaacgggcccuccuccccuccuugcaccgagauuaauaaaaaaaaaaaaaaaaaaaaaaaaaaaaaaaaaaaaaaaaaaaaaaaaaaaaaaaaaaaaaaaaugcaucccccccccccccccccccccccccccccccaaaggcucuuuucagagccaccagaauu

SEQ ID NO: 21412 - RNA, 6058 nt, Artificial Sequence
  SARS-CoV-2__MT897460.1__non-structural protein 3 (NSP3) mRNA gc
aggagaaagcuuaccauggcccccaccaaggugaccuucggcgacgacacggucaucgaggugcagggguacaagagcgugaacaucaccuucgagcuggacgagcgcaucgacaagguccucaacgagaagugcuccgccuacaccguggagcugggcaccgaggugaacgaguucgcgugcgucguggccgacgccgugaucaagacgcugcagccggucagcgagcuccugaccccccuggggaucgaccucgacgagugguccauggccaccuacuaccuguucgacgagagcggcgaguucaagcuggccucccacauguacugcagcuucuacccccccgacgaggacgaggaggagggggacugcgaggaggaggaguucgagccguccacccaguacgaguacggcacggaggacgacuaccagggcaagccccucgaguucggggcgaccagcgccgcccugcagcccgaggaggagcaggaggaggacuggcuggacgacgacucccagcagaccgugggccagcaggacgggagcgaggacaaccagaccacgaccauccagaccaucguggagguccagccccagcucgagauggagcugaccccgguggugcagacgaucgaggucaacuccuucagcggcuaccugaagcucaccgacaacguguacaucaagaacgccgacaucguggaggaggcgaagaaggucaagcccaccgugguggucaacgccgccaacguguaccugaagcacgggggcggcguggccggggcccugaacaaggcgaccaacaacgccaugcaggucgaguccgacgacuacaucgccacgaacggcccccucaagguggggggcagcugcguccuguccggccacaaccuggccaagcacugccuccacgugguggggcccaacgucaacaagggcgaggacauccagcugcugaagagcgccuacgagaacuucaaccagcacgaggugcuccuggcgccgcugcucuccgccgggaucuucggcgccgaccccauccacagccugcgggugugcgucgacaccgugcgcaccaacguguaccuggccgucuucgacaagaaccucuacgacaagcugguguccagcuuccuggagaugaagagcgagaagcagguggagcagaagaucgccgagauccccaaggaggaggucaagcccuucaucaccgaguccaagccgagcguggagcagcggaagcaggacgacaagaagaucaaggcgugcguggaggaggucacgaccacccucgaggagaccaaguuccugacggagaaccugcuccuguacaucgacaucaacgggaaccugcaccccgacuccgccacccucgugagcgacaucgacaucaccuuccugaagaaggacgcccccuacaucgugggcgacgucgugcaggagggcgugcugaccgccgucgugauccccacgaagaaggccgggggcaccaccgagaugcucgcgaaggcccugcgcaaggugccgaccgacaacuacaucacgaccuaccccgggcagggccugaacggguacaccgucgaggaggccaagaccgugcucaagaagugcaaguccgccuucuacauccugcccagcaucaucuccaacgagaagcaggagauccugggcaccgugagcuggaaccuccgggagaugcuggcgcacgccgaggagacgcgcaagcugaugcccgucugcguggagaccaaggccaucguguccaccauccagcggaaguacaagggcaucaagauccaggagggggucguggacuacggcgcccgcuucuacuucuacaccagcaagacgaccguggccucccugaucaacacccucaacgaccugaacgagacccuggucacgaugccgcucggguacgugacccacggccugaaccuggaggaggcggcccgguacaugcgcagccucaaggugcccgccaccgucuccgugagcucccccgacgccgugaccgccuacaacggguaccugacgagcuccagcaagacccccgaggagcacuucaucgagaccaucucccuggcgggcagcuacaaggacuggagcuacuccggccagagcacccagcucgggaucgaguuccugaagcggggcgacaaguccgucuacuacacgagcaacccgaccaccuuccaccuggacggggaggugaucaccuucgacaaccucaagacgcugcugucccuccgcgaggugcggaccaucaaggucuucaccaccguggacaacaucaaccugcacacgcagguggucgacaugagcaugaccuacggccagcaguucggccccaccuaccuggacggggccgacgugaccaagaucaagccccacaacucccacgagggcaagacguucuacgugcucccgaacgacgacacccugcgcgucgaggccuucgaguacuaccacaccaccgaccccagcuuccuggggcgguacauguccgcccucaaccacacgaagaaguggaaguacccccaggugaacggccugaccagcaucaagugggccgacaacaacugcuaccuggcgaccgcccuccugacccugcagcagaucgagcucaaguucaaccccccggcccugcaggacgccuacuaccgcgcgcgggccggggaggccgccaacuucugcgcccugauccucgcguacugcaacaagacggugggcgagcugggcgacguccgcgagaccauguccuaccuguuccagcacgccaaccucgacagcugcaagcgggugcugaacgucgugugcaagaccugcgggcagcagcagaccacccugaagggcguggaggccgucauguacauggggacgcucuccuacgagcaguucaagaagggcuuccagauccccugcaccugcgggaagcaggccaccaaguaccuggugcagcaggagagccccuucgugaugauguccgcccccccggcgcaguacgagcugaagcacggcaccuucacgugcgccagcgaguacaccggcaacuaccagugcgggcacuacaagcacaucaccuccaaggagacccucuacugcaucgacggcgcccugcugacgaagagcagcgaguacaaggggcccaucaccgacgucuucuacaaggagaacuccuacaccaccacgaucaagcccgugaccuacaagcucgacggcguggucugcaccgagaucgaccccaagcuggacaacuacuacaagaaggacaacagcuacuucaccgagcagccgaucgaccuggugcccaaccagcccuaccccaacgccuccuucgacaacuucaaguucgugugcgacaacaucaaguucgccgacgaccucaaccagcugacgggguacaagaagccggcgagccgcgagcugaaggucaccuucuuccccgaccucaacggcgacgugguggccaucgacuacaagcacuacacccccuccuucaagaagggcgccaagcugcugcacaagcccaucgucuggcacgugaacaacgccaccaacaaggcgacguacaagccgaacaccuggugcauccggugccucuggagcaccaagcccguggagaccuccaacagcuucgacguccugaaguccgaggacgcccaggggauggacaaccuggccugcgaggaccucaagcccgugagcgaggagguggucgagaaccccacgauccagaaggacgugcuggagugcaacgugaagaccaccgaggucgugggcgacaucauccugaagccggccaacaacucccucaagaucaccgaggagguggggcacacggaccugauggccgcguacgucgacaacagcucccugaccaucaagaagcccaacgagcucagccgcgugcugggccugaagacccucgccacccacgggcuggccgccgugaacuccguccccugggacacgaucgccaacuacgcgaagccguuccugaacaagguggugagcaccaccaccaacaucgucacgcgcugccucaaccgggugugcaccaacuacaugcccuacuucuucacccugcugcuccagcugugcaccuucacccgcuccacgaacagccggaucaaggccuccaugcccaccaccaucgccaagaacaccgugaagagcgucggcaaguucugccuggaggccagcuucaacuaccucaagucccccaacuucagcaagcugaucaacaucaucaucugguuccugcuccuguccgugugccugggcagccucaucuacuccacggccgcgcugggggugcugaugagcaaccucggcaugccguccuacugcaccggguaccgcgagggcuaccugaacagcaccaacgucaccaucgccacguacugcaccggcuccauccccugcagcgugugccuguccgggcucgacagccuggacaccuaccccucccuggagaccauccagaucacgaucagcuccuucaagugggaccucaccgccuucggccugguggccgagugguuccuggccuacauccucuucacccgguucuucuacguccuggggcuggcggccaucaugcagcucuucuucagcuacuucgccgugcacuucaucuccaacagcuggcugauguggcugaucaucaaccuggugcagauggcccccaucuccgcgaugguccgcauguacaucuucuucgccagcuucuacuacguguggaagagcuacgugcacgucguggacggcugcaacuccagcaccugcaugaugugcuacaagcggaaccgcgccacgcggguggagugcaccaccaucgucaacggggugcgccgguccuucuacgucuacgccaacggcggcaagggguucugcaagcuccacaacuggaacugcgugaacugcgacaccuucugcgccggcagcacguucaucuccgacgagguggcgcgcgaccugagccugcaguucaagcggccgaucaaccccaccgaccaguccagcuacaucgucgacuccgugaccgugaagaacgggagcauccaccucuacuucgacaaggccggccagaagaccuacgagcgccacucccugagccacuucgucaaccuggacaaccuccgggccaacaacacgaaggggucccugcccaucaacgugaucguguucgacggcaagagcaagugcgaggaguccagcgccaaguccgccagcgucuacuacucccagcugaugugccagcccauccuccugcuggaccaggcgcucgugagcgacgugggcgacagcgccgaggucgccgugaagauguucgacgccuacgugaacaccuucuccagcaccuucaacgucccgauggagaagcugaagacccugguggccacggcggaggccgagcucgccaagaacgugucccuggacaacguccugagcaccuucaucuccgccgcgcgccagggguucguggacagcgacguggagaucaaggacgucguggagugccucaagcugucccaccagagcgacaucgaggugaccggcgacuccugcaacaacuacaugcugaccuacaacaaggucgagaacaugacgccccgggaccucggggccugcaucgacugcagcgcccgccacaucaacgcccagguggccaagucccacaacaucgcgcugaucuggaacgugaaggacuucaugagccuguccgagcagcuccggaagcagauccgcagcgccgccaagaagaacaaccugcccuucaagcugaccugcgccaccacccgccaggucgugaacguggucacgaccaagaucgcccucaagggcgggugaggacuaguuauaagacugacuagcccgaugggccucccaacgggcccuccuccccuccuugcaccgagauuaauaaaaaaaaaaaaaaaaaaaaaaaaaaaaaaaaaaaaaaaaaaaaaaaaaaaaaaaaaaaaaaaaugcaucccccccccccccccccccccccccccccccaaaggcucuuuucagagccaccagaauu

SEQ ID NO: 21413 - RNA, 6058 nt, Artificial Sequence
  SARS-CoV-2__MT897461.1__non-structural protein 3 (NSP3) mRNA gc
aggagaaagcuuaccauggcccccaccaaggugaccuucggcgacgacacggucaucgaggugcagggguacaagagcgugaacaucaccuucgagcuggacgagcgcaucgacaagguccucaacgagaagugcuccgccuacaccguggagcugggcaccgaggugaacgaguucgcgugcgucguggccgacgccgugaucaagacgcugcagccggucagcgagcuccugaccccccuggggaucgaccucgacgagugguccauggccaccuacuaccuguucgacgagagcggcgaguucaagcuggccucccacauguacugcagcuucuacccccccgacgaggacgaggaggagggggacugcgaggaggaggaguucgagccguccacccaguacgaguacggcacggaggacgacuaccagggcaagccccucgaguucggggcgaccagcgccgcccugcagcccgaggaggagcaggaggaggacuggcuggacgacgacucccagcagaccgugggccagcaggacgggagcgaggacaaccagaccacgaccauccagaccaucguggagguccagccccagcucgagauggagcugaccccgguggugcagacgaucgaggucaacuccuucagcggcuaccugaagcucaccgacaacguguacaucaagaacgccgacaucguggaggaggcgaagaaggucaagcccaccgugguggucaacgccgccaacguguaccugaagcacgggggcggcguggccggggcccugaacaaggcgaccaacaacgccaugcaggucgaguccgacgacuacaucgccacgaacggcccccucaagguggggggcagcugcguccuguccggccacaaccuggccaagcacugccuccacgugguggggcccaacgucaacaagggcgaggacauccagcugcugaagagcgccuacgagaacuucaaccagcacgaggugcuccuggcgccgcugcucuccgccgggaucuucggcgccgaccccauccacagccugcgggugugcgucgacaccgugugcaccaacguguaccuggccgucuucgacaagaaccucuacgacaagcugguguccagcuuccuggagaugaagagcgagaagcagguggagcagaagaucgccgagauccccaaggaggaggucaagcccuucaucaccgaguccaagccgagcguggagcagcgcaagcaggacgacaagaagaucaaggcgugcguggaggaggucacgaccacccucgaggagaccaaguuccugacggagaaccugcuccuguacaucgacaucaacgggaaccugcaccccgacuccgccacccucgugagcgacaucgacaucaccuuccugaagaaggacgcccccuacaucgugggcgacgucgugcaggagggcgugcugaccgccgucgugauccccacgaagaaggccgggggcaccaccgagaugcucgcgaaggcccugcggaaggugccgaccgacaacuacaucacgaccuaccccgggcagggccugaacggguacaccgucgaggaggccaagaccgugcucaagaagugcaaguccgccuucuacauccugcccagcaucaucuccaacgagaagcaggagauccugggcaccgugagcuggaaccuccgcgagaugcuggcgcacgccgaggagacgcggaagcugaugcccgucugcguggagaccaaggccaucguguccaccauccagcgcaaguacaagggcaucaagauccaggagggggucguggacuacggcgcccgguucuacuucuacaccagcaagacgaccguggccucccugaucaacacccucaacgaccugaacgagacccuggucacgaugccgcucggguacgugacccacggccugaaccuggaggaggcggcccgcuacaugcggagccucaaggugcccgccaccgucuccgugagcucccccgacgccgugaccgccuacaacggguaccugacgagcuccagcaagacccccgaggagcacuucaucgagaccaucucccuggcgggcagcuacaaggacuggagcuacuccggccagagcacccagcucgggaucgaguuccugaagcgcggcgacaaguccgucuacuacacgagcaacccgaccaccuuccaccuggacggggaggugaucaccuucgacaaccucaagacgcugcugucccuccgggaggugcgcaccaucaaggucuucaccaccguggacaacaucaaccugcacacgcagguggucgacaugagcaugaccuacggccagcaguucggccccaccuaccuggacggggccgacgugaccaagaucaagccccacaacucccacgagggcaagacguucuacgugcucccgaacgacgacacccugcgggucgaggccuucgaguacuaccacaccaccgaccccagcuuccuggggcgcuacauguccgcccucaaccacacgaagaaguggaaguacccccaggugaacggccugaccagcaucaagugggccgacaacaacugcuaccuggcgaccgcccuccugacccugcagcagaucgagcucaaguucaaccccccggcccugcaggacgccuacuaccgggcgcgcgccggggaggccgccaacuucugcgcccugauccucgcguacugcaacaagacggugggcgagcugggcgacguccgggagaccauguccuaccuguuccagcacgccaaccucgacagcugcaagcgcgugcugaacgucgugugcaagaccugcgggcagcagcagaccacccugaagggcguggaggccgucauguacauggggacgcucuccuacgagcaguucaagaagggcgugcagauccccugcaccugcgggaagcaggccaccaaguaccuggugcagcaggagagccccuucgucaugauguccgcccccccggcgcaguacgagcugaagcacggcaccuucacgugcgccagcgaguacaccggcaacuaccagugcgggcacuacaagcacaucaccuccaaggagacccucuacugcaucgacggcgcccugcugacgaagagcagcgaguacaaggggcccaucaccgacguguucuacaaggagaacuccuacaccaccacgaucaagcccgugaccuacaagcucgacggcgucgugugcaccgagaucgaccccaagcuggacaacuacuacaagaaggacaacagcuacuucaccgagcagccgaucgaccuggugcccaaccagcccuaccccaacgccuccuucgacaacuucaaguucgucugcgacaacaucaaguucgccgacgaccucaaccagcugacgggguacaagaagccggcgagccgggagcugaaggugaccuucuuccccgaccucaacggcgacguggucgccaucgacuacaagcacuacacccccuccuucaagaagggcgccaagcugcugcacaagcccaucguguggcacgugaacaacgccaccaacaaggcgacguacaagccgaacaccuggugcauccgcugccucuggagcaccaagcccgucgagaccuccaacagcuucgacgugcugaaguccgaggacgcccaggggauggacaaccuggccugcgaggaccucaagcccgugagcgaggaggucguggagaaccccacgauccagaaggacgugcuggagugcaacgucaagaccaccgagguggugggcgacaucauccugaagccggccaacaacucccucaagaucaccgaggaggucgggcacacggaccugauggccgcguacguggacaacagcucccugaccaucaagaagcccaacgagcucagccgggugcugggccugaagacccucgccacccacgggcuggccgccgucaacuccgugcccugggacacgaucgccaacuacgcgaagccguuccugaacaagguggucagcaccaccaccaacaucgugacgcgcugccucaaccgcgugugcaccaacuacaugcccuacuucuucacccugcugcuccagcugugcaccuucacccgguccacgaacagccgcaucaaggccuccaugcccaccaccaucgccaagaacaccgucaagagcgugggcaaguucugccuggaggccagcuucaacuaccucaagucccccaacuucagcaagcugaucaacaucaucaucugguuccugcuccuguccgugugccugggcagccucaucuacuccacggccgcgcuggggguccugaugagcaaccucggcaugccguccuacugcaccggguaccgggagggcuaccugaacagcaucaacgugaccaucgccaccuacugcacgggcuccauccccugcagcgugugccuguccgggcucgacagccuggacaccuaccccucccuggagaccauccagaucaccaucagcuccuucaagugggaccucacggccuucggccuggucgccgagugguuccuggccuacauccucuucacccgcuucuucuacgugcuggggcuggcggccaucaugcagcucuucuucagcuacuucgccgugcacuucaucuccaacagcuggcugauguggcugaucaucaaccugguccagauggcccccaucuccgcgauggugcggauguacaucuucuucgccagcuucuacuacguguggaagagcuacguccacgugguggacggcugcaacuccagcaccugcaugaugugcuacaagcgcaaccgggccacccgcgucgagugcacgaccaucgugaacgggguccggcgcuccuucuacguguacgccaacggcggcaagggguucugcaagcuccacaacuggaacugcgugaacugcgacaccuucugcgccggcagcaccuucaucuccgacgaggucgcgcgggaccugagccugcaguucaagcgcccgaucaaccccacggaccaguccagcuacaucguggacuccgugaccgucaagaacgggagcauccaccucuacuucgacaaggccggccagaagaccuacgagcggcacucccugagccacuucgugaaccuggacaaccuccgcgccaacaacaccaaggggucccugcccaucaacgugaucgucuucgacggcaagagcaagugcgaggaguccagcgccaaguccgccagcguguacuacucccagcugaugugccagcccauccuccugcuggaccaggcgcucgugagcgacgucggcgacagcgccgagguggccgugaagauguucgacgccuacgucaacacguucuccagcaccuucaacgugccgauggagaagcugaagacccugguggccaccgcggaggccgagcucgccaagaacgucucccuggacaacgugcugagcacguucaucuccgccgcgcggcagggguucguggacagcgacgucgagaccaaggacgugguggagugccucaagcugucccaccagagcgacaucgaggucaccggcgacuccugcaacaacuacaugcugaccuacaacaagguggagaacaugacgccccgcgaccucggggccugcaucgacugcagcgcccggcacaucaacgcccagguggccaagucccacaacaucgcgcugaucuggaacgucaaggacuucaugagccuguccgagcagcuccgcaagcagauccggagcgccgccaagaagaacaaccugcccuucaagcugaccugcgccaccacccgccagguggugaacgucgugacgaccaagaucgcccucaagggcgggugaggacuaguuauaagacugacuagcccgaugggccucccaacgggcccuccuccccuccuugcaccgagauuaauaaaaaaaaaaaaaaaaaaaaaaaaaaaaaaaaaaaaaaaaaaaaaaaaaaaaaaaaaaaaaaaaugcaucccccccccccccccccccccccccccccccaaaggcucuuuucagagccaccagaauu

SEQ ID NO: 21414 - RNA, 6058 nt, Artificial Sequence
  SARS-CoV-2__MT890230.1__non-structural protein 3 (NSP3) mRNA gc
aggagaaagcuuaccauggcccccaccaaggugaccuucggcgacgacacggucaucgaggugcagggguacaagagcgugaacaucaccuucgagcuggacgagcgcaucgacaagguccucaacgagaagugcuccgccuacaccguggagcugggcaccgaggugaacgaguucgcgugcgucguggccgacgccgugaucaagacgcugcagccggucagcgagcuccugaccccccuggggaucgaccucgacgagugguccauggccaccuacuaccuguucgacgagagcggcgaguucaagcuggccucccacauguacugcagcuucuacccccccgacgaggacgaggaggagggggacugcgaggaggaggaguucgagccguccacccaguacgaguacggcacggaggacgacuaccagggcaagccccucgaguucggggcgaccagcgccgcccugcagcccgaggaggagcaggaggaggacuggcuggacgacgacucccagcagaccgugggccagcaggacgggagcgaggacaaccagaccacgaccauccagaccaucguggagguccagccccagcucgagauggagcugaccccgguggugcagacgaucgaggucaacuccuucagcggcuaccugaagcucaccgacaacguguacaucaagaacgccgacaucguggaggaggcgaagaaggucaagcccaccgugguggucaacgccgccaacguguaccugaagcacgggggcggcguggccggggcccugaacaaggcgaccaacaacgccaugcaggucgaguccgacgacuacaucgccacgaacggcccccucaagguggggggcagcugcguccuguccggccacaaccuggccaagcacugccuccacgugguggggcccaacgucaacaagggcgaggacauccagcugcugaagagcgccuacgagaacuucaaccagcacgaggugcuccuggcgccgcugcucuccgccgggaucuucggcgccgaccccauccacagccugcgggugugcgucgacaccgugcgcaccaacguguaccuggccgucuucgacaagaaccucuacgacaagcugguguccagcuuccuggagaugaagagcgagaagcagguggagcagaagaucgccgagauccccaaggaggaggucaagcccuucaucaccgaguccaagccgagcguggagcagcggaagcaggacgacaagaagaucaaggcgugcguggaggaggucacgaccacccucgaggagaccaaguuccugacggagaaccugcuccuguacaucgacaucaacgggaaccugcaccccgacuccgccacccucgugagcgacaucgacaucaccuuccugaagaaggacgcccccuacaucgugggcgacgucgugcaggagggcgugcugaccgccgucgugauccccacgaagaaggccgggggcaccaccgagaugcucgcgaaggcccugcgcaaggugccgaccgacaacuacaucacgaccuaccccgggcagggccugaacggguacaccgucgaggaggccaagaccgugcucaagaagugcaaguccgccuucuacauccugcccagcaucaucuccaacgagaagcaggagauccugggcaccgugagcuggaaccuccgggagaugcuggcgcacgccgaggagacgcgcaagcugaugcccgucugcguggagaccaaggccaucguguccaccauccagcggaaguacaagggcaucaagauccaggagggggucguggacuacggcgcccgcuucuacuucuacaccagcaagacgaccguggccucccugaucaacacccucaacgaccugaacgagacccuggucacgaugccgcucggguacgugacccacggccugaaccuggaggaggcggcccgguacaugcgcagccucaaggugcccgccaccgucuccgugagcucccccgacgccgugaccgccuacaacggguaccugacgagcuccagcaagacccccgaggagcacuucaucgagaccaucucccuggcgggcagcuacaaggacuggagcuacuccggccagagcacccagcucgggaucgaguuccugaagcggggcgacaaguccgucuacuacacgagcaacccgaccaccuuccaccuggacggggaggugaucaccuucgacaaccucaagacgcugcugucccuccgcgaggugcggaccaucaaggucuucaccaccguggacaacaucaaccugcacacgcagguggucgacaugagcaugaccuacggccagcaguucggccccaccuaccuggacggggccgacgugaccaagaucaagccccacaacucccacgagggcaagacguucuacgugcucccgaacgacgacacccugcgcgucgaggccuucgaguacuaccacaccaccgaccccagcuuccuggggcgguacauguccgcccucaaccacacgaagaaguggaaguacccccaggugaacggccugaccagcaucaagugggccgacaacaacugcuaccuggcgaccgcccuccugacccugcagcagaucgagcucaaguucaaccccccggcccugcaggacgccuacuaccgcgcgcgggccggggaggccgccaacuucugcgcccugauccucgcguacugcaacaagacggugggcgagcugggcgacguccgcgagaccauguccuaccuguuccagcacgccaaccucgacagcugcaagcgggugcugaacgucgugugcaagaccugcgggcagcagcagaccacccugaagggcguggaggccgucauguacauggggacgcucuccuacgagcaguucaagaagggcgugcagauccccugcaccugcgggaagcaggccaccaaguaccuggugcagcaggagagcuccuucgucaugaugagcgccccccccgcgcaguacgagcugaagcacggcaccuucacgugcgccuccgaguacaccggcaacuaccagugcgggcacuacaagcacaucaccagcaaggagacccucuacugcaucgacggcgcccugcugacgaagagcuccgaguacaaggggccgaucaccgacguguucuacaaggagaacagcuacaccaccacgaucaagcccgugaccuacaagcucgacggcgucgugugcaccgagaucgaccccaagcuggacaacuacuacaagaaggacaacuccuacuucaccgagcagcccaucgaccuggugccgaaccagcccuaccccaacgccagcuucgacaacuucaaguucgucugcgacaacaucaaguucgccgacgaccucaaccagcugacgggguacaagaagcccgcgucccgcgagcugaaggugaccuucuucccggaccucaacggcgacguggucgccaucgacuacaagcacuacacccccagcuucaagaagggcgccaagcugcugcacaagcccaucguguggcacgugaacaacgccaccaacaaggcgacguacaagcccaacaccuggugcauccggugccucugguccaccaagccggucgagaccagcaacuccuucgacgugcugaagagcgaggacgcccaggggauggacaaccuggccugcgaggaccucaagcccguguccgaggaggucguggagaaccccacgauccagaaggacgugcuggagugcaacgucaagaccaccgagguggugggcgacaucauccugaagcccgccaacaacagccucaagaucaccgaggaggucgggcacacggaccugauggccgcguacguggacaacuccagccugaccaucaagaagccgaacgagcucucccgcgugcugggccugaagacccucgccacccacgggcuggccgccgucaacagcgugcccugggacacgaucgccaacuacgcgaagcccuuccugaacaagguggucuccaccaccaccaacaucgugacgcgcugccucaaccgggugugcaccaacuacaugccguacuucuucacccugcugcuccagcugugcaccuucacccgcagcacgaacucccggaucaaggccagcaugcccaccaccaucgccaagaacaccgucaagagcgugggcaaguucugccuggaggccuccuucaacuaccucaagagccccaacuucuccaagcugaucaacaucaucaucugguuccugcuccugagcgugugccugggcucccucaucuacagcacggccgcgcuggggguccugauguccaaccucggcaugcccagcuacugcaccggguaccgcgagggcuaccugaacuccaccaacgugaccaucgccacguacugcaccggcagcaucccgugcuccgugugccugagcgggcucgacucccuggacaccuaccccagccuggagaccauccagaucacgaucuccagcuucaagugggaccucaccgccuucggccuggucgccgagugguuccuggccuacauccucuucacccgguucuucuacgugcuggggcuggcggccaucaugcagcucuucuucuccuacuucgccgugcacuucaucagcaacuccuggcugauguggcugaucaucaaccugguccagauggcccccaucagcgcgauggugcgcauguacaucuucuucgccagcuucuacuacguguggaaguccuacguccacgugguggacggcugcaacagcuccaccugcaugaugugcuacaagcggaaccgcgccacgcgggucgagugcaccaccaucgugaacgggguccgccggagcuucuacguguacgccaacggcggcaagggguucugcaagcuccacaacuggaacugcgugaacugcgacaccuucugcgccggcuccacguucaucagcgacgaggucgcgcgcgaccugucccugcaguucaagcggcccaucaacccgaccgaccagagcuccuacaucguggacagcgugaccgucaagaacggguccauccaccucuacuucgacaaggccggccagaagaccuacgagcgccacagccugucccacuucgugaaccuggacaaccuccgggccaacaacacgaaggggagccugcccaucaacgugaucgucuucgacggcaaguccaagugcgaggagagcuccgccaagagcgccuccguguacuacagccagcugaugugccagcccauccuccugcuggaccaggcgcucgugagcgacgucggcgacuccgccgagguggccgugaagauguucgacgccuacgucaacaccuucagcuccaccuucaacgugcccauggagaagcugaagacccugguggccacggcggaggccgagcucgccaagaacgucagccuggacaacgugcuguccaccuucaucagcgccgcgcgccagggguucguggacuccgacgucgagaccaaggacgugguggagugccucaagcugagccaccaguccgacaucgaggucaccggcgacagcugcaacaacuacaugcugacguacaacaagguggagaacaugaccccgcgggaccucggggccugcaucgacugcuccgcccgccacaucaacgcccagguggccaagagccacaacaucgcgcugaucuggaacgucaaggacuucaugucccugagcgagcagcuccggaagcagauccgcuccgccgccaagaagaacaaccugcccuucaagcugaccugcgccaccacgcgccagguggugaacgucgugaccaccaagaucgcccucaagggcgggugaggacuaguuauaagacugacuagcccgaugggccucccaacgggcccuccuccccuccuugcaccgagauuaauaaaaaaaaaaaaaaaaaaaaaaaaaaaaaaaaaaaaaaaaaaaaaaaaaaaaaaaaaaaaaaaaugcaucccccccccccccccccccccccccccccccaaaggcucuuuucagagccaccagaauu

SEQ ID NO: 21415 - RNA, 6058 nt, Artificial Sequence
  SARS-CoV-2__MT890285.1__non-structural protein 3 (NSP3) mRNA gc
aggagaaagcuuaccauggcccccaccaaggugaccuucggcgacgacacggucaucgaggugcagggguacaagagcgugaacaucaccuucgagcuggacgagcgcaucgacaagguccucaacgagaagugcuccgccuacaccguggagcugggcaccgaggugaacgaguucgcgugcgucguggccgacgccgugaucaagacgcugcagccggucagcgagcuccugaccccccuggggaucgaccucgacgagugguccauggccaccuacuaccuguucgacgagagcggcgaguucaagcuggccucccacauguacugcagcuucuacccccccgacgaggacgaggaggagggggacugcgaggaggaggaguucgagccguccacccaguacgaguacggcacggaggacgacuaccagggcaagccccucgaguucggggcgaccagcgccgcccugcagcccgaggaggagcaggaggaggacuggcuggacgacgacucccagcagaccgugggccagcaggacgggagcgaggacaaccagaccacgaccauccagaccaucguggagguccagccccagcucgagauggagcugaccccgguggugcagacgaucgaggucaacuccuucagcggcuaccugaagcucaccgacaacguguacaucaagaacgccgacaucguggaggaggcgaagaaggucaagcccaccgugguggucaacgccgccaacguguaccugaagcacgggggcggcguggccggggcccugaacaaggcgaccaacaacgccaugcaggucgaguccgacgacuacaucgccacgaacggcccccucaagguggggggcagcugcguccuguccggccacaaccuggccaagcacugccuccacgugguggggcccaacgucaacaagggcgaggacauccagcugcugaagagcgccuacgagaacuucaaccagcacgaggugcuccuggcgccgcugcucuccgccgggaucuucggcgccgaccccauccacagccugcgggugugcgucgacaccgugcgcaccaacguguaccuggccgucuucgacaagaaccucuacgacaagcugguguccagcuuccuggagaugaagagcgagaagcagguggagcagaagaucgccgagauccccaaggaggaggucaagcccuucaucaccgaguccaagccgagcguggagcagcggaagcaggacgacaagaagaucaaggcgugcguggaggaggucacgaccacccucgaggagaccaaguuccugacggagaaccugcuccuguacaucgacaucaacgggaaccugcaccccgacuccgccacccucgugagcgacaucgacaucaccuuccugaagaaggacgcccccuacaucgugggcgacgucgugcaggagggcgugcugaccgccgucgugauccccacgaagaaggccgggggcaccaccgagaugcucgcgaaggcccugcgcaaggugccgaccgacaacuacaucacgaccuaccccgggcagggccugaacggguacaccgucgaggaggccaagaccgugcucaagaagugcaaguccgccuucuacauccugcccagcaucaucuccaacgagaagcaggagauccugggcaccgugagcuggaaccuccgggagaugcuggcgcacgccgaggagacgcgcaagcugaugcccgucugcguggagaccaaggccaucguguccaccauccagcggaaguacaagggcaucaagauccaggagggggucguggacuacggcgcccgcuucuacuucuacaccagcaagacgaccguggccucccugaucaacacccucaacgaccugaacgagacccuggucacgaugccgcucggguacgugacccacggccugaaccuggaggaggcggcccgguacaugcgcagccucaaggugcccgccaccgucuccgugagcucccccgacgccgugaccgccuacaacggguaccugacgagcuccagcaagacccccgaggagcacuucaucgagaccaucucccuggcgggcagcuacaaggacuggagcuacuccggccagagcacccagcucgggaucgaguuccugaagcggggcgacaaguccgucuacuacacgagcaacccgaccaccuuccaccuggacggggaggugaucaccuucgacaaccucaagacgcugcugucccuccgcgaggugcggaccaucaaggucuucaccaccguggacaacaucaaccugcacacgcagguggucgacaugagcaugaccuacggccagcaguucggccccaccuaccuggacggggccgacgugaccaagaucaagccccacaacucccacgagggcaagacguucuacgugcucccgaacgacgacacccugcgcgucgaggccuucgaguacuaccacaccaccgaccccagcuuccuggggcgguacauguccgcccucaaccacacgaagaaguggaaguacccccaggugaacggccugaccagcaucaagugggccgacaacaacugcuaccuggcgaccgcccuccugacccugcagcagaucgagcucaaguucaaccccccggcccugcaggacgccuacuaccgcgcgcgggccggggaggccgccaacuucugcgcccugauccucgcguacugcaacaagacggugggcgagcugggcgacguccgcgagaccauguccuaccuguuccagcacgccaaccucgacagcugcaagcgggugcugaacgucgugugcaagaccugcgggcagcagcagaccacccugaagggcguggaggccgucauguacauggggacgcucuccuacgagcaguucaagaagggcgugcagauccccugcaccugcgggaagcaggccaccaaguaccuggugcagcaggagagccccuucgucaugauguccgcccccccggcgcaguacgagcugaagcacggcaccuucacgugcgccagcgaguacaccggcaacuaccagugcgggcacuacaagcacaucaccuccaaggagacccucuacugcaucgacggcgcccugcugacgaagagcagcgaguacaaggggcccaucaccgacguguucuacaaggagaacuccuacaccaccacgaucaagcccgugaccuacaagcucgacggcgucgugugcaccgagaucgaccccaagcuggacaacuacuacaagaaggacaacagcuacuucaccgagcagccgaucgaccuggugcccaaccagcccuaccccaacgccuccuucgacaacuucaaguucgucugcgacaacaucaaguucgccgacgaccucaaccagcugacgggguacaagaagccggcgagccgcgagcugaaggugaccuucuuccccgaccucaacggcgacguggucgccaucgacuacaagcacuacacccccuccuucaagaagggcgccaagcugcugcacaagcccaucguguggcacgugaacaacgccaccaacaaggcgacguacaagccgaacaccuggugcauccggugccucuggagcaccaagcccgucgagaccuccaacagcuucgacgugcugaaguccgaggacgcccaggggauggacaaccuggccugcgaggaccucaagcccgugagcgaggaggucguggagaaccccacgauccagaaggacgugcuggagugcaacgucaagaccaccgagguggugggcgacaucauccugaagccggccaacaacucccucaagaucaccgaggaggucgggcacacggaccugauggccgcguacguggacaacagcucccugaccaucaagaagcccaacgagcucagccgcgugcugggccugaagacccucgccacccacgggcuggccgccgucacguccgugcccugggacaccaucgccaacuacgcgaagccguuccugaacaagguggucagcaccaccacgaacaucgugacccgcugccucaaccgggugugcaccaacuacaugcccuacuucuucacccugcugcuccagcugugcaccuucacgcgcuccaccaacagccggaucaaggccuccaugcccaccaccaucgccaagaacacggucaagagcgugggcaaguucugccuggaggccagcuucaacuaccucaagucccccaacuucagcaagcugaucaacaucaucaucugguuccugcuccuguccgugugccugggcagccucaucuacuccaccgccgcgcuggggguccugaugagcaaccucggcaugccguccuacugcaccggguaccgcgagggcuaccugaacagcaccaacgugacgaucgccaccuacugcaccggcuccauccccugcagcgugugccuguccgggcucgacagccuggacaccuaccccucccuggagacgauccagaucaccaucagcuccuucaagugggaccucaccgccuucggccuggucgccgagugguuccuggccuacauccucuucacccgguucuucuacgugcuggggcuggcggccaucaugcagcucuucuucagcuacuucgccgugcacuucaucuccaacagcuggcugauguggcugaucaucaaccugguccagauggcccccaucuccgcgauggugcgcauguacaucuucuucgccagcuucuacuacguguggaagagcuacguccacgugguggacggcugcaacuccagcacgugcaugaugugcuacaagcggaaccgcgccacccgggucgagugcaccaccaucgugaacgggguccgccgguccuucuacguguacgccaacggcggcaagggguucugcaagcuccacaacuggaacugcgugaacugcgacacguucugcgccggcagcaccuucaucuccgacgaggucgcgcgcgaccugagccugcaguucaagcggccgaucaaccccaccgaccaguccagcuacaucguggacuccgugaccgucaagaacgggagcauccaccucuacuucgacaaggccggccagaagacguacgagcgccacucccugagccacuucgugaaccuggacaaccuccgggccaacaacaccaaggggucccugcccaucaacgugaucgucuucgacggcaagagcaagugcgaggaguccagcgccaaguccgccagcguguacuacucccagcugaugugccagcccauccuccugcuggaccaggcgcucgugagcgacgucggcgacagcgccgagguggccgugaagauguucgacgccuacgucaacaccuucuccagcaccuucaacgugccgauggagaagcugaagacgcugguggccaccgcggaggccgagcucgccaagaacgucucccuggacaacgugcugagcaccuucaucuccgccgcgcgccagggguucguggacagcgacgucgagaccaaggacgugguggagugccucaagcugucccaccagagcgacaucgaggucacgggcgacuccugcaacaacuacaugcugaccuacaacaagguggagaacaugaccccccgggaccucggggccugcaucgacugcagcgcccgccacaucaacgcccagguggccaagucccacaacaucgcgcugaucuggaacgucaaggacuucaugagccuguccgagcagcuccggaagcagauccgcagcgccgccaagaagaacaaccugcccuucaagcugaccugcgccacgacccgccagguggugaacgucgugaccaccaagaucgcccucaagggcgggugaggacuaguuauaagacugacuagcccgaugggccucccaacgggcccuccuccccuccuugcaccgagauuaauaaaaaaaaaaaaaaaaaaaaaaaaaaaaaaaaaaaaaaaaaaaaaaaaaaaaaaaaaaaaaaaaugcaucccccccccccccccccccccccccccccccaaaggcucuuuucagagccaccagaauu

SEQ ID NO: 21416 - RNA, 6058 nt, Artificial Sequence
  SARS-CoV-2__MT890295.1__non-structural protein 3 (NSP3) mRNA gc
aggagaaagcuuaccauggcccccaccaaggugaccuucggcgacgacacggucaucgaggugcagggguacaagagcgugaacaucaccuucgagcuggacgagcgcaucgacaagguccucaacgagaagugcuccgccuacaccguggagcugggcaccgaggugaacgaguucgcgugcgucguggccgacgccgugaucaagacgcugcagccggucagcgagcuccugaccccccuggggaucgaccucgacgagugguccauggccaccuacuaccuguucgacgagagcggcgaguucaagcuggccucccacauguacugcagcuucuacccccccgacgaggacgaggaggagggggacugcgaggaggaggaguucgagccguccacccaguacgaguacggcacggaggacgacuaccagggcaagccccucgaguucggggcgaccagcgccgcccugcagcccgaggaggagcaggaggaggacuggcuggacgacgacucccagcagaccgugggccagcaggacgggagcgaggacaaccacaccacgaccauccagaccaucguggagguccagccccagcucgagauggagcugaccccgguggugcagacgaucgaggucaacuccuucagcggcuaccugaagcucaccgacaacguguacaucaagaacgccgacaucguggaggaggcgaagaaggucaagcccaccgugguggucaacgccgccaacguguaccugaagcacgggggcggcguggccggggcccugaacaaggcgaccaacaacgccaugcaggucgaguccgacgacuacaucgccacgaacggcccccucaagguggggggcagcugcguccuguccggccacaaccuggccaagcacugccuccacgugguggggcccaacgucaacaagggcgaggacauccagcugcugaagagcgccuacgagaacuucaaccagcacgaggugcuccuggcgccgcugcucuccgccgggaucuucggcgccgaccccauccacagccugcgggugugcgucgacaccgugcgcaccaacguguaccuggccgucuucgacaagaaccucuacgacaagcugguguccagcuuccuggagaugaagagcgagaagcagguggagcagaagaucgccgagauccccaaggaggaggucaagcccuucaucaccgaguccaagccgagcguggagcagcggaagcaggacgacaagaagaucaaggcgugcguggaggaggucacgaccacccucgaggagaccaaguuccugacggagaaccugcuccuguacaucgacaucaacgggaaccugcaccccgacuccgccacccucgugagcgacaucgacaucaccuuccugaagaaggacgcccccuacaucgugggcgacgucgugcaggagggcgugcugaccgccgucgugauccccacgaagaaggccgggggcaccaccgagaugcucgcgaaggcccugcgcaaggugccgaccgacaacuacaucacgaccuaccccgggcagggccugaacggguacaccgucgaggaggccaagaccgugcucaagaagugcaaguccgccuucuacauccugcccagcaucaucuccaacgagaagcaggagauccugggcaccgugagcuggaaccuccgggagaugcuggcgcacgccgaggagacgcgcaagcugaugcccgucugcguggagaccaaggccaucguguccaccauccagcggaaguacaagggcaucaagauccaggagggggucguggacuacggcgcccgcuucuacuucuacaccagcaagacgaccguggccucccugaucaacacccucaacgaccugaacgagacccuggucacgaugccgcucggguacgugacccacggccugaaccuggaggaggcggcccgguacaugcgcagccucaaggugcccgccaccgucuccgugagcucccccgacgccgugaccgccuacaacggguaccugacgagcuccagcaagacccccgaggagcacuucaucgagaccaucucccuggcgggcagcuacaaggacuggagcuacuccggccagagcacccagcucgggaucgaguuccugaagcggggcgacaaguccgucuacuacacgagcaacccgaccaccuuccaccuggacggggaggugaucaccuucgacaaccucaagacgcugcugucccuccgcgaggugcggaccaucaaggucuucaccaccguggacaacaucaaccugcacacgcagguggucgacaugagcaugaccuacggccagcaguucggccccaccuaccuggacggggccgacgugaccaagaucaagccccacaacucccacgagggcaagacguucuacgugcucccgaacgacgacacccugcgcgucgaggccuucgaguacuaccacaccaccgaccccagcuuccuggggcgguacauguccgcccucaaccacacgaagaaguggaaguacccccaggugaacggccugaccagcaucaagugggccgacaacaacugcuaccuggcgaccgcccuccugacccugcagcagaucgagcucaaguucaaccccccggcccugcaggacgccuacuaccgcgcgcgggccggggaggccgccaacuucugcgcccugauccucgcguacugcaacaagacggugggcgagcugggcgacguccgcgagaccauguccuaccuguuccagcacgccaaccucgacagcugcaagcgggugcugaacgucgugugcaagaccugcgggcagcagcagaccacccugaagggcguggaggccgucauguacauggggacgcucuccuacgagcaguucaagaagggcgugcagauccccugcaccugcgggaagcaggccaccaaguaccuggugcagcaggagagccccuucgucaugauguccgcccccccggcgcaguacgagcugaagcacggcaccuucacgugcgccagcgaguacaccggcaacuaccagugcgggcacuacaagcacaucaccuccaaggagacccucuacugcaucgacggcgcccugcugacgaagagcagcgaguacaaggggcccaucaccgacguguucuacaaggagaacuccuacaccaccacgaucaagcccgugaccuacaagcucgacggcgucgugugcaccgagaucgaccccaagcuggacaacuacuacaagaaggacaacagcuacuucaccgagcagccgaucgaccuggugcccaaccagcccuaccccaacgccuccuucgacaacuucaaguucgucugcgacaacaucaaguucgccgacgaccucaaccagcugacgggguacaagaagccggcgagccgcgagcugaaggugaccuucuuccccgaccucaacggcgacguggucgccaucgacuacaagcacuacacccccuccuucaagaagggcgccaagcugcugcacaagcccaucguguggcacgugaacaacgccaccaacaaggcgacguacaagccgaacaccuggugcauccggugccucuggagcaccaagcccgucgagaccuccaacagcuucgacgugcugaaguccgaggacgcccaggggauggacaaccuggccugcgaggaccucaagcccgugagcgaggaggucguggagaaccccacgauccagaaggacgugcuggagugcaacgucaagaccaccgagguggugggcgacaucauccugaagccggccaacaacucccucaagaucaccgaggaggucgggcacacggaccugauggccgcguacguggacaacagcucccugaccaucaagaagcccaacgagcucagccgcgugcugggccugaagacccucgccacccacgggcuggccgccgucaacuccgugcccugggacacgaucgccaacuacgcgaagccguuccugaacaagguggucagcaccaccaccaacaucgugacgcgcugccucaaccgggugugcaccaacuacaugcccuacuucuucacccugcugcuccagcugugcaccuucacccgcuccacgaacagccggaucaaggccuccaugcccaccaccaucgccaagaacaccgucaagagcgugggcaaguucugccuggaggccagcuucaacuaccucaagucccccaacuucagcaagcugaucaacaucaucaucugguuccugcuccuguccgugugccugggcagccucaucuacuccacggccgcgcuggggguccugaugagcaaccucggcaugccguccuacugcaccggguaccgcgagggcuaccugaacagcaccaacgugaccaucgccacguacugcaccggcuccauccccugcagcgugugccuguccgggcucgacagccuggacaccuaccccucccuggagaccauccagaucacgaucagcuccuucaagugggaccucaccgccuucggccuggucgccgagugguuccuggccuacauccucuucacccgguucuucuacgugcuggggcuggcggccaucaugcagcucuucuucagcuacuucgccgugcacuucaucuccaacagcuggcugauguggcugaucaucaaccugguccagauggcccccaucuccgcgauggugcgcauguacaucuucuucgccagcuucuacuacguguggaagagcuacguccacgugguggacggcugcaacuccagcaccugcaugaugugcuacaagcggaaccgcgccacgcgggucgagugcaccaccaucgugaacgggguccgccgguccuucuacguguacgccaacggcggcaagggguucugcaagcuccacaacuggaacugcgugaacugcgacaccuucugcgccggcagcacguucaucuccgacgaggucgcgcgcgaccugagccugcaguucaagcggccgaucaaccccaccgaccaguccagcuacaucguggacuccgugaccgucaagaacgggagcauccaccucuacuucgacaaggccggccagaagaccuacgagcgccacucccugagccacuucgugaaccuggacaaccuccgggccaacaacacgaaggggucccugcccaucaacgugaucgucuucgacggcaagagcaagugcgaggaguccagcgccaaguccgccagcguguacuacucccagcugaugugccagcccauccuccugcuggaccaggcgcucgugagcgacgucggcgacagcgccgagguggccgugaagauguucgacgccuacgucaacaccuucuccagcaccuucaacgugccgauggagaagcugaagacccugguggccacggcggaggccgagcucgccaagaacgucucccuggacaacgugcugagcaccuucaucuccgccgcgcgccagggguucguggacagcgacgucgagaccaaggacgugguggagugccucaagcugucccaccagagcgacaucgaggucaccggcgacuccugcaacaacuacaugcugacguacaacaagguggagaacaugaccccccgggaccucggggccugcaucgacugcagcgcccgccacaucaacgcccagguggccaagucccacaacaucgcgcugaucuggaacgucaaggacuucaugagccuguccgagcagcuccggaagcagauccgcagcgccgccaagaagaacaaccugcccuucaagcugaccugcgccaccacgcgccagguggugaacgucgugaccaccaagaucgcccucaagggcgggugaggacuaguuauaagacugacuagcccgaugggccucccaacgggcccuccuccccuccuugcaccgagauuaauaaaaaaaaaaaaaaaaaaaaaaaaaaaaaaaaaaaaaaaaaaaaaaaaaaaaaaaaaaaaaaaaugcaucccccccccccccccccccccccccccccccaaaggcucuuuucagagccaccagaauu

SEQ ID NO: 21417 - RNA, 6058 nt, Artificial Sequence
  SARS-CoV-2__MT890338.1__non-structural protein 3 (NSP3) mRNA gc
aggagaaagcuuaccauggcccccaccaaggugaccuucggcgacgacacggucaucgaggugcagggguacaagagcgugaacaucaccuucgagcuggacgagcgcaucgacaagguccucaacgagaagugcuccgccuacaccguggagcugggcaccgaggugaacgaguucgcgugcgucguggccgacgccgugaucaagacgcugcagccggucagcgagcuccugaccccccuggggaucgaccucgacgagugguccauggccaccuacuaccuguucgacgagagcggcgaguucaagcuggccucccacauguacugcagcuucuacccccccgacgaggacgaggaggagggggacugcgaggaggaggaguucgagccguccacccaguacgaguacggcacggaggacgacuaccagggcaagccccucgaguucggggcgaccagcgccgcccugcagcccgaggaggagcaggaggaggacuggcuggacgacgacucccagcagaccgugggccagcaggacgggagcgaggacaaccagaccacgaccauccagaccaucguggagguccagccccagcucgagauggagcugaccccgguggugcagacgaucgaggucaacuccuucagcggcuaccugaagcucaccgacaacguguacaucaagaacgccgacaucguggaggaggcgaagaaggucaagcccaccgugguggucaacgccgccaacguguaccugaagcacgggggcggcguggccggggcccugaacaaggcgaccaacaacgccaugcaggucgaguccgacgacuacaucgccacgaacggcccccucaagguggggggcagcugcguccuguccggccacaaccuggccaagcacugccuccacgugguggggcccaacgucaacaagggcgaggacauccagcugcugaagagcgccuacgagaacuucaaccagcacgaggugcuccuggcgccgcugcucuccgccgggaucuucggcgccgaccccauccacagccugcgggugugcgucgacaccgugcgcaccaacguguaccuggccgucuucgacaagaaccucuacgacaagcugguguccagcuuccuggagaugaagagcgagaagcagguggagcagaagaucgccgagauccccaaggaggaggucaagcccuucaucaccgaguccaagccgagcguggagcagcggaagcaggacgacaagaagaucaaggcgugcguggaggaggucacgaccacccucgaggagaccaaguuccugacggagaaccugcuccuguacaucgacaucaacgggaaccugcaccccgacuccgccacccucgugagcgacaucgacaucaccuuccugaagaaggacgcccccuacaucgugggcgacgucgugcaggagggcgugcugaccgccgucgugauccccacgaagaaggccgggggcaccaccgagaugcucgcgaaggcccugcgcaaggugccgaccgacaacuacaucacgaccuaccccgggcagggccugaacggguacaccgucgaggaggccaagaccgugcucaagaagugcaaguccgccuucuacauccugcccagcaucaucuccaacgagaagcaggagauccugggcaccgugagcuggaaccuccgggagaugcuggcgcacgccgaggagacgcgcaagcugaugcccgucugcguggagaccaaggccaucguguccaccauccagcggaaguacaagggcaucaagauccaggagggggucguggacuacggcgcccgcuucuacuucuacaccagcaagacgaccguggccucccugaucaacacccucaacgaccugaacgagacccuggucacgaugccgcucggguacgugacccacggccugaaccuggaggaggcggcccgguacaugcgcagccucaaggugcccgccaccgucuccgugagcucccccgacgccgugaccgccuacaacggguaccugacgagcuccagcaagacccccgaggagcacuucaucgagaccaucucccuggcgggcagcuacaaggacuggagcuacuccggccagagcacccagcucgggaucgaguuccugaagcggggcgacaaguccgucuacuacacgagcaacccgaccaccuuccaccuggacggggaggugaucaccuucgacaaccucaagacgcugcugucccuccgcgaggugcggaccaucaaggucuucaccaccguggacaacaucaaccugcacacgcagguggucgacaugagcaugaccuacggccagcaguucggccccaccuaccuggacggggccgacgugaccaagaucaagccccacaacucccacgagggcaagacguucuacgugcucccgaacgacgacacccugcgcgucgaggccuucgaguacuaccacaccaccgaccccagcuuccuggggcgguacauguccgcccucaaccacacgaagaaguggaaguacccccaggugaacggccugaccagcaucaagugggccgacaacaacugcuaccuggcgaccgcccuccugacccugcagcagaucgagcucaaguucaaccccccggcccugcaggacgccuacuaccgcgcgcgggccggggaggccgccaacuucugcgcccugauccucgcguacugcaacaagacggugggcgagcugggcgacguccgcgagaccauguccuaccuguuccagcacgccaaccucgacagcugcaagcgggugcugaacgucgugugcaagaccugcgggcagcagcagaccacccugaagggcguggaggccgucauguacauggggacgcucuccuacgagcaguucaagaagggcgugcagauccccugcaccugcgggaagcaggccaccaaguaccuggugcagcaggagagccccuucgucaugauguccgcccccccggcgcaguacgagcugaagcacggcaccuucacgugcgccagcgaguacaccggcaacuaccagugcgggcacuacaagcacaucaccuccaaggagacccucuacugcaucgacggcgcccugcugacgaagagcagcgaguacaaggggcccaucaccgacguguucuacaaggagaacuccuacaccaccacgaucaagcccgugaccuacaagcucgacggcgucgugugcaccgagaucgaccccaagcuggacaacuacuacaagaaggacaacagcuacuucaccgagcagccgaucgaccuggugcccaaccagcccuaccccaacgccggguucgacaacuucaaguucgucugcgacaacaucaaguucgccgacgaccucaaccagcugacgggcuacaagaagccggcgucccgcgagcugaaggugaccuucuuccccgaccucaacggcgacguggucgccaucgacuacaagcacuacacccccagcuucaagaagggggccaagcugcugcacaagcccaucguguggcacgugaacaacgccaccaacaaggcgacguacaagccgaacaccuggugcauccggugccucugguccaccaagcccgucgagaccagcaacuccuucgacgugcugaagagcgaggacgcccagggcauggacaaccuggccugcgaggaccucaagcccguguccgaggaggucguggagaaccccacgacccagaaggacgugcuggagugcaacgucaagaccaccgagguggugggggacaucauccugaagccggccaacaacagccucaagaucacggaggaggucggccacaccgaccugauggccgcguacguggacaacuccagccugaccaucaagaagcccaacgagcucucccgcgugcuggggcugaagacccucgccacgcacggccuggccgccgucaacagcgugcccugggacaccaucgccaacuacgcgaagccguuccugaacaagguggucuccaccaccacgaacaucgugacccgcugccucaaccgggugugcaccaacuacaugcccuacuucuucacccugcugcuccagcugugcaccuucacgcgcagcaccaacucccggaucaaggccagcaugcccaccaccaucgccaagaacacggucaaguccgugggcaaguucugccuggaggccagcuucaacuaccucaagagccccaacuucuccaagcugaucaacaucaucaucugguuccugcuccugagcgugugccuggggucccucaucuacagcaccgccgcgcugggcguccugauguccaaccucgggaugccgagcuacugcaccggcuaccgcgagggcuaccugaacuccaccaacgugacgaucgccaccuacugcaccgggagcauccccugcuccgugugccugagcggccucgacucccuggacaccuaccccagccuggagacgauccagaucaccaucuccagcuucaagugggaccucaccgccuucgggcuggucgccgagugguuccuggccuacauccucuucacccgguucuucuacgugcugggccuggcggccaucaugcagcucuucuucuccuacuucgccgugcacuucaucagcaacuccuggcugauguggcugaucaucaaccugguccagauggcccccaucagcgcgauggugcgcauguacaucuucuucgccuccuucuacuacguguggaagagcuacguccacgugguggacgggugcaacagcuccacgugcaugaugugcuacaagcggaaccgcgccacccgggucgagugcaccaccaucgugaacggcguccgccggagcuucuacguguacgccaacggcgggaagggcuucugcaagcuccacaacuggaacugcgugaacugcgacacguucugcgccggguccaccuucaucagcgacgaggucgcgcgcgaccugucccugcaguucaagcggccgaucaaccccaccgaccagagcuccuacaucguggacagcgugaccgucaagaacggcuccauccaccucuacuucgacaaggccgggcagaagacguacgagcgccacagccugucccacuucgugaaccuggacaaccuccgggccaacaacaccaagggcagccugcccaucaacgugaucgucuucgacggcaaguccaagugcgaggagagcuccgccaagagcgccuccguguacuacagccagcugaugugccagcccauccuccugcuggaccaggcgcucguguccgacgucggggacagcgccgagguggccgugaagauguucgacgccuacgucaacaccuucagcuccaccuucaacgugccgauggagaagcugaagacgcugguggccaccgcggaggccgagcucgccaagaacgucagccuggacaacgugcuguccaccuucaucagcgccgcgcgccagggcuucguggacuccgacgucgagaccaaggacgugguggagugccucaagcugagccaccaguccgacaucgaggucacgggggacagcugcaacaacuacaugcugaccuacaacaagguggagaacaugaccccccgggaccucggcgccugcaucgacugcuccgcccgccacaucaacgcccagguggccaagagccacaacaucgcgcugaucuggaacgucaaggacuucaugucccugagcgagcagcuccggaagcagauccgcuccgccgccaagaagaacaaccugcccuucaagcugaccugcgccacgacccgccagguggugaacgucgugaccaccaagaucgcccucaaggggggcugaggacuaguuauaagacugacuagcccgaugggccucccaacgggcccuccuccccuccuugcaccgagauuaauaaaaaaaaaaaaaaaaaaaaaaaaaaaaaaaaaaaaaaaaaaaaaaaaaaaaaaaaaaaaaaaaugcaucccccccccccccccccccccccccccccccaaaggcucuuuucagagccaccagaauu

SEQ ID NO: 21418 - RNA, 6058 nt, Artificial Sequence
  SARS-CoV-2__MT890340.1__non-structural protein 3 (NSP3) mRNA gc
aggagaaagcuuaccauggcccccaccaaggugaccuucggcgacgacacggucaucgaggugcagggguacaagagcgugaacaucaccuucgagcuggacgagcgcaucgacaagguccucaacgagaagugcuccgccuacaccguggagcugggcaccgaggugaacgaguucgcgugcgucguggccgacgccgugaucaagacgcugcagccggucagcgagcuccugaccccccuggggaucgaccucgacgagugguccauggccaccuacuaccuguucgacgagagcggcgaguucaagcuggccucccacauguacugcagcuucuacccccccgacgaggacgaggaggagggggacugcgaggaggaggaguucgagccguccacccaguacgaguacggcacggaggacgacuaccagggcaagccccucgaguucggggcgaccagcgccgcccugcagcccgaggaggagcaggaggaggacuggcuggacgacgacucccagcagaccgugggccagcaggacgggagcgaggacaaccagaccacgaccauccagaccaucguggagguccagccccagcucgagauggagcugaccccgguggugcagacgaucgaggucaacuccuucagcggcuaccugaagcucaccgacaacguguacaucaagaacgccgacaucguggaggaggcgaagaaggucaagcccaccgugguggucaacgccgccaacguguaccugaagcacgggggcggcguggccggggcccugaacaaggcgaccaacaacgccaugcaggucgaguccgacgacuacaucgccacgaacggcccccucaagguggggggcagcugcguccuguccggccacaaccuggccaagcacugccuccacgugguggggcccaacgucaacaagggcgaggacauccagcugcugaagagcgccuacgagaacuucaaccagcacgaguuccuccuggcgccgcugcucuccgccgggaucuucggcgccgaccccauccacagccugcgggugugcguggacaccguccgcaccaacguguaccuggccguguucgacaagaaccucuacgacaagcuggucuccagcuuccuggagaugaagagcgagaagcagguggagcagaagaucgccgagauccccaaggaggaggugaagcccuucaucaccgaguccaagccgagcgucgagcagcggaagcaggacgacaagaagaucaaggcgugcguggaggaggugacgaccacccucgaggagaccaaguuccugacggagaaccugcuccuguacaucgacaucaacgggaaccugcaccccgacuccgccacccucgucagcgacaucgacaucaccuuccugaagaaggacgcccccuacaucgugggcgacgugguccaggagggcgugcugaccgccguggucauccccacgaagaaggccgggggcaccaccgagaugcucgcgaaggcccugcgcaaggugccgaccgacaacuacaucacgaccuaccccgggcagggccugaacggguacaccguggaggaggccaagaccguccucaagaagugcaaguccgccuucuacauccugcccagcaucaucuccaacgagaagcaggagauccugggcaccgugagcuggaaccuccgggagaugcuggcgcacgccgaggagacgcgcaagcugaugcccgugugcgucgagaccaaggccaucguguccaccauccagcggaaguacaagggcaucaagauccaggaggggguggucgacuacggcgcccgcuucuacuucuacaccagcaagacgaccguggccucccugaucaacacccucaacgaccugaacgagacccuggugacgaugccgcucggguacgucacccacggccugaaccuggaggaggcggcccgguacaugcgcagccucaaggugcccgccaccguguccgucagcucccccgacgccgugaccgccuacaacggguaccugacgagcuccagcaagacccccgaggagcacuucaucgagaccaucucccuggcgggcagcuacaaggacuggagcuacuccggccagagcacccagcucgggaucgaguuccugaagcggggcgacaaguccguguacuacacgagcaacccgaccaccuuccaccuggacggggaggucaucaccuucgacaaccucaagacgcugcugucccuccgcgaggugcggaccaucaagguguucaccaccgucgacaacaucaaccugcacacgcaggugguggacaugagcaugaccuacggccagcaguucggccccaccuaccuggacggggccgacgucaccaagaucaagccccacaacucccacgagggcaagacguucuacgugcucccgaacgacgacacccugcgcguggaggccuucgaguacuaccacaccaccgaccccagcuuccuggggcgguacauguccgcccucaaccacacgaagaaguggaaguacccccaggucaacggccugaccagcaucaagugggccgacaacaacugcuaccuggcgaccgcccuccugacccugcagcagaucgagcucaaguucaaccccccggcccugcaggacgccuacuaccgcgcgcgggccggggaggccgccaacuucugcgcccugauccucgcguacugcaacaagacggugggcgagcugggcgacgugcgcgagaccauguccuaccuguuccagcacgccaaccucgacagcugcaagcggguccugaacguggucugcaagaccugcgggcagcagcagaccacccugaagggcguggaggccgugauguacauggggacgcucuccuacgagcaguucaagaagggcguccagauccccugcaccugcgggaagcaggccaccaaguaccuggugcagcaggagagccccuucgugaugauguccgcccccccggcgcaguacgagcugaagcacggcaccuucacgugcgccagcgaguacaccggcaacuaccagugcgggcacuacaagcacaucaccuccaaggagacccucuacugcaucgacggcgcccugcugacgaagagcagcgaguacaaggggcccaucaccgacgucuucuacaaggagaacuccuacaccaccacgaucaagcccgugaccuacaagcucgacggcguggucugcaccgagaucgaccccaagcuggacaacuacuacaagaaggacaacagcuacuucaccgagcagccgaucgaccuggugcccaaccagcccuaccccaacgccuccuucgacaacuucaaguucgugugcgacaacaucaaguucgccgacgaccucaaccagcugacgggguacaagaagccggcgagccgcgagcugaaggucaccuucuuccccgaccucaacggcgacgugguggccaucgacuacaagcacuacacccccuccuucaagaagggcgccaagcugcugcacaagcccaucgucuggcacgugaacaacgccaccaacaaggcgacguacaagccgaacaccuggugcauccggugccucuggagcaccaagcccguggagaccuccaacagcuucgacguccugaaguccgaggacgcccaggggauggacaaccuggccugcgaggaccucaagcccgugagcgaggagguggucgagaaccccacgauccagaaggacgugcuggagugcaacgugaagaccaccgaggucgugggcgacaucauccugaagccggccaacaacucccucaagaucaccgaggagguggggcacacggaccugauggccgcguacgucgacaacagcucccugaccaucaagaagcccaacgagcucagccgcgugcugggccugaagacccucgccacccacgggcuggccgccgugaacuccguccccugggacacgaucgccaacuacgcgaagccguuccugaacaagguggugagcaccaccaccaacaucgucacgcgcugccucaaccgggugugcaccaacuacaugcccuacuucuucacccugcugcuccagcugugcaccuucacccgcuccacgaacagccggaucaaggccuccaugcccaccaccaucgccaagaacaccgugaagagcgucggcaaguucugccuggaggccagcuucaacuaccucaagucccccaacuucagcaagcugaucaacaucaucaucugguuccugcuccuguccgugugccugggcagccucaucuacuccacggccgcgcugggggugcugaugagcaaccucggcaugccguccuacugcaccggguaccgcgagggcuaccugaacagcaccaacgucaccaucgccacguacugcaccggcuccauccccugcagcgugugccuguccgggcucgacagccuggacaccuaccccucccuggagaccauccagaucacgaucagcuccuucaagugggaccucaccgccuucggccugguggccgagugguuccuggccuacauccucuucacccgguucuucuacguccuggggcuggcggccaucaugcagcucuucuucagcuacuucgccgugcacuucaucuccaacagcuggcugauguggcugaucaucaaccuggugcagauggcccccaucuccgcgaugguccgcauguacaucuucuucgccagcuucuacuacguguggaagagcuacgugcacgucguggacggcugcaacuccagcaccugcaugaugugcuacaagcggaaccgcgccacgcggguggagugcaccaccaucgucaacggggugcgccgguccuucuacgucuacgccaacggcggcaagggguucugcaagcuccacaacuggaacugcgugaacugcgacaccuucugcgccggcagcacguucaucuccgacgagguggcgcgcgaccugagccugcaguucaagcggccgaucaaccccaccgaccaguccagcuacaucgucgacuccgugaccgugaagaacgggagcauccaccucuacuucgacaaggccggccagaagaccuacgagcgccacucccugagccacuucgucaaccuggacaaccuccgggccaacaacacgaaggggucccugcccaucaacgugaucguguucgacggcaagagcaagugcgaggaguccagcgccaaguccgccagcgucuacuacucccagcugaugugccagcccauccuccugcuggaccaggcgcucgugagcgacgugggcgacagcgccgaggucgccgugaagauguucgacgccuacgugaacaccuucuccagcaccuucaacgucccgauggagaagcugaagacccugguggccacggcggaggccgagcucgccaagaacgugucccuggacaacguccugagcaccuucaucuccgccgcgcgccagggguucguggacagcgacguggagaccaaggacgucguggagugccucaagcugucccaccagagcgacaucgaggugaccggcgacuccugcaacaacuacaugcugacguacaacaaggucgagaacaugaccccccgggaccucggggccugcaucgacugcagcgcccgccacaucaacgcccagguggccaagucccacaacaucgcgcugaucuggaacgugaaggacuucaugagccuguccgagcagcuccggaagcagauccgcagcgccgccaagaagaacaaccugcccuucaagcugaccugcgccaccacgcgccaggucgugaacguggucaccaccaagaucgcccucaagggcgggugaggacuaguuauaagacugacuagcccgaugggccucccaacgggcccuccuccccuccuugcaccgagauuaauaaaaaaaaaaaaaaaaaaaaaaaaaaaaaaaaaaaaaaaaaaaaaaaaaaaaaaaaaaaaaaaaugcaucccccccccccccccccccccccccccccccaaaggcucuuuucagagccaccagaauu

SEQ ID NO: 21419 - RNA, 6058 nt, Artificial Sequence
  SARS-CoV-2__MT890346.1__non-structural protein 3 (NSP3) mRNA gc
aggagaaagcuuaccauggcccccaccaaggugaccuucggcgacgacacggucaucgaggugcagggguacaagagcgugaacaucaccuucgagcuggacgagcgcaucgacaagguccucaacgagaagugcuccgccuacaccguggagcugggcaccgaggugaacgaguucgcgugcgucguggccgacgccgugaucaagacgcugcagccggucagcgagcuccugaccccccuggggaucgaccucgacgagugguccauggccaccuacuaccuguucgacgagagcggcgaguucaagcuggccucccacauguacugcagcuucuacccccccgacgaggacgaggaggagggggacugcgaggaggaggaguucgagccguccacccaguacgaguacggcacggaggacgacuaccagggcaagccccucgaguucggggcgaccagcgccgcccugcagcccgaggaggagcaggaggaggacuggcuggacgacgacucccagcagaccgugggccagcaggacgggagcgaggacaaccagaccacgaccauccagaccaucguggagguccagccccagcucgagauggagcugaccccgguggugcagacgaucgaggucaacuccuucagcggcuaccugaagcucaccgacaacguguacaucaagaacgccgacaucguggaggaggcgaagaaggucaagcccaccgugguggucaacgccgccaacguguaccugaagcacgggggcggcguggccggggcccugaacaaggcgaccaacaacgccaugcaggucgaguccgacgacuacaucgccacgaacggcccccucaagguggggggcagcugcguccuguccggccacaaccuggccaagcacugccuccacgugguggggcccaacgucaacaagggcgaggacauccagcugcugaagagcgccuacgagaacuucaaccagcacgaggugcuccuggcgccgcugcucuccguggggaucuucggcgccgaccccauccacagccugcgggucugcguggacaccgugcgcaccaacgucuaccuggccguguucgacaagaaccucuacgacaagcugguguccagcuuccuggagaugaagagcgagaagcaggucgagcagaagaucgccgagauccccaaggaggaggugaagcccuucaucaccgaguccaagccgagcguggagcagcggaagcaggacgacaagaagaucaaggccugcgucgaggaggugacgaccacccucgaggagaccaaguuccugacggagaaccugcuccuguacaucgacaucaacgggaaccugcaccccgacuccgcgacccucgugagcgacaucgacaucaccuuccugaagaaggacgcccccuacaucgucggcgacguggugcaggagggcguccugaccgccguggugauccccacgaagaaggccgggggcaccaccgagaugcucgccaaggcgcugcgcaaggucccgaccgacaacuacaucacgaccuaccccgggcagggccugaacggguacaccguggaggaggccaagaccgugcucaagaagugcaaguccgccuucuacauccugcccagcaucaucuccaacgagaagcaggagauccugggcaccgucagcuggaaccuccgggagaugcuggcccacgcggaggagacgcgcaagcugaugcccgugugcguggagaccaaggccaucgucuccaccauccagcggaaguacaagggcaucaagauccaggagggggugguggacuacggcgcccgcuucuacuucuacaccagcaagacgaccgucgccucccugaucaacacccucaacgaccugaacgagacccuggugacgaugccgcucggguacgugacccacggccugaaccuggaggaggccgcgcgguacaugcgcagccucaagguccccgccaccguguccgugagcucccccgacgccgucaccgccuacaacggguaccugacgagcuccagcaagacccccgaggagcacuucaucgagaccaucucccuggccggcagcuacaaggacuggagcuacuccggccagagcacccagcucgggaucgaguuccugaagcggggcgacaaguccguguacuacacgagcaacccgaccaccuuccaccuggacggggaggugaucaccuucgacaaccucaagacgcugcugucccuccgcgagguccggaccaucaagguguucaccaccguggacaacaucaaccugcacacgcaggucguggacaugagcaugaccuacggccagcaguucggccccaccuaccuggacggggcggacgugaccaagaucaagccccacaacucccacgagggcaagacguucuacguccucccgaacgacgacacccugcgcguggaggccuucgaguacuaccacaccaccgaccccagcuuccuggggcgguacauguccgcccucaaccacacgaagaaguggaaguacccccaggugaacggccugaccagcaucaagugggccgacaacaacugcuaccuggccaccgcgcuccugacccugcagcagaucgagcucaaguucaaccccccggcccugcaggacgccuacuaccgcgcccgggcgggggaggccgccaacuucugcgcccugauccucgccuacugcaacaagacggucggcgagcugggcgacgugcgcgagaccauguccuaccuguuccagcacgcgaaccucgacagcugcaagcggguccugaacguggugugcaagaccugcgggcagcagcagaccacccugaagggcgucgaggccgugauguacauggggacgcucuccuacgagcaguucaagaagggcgugcagauccccugcaccugcgggaagcaggccaccaaguaccugguccagcaggagagccccuucgugaugauguccgcccccccggcccaguacgagcugaagcacggcaccuucacgugcgcgagcgaguacaccggcaacuaccagugcgggcacuacaagcacaucaccuccaaggagacccucuacugcaucgacggcgcccugcugacgaagagcagcgaguacaaggggcccaucaccgacguguucuacaaggagaacuccuacaccaccacgaucaagcccgucaccuacaagcucgacggcguggugugcaccgagaucgaccccaagcuggacaacuacuacaagaaggacaacagcuacuucaccgagcagccgaucgaccugguccccaaccagcccuaccccaacgccuccuucgacaacuucaaguucgugugcgacaacaucaaguucgccgacgaccucaaccagcugacgggguacaagaagccggccagccgcgagcugaaggugaccuucuuccccgaccucaacggcgacgucguggcgaucgacuacaagcacuacacccccuccuucaagaagggcgccaagcugcugcacaagcccaucguguggcacgucaacaacgccaccaacaaggccacguacaagccgaacaccuggugcauccggugccucuggagcaccaagcccguggagaccuccaacagcuucgacgugcugaaguccgaggacgcgcaggggauggacaaccuggccugcgaggaccucaagcccgucagcgaggaggugguggagaaccccacgauccagaaggacguccuggagugcaacgugaagaccaccgagguggucggcgacaucauccugaagccggccaacaacucccucaagaucaccgaggagguggggcacacggaccugauggccgccuacguggacaacagcucccugaccaucaagaagcccaacgagcucagccgcguccugggccugaagacccucgcgacccacgggcuggccgccgugaacuccgugcccugggacacgaucgccaacuacgccaagccguuccugaacaaggucgugagcaccaccaccaacaucgugacgcgcugccucaaccgggucugcaccaacuacaugcccuacuucuucacccugcugcuccagcugugcaccuucacccgcuccacgaacagccggaucaaggcguccaugcccaccaccaucgccaagaacaccgugaagagcgugggcaaguucugccuggaggccagcuucaacuaccucaagucccccaacuucagcaagcugaucaacaucaucaucugguuccugcuccuguccgucugccugggcagccucaucuacuccacggccgcccugggggugcugaugagcaaccucggcaugccguccuacugcaccggguaccgcgagggcuaccugaacagcaccaacgugaccaucgcgacguacugcaccggcuccauccccugcagcgucugccuguccgggcucgacagccuggacaccuaccccucccuggagaccauccagaucacgaucagcuccuucaagugggaccucaccgccuucggccugguggccgagugguuccuggccuacauccucuucacccgguucuucuacgugcuggggcuggccgcgaucaugcagcucuucuucagcuacuucgccguccacuucaucuccaacagcuggcugauguggcugaucaucaaccuggugcagauggcccccaucuccgccauggugcgcauguacaucuucuucgcgagcuucuacuacgucuggaagagcuacgugcacguggucgacggcugcaacuccagcaccugcaugaugugcuacaagcggaaccgcgccacgcggguggagugcaccaccaucgucaacggggugcgccgguccuucuacguguacgccaacggcggcaagggguucugcaagcuccacaacuggaacugcgucaacugcgacaccuucugcgccggcagcacguucaucuccgacgagguggcccgcgaccugagccugcaguucaagcggccgaucaaccccaccgaccaguccagcuacaucguggacuccgucaccgugaagaacgggagcauccaccucuacuucgacaaggcgggccagaagaccuacgagcgccacucccugagccacuucgugaaccuggacaaccuccgggccaacaacacgaaggggucccugcccaucaacgucaucguguucgacggcaagagcaagugcgaggaguccagcgccaaguccgccagcguguacuacucccagcugaugugccagcccauccuccugcuggaccaggcccucgucagcgacgugggcgacagcgcggagguggccgucaagauguucgacgccuacgugaacaccuucuccagcaccuucaacgugccgauggagaagcugaagacccuggucgccacggccgaggcggagcucgccaagaacgugucccuggacaacgugcugagcaccuucaucuccgccgcccgccagggguucgucgacagcgacguggagaccaaggacguggucgagugccucaagcugucccaccagagcgacaucgaggugaccggcgacuccugcaacaacuacaugcugacguacaacaagguggagaacaugaccccccgggaccucggggcgugcaucgacugcagcgcccgccacaucaacgcccaggucgccaagucccacaacaucgcccugaucuggaacgugaaggacuucaugagccuguccgagcagcuccggaagcagauccgcagcgcggccaagaagaacaaccugcccuucaagcugaccugcgccaccacgcgccagguggucaacguggugaccaccaagaucgcccucaagggcgggugaggacuaguuauaagacugacuagcccgaugggccucccaacgggcccuccuccccuccuugcaccgagauuaauaaaaaaaaaaaaaaaaaaaaaaaaaaaaaaaaaaaaaaaaaaaaaaaaaaaaaaaaaaaaaaaaugcaucccccccccccccccccccccccccccccccaaaggcucuuuucagagccaccagaauu

SEQ ID NO: 21420 - RNA, 6058 nt, Artificial Sequence
  SARS-CoV-2__MT890353.1__non-structural protein 3 (NSP3) mRNA gc
aggagaaagcuuaccauggcccccaccaaggugaccuucggcgacgacacggucaucgaggugcagggguacaagagcgugaacaucaccuucgagcuggacgagcgcaucgacaagguccucaacgagaagugcuccgccuacaccguggagcugggcaccgaggugaacgaguucgcgugcgucguggccgacgccgugaucaagacgcugcagccggucagcgagcuccugaccccccuggggaucgaccucgacgagugguccauggccaccuacuaccuguucgacgagagcggcgaguucaagcuggccucccacauguacugcagcuucuacccccccgacgaggacgaggaggagggggacugcgaggaggaggaguucgagccguccacccaguacgaguacggcacggaggacgacuaccagggcaagccccucgaguucggggcgaccagcgccgcccugcagcccgaggaggagcaggaggaggacuggcuggacgacgacucccagcagaccgugggccagcaggacgggagcgaggacaaccagaccacgaccauccagaccaucguggagguccagccccagcucgagauggagcugaccccgguggugcagacgaucgaggucaacuccuucagcggcuaccugaagcucaccgacaacguguacaucaagaacgccgacaucguggaggaggucaagaaggugaagcccaccguggucgugaacgcggccaacguguaccugaagcacgggggcggcgucgccggggcccugaacaaggccaccaacaacgcgaugcagguggaguccgacgacuacaucgccacgaacggcccccucaaggucgggggcagcugcgugcuguccggccacaaccuggccaagcacugccuccacguggucgggcccaacgugaacaagggcgaggacauccagcugcugaagagcgccuacgagaacuucaaccagcacgaggugcuccuggccccgcugcucuccgcggggaucuucggcgccgaccccauccacagccugcgggucugcguggacaccgugcgcaccaacgucuaccuggccguguucgacaagaaccucuacgacaagcugguguccagcuuccuggagaugaagagcgagaagcaggucgagcagaagaucgccgagauccccaaggaggaggugaagcccuucaucaccgaguccaagccgagcguggagcagcggaagcaggacgacaagaagaucaaggccugcgucgaggaggugacgaccacccucgaggagaccaaguuccugacggagaaccugcuccuguacaucgacaucaacgggaaccugcaccccgacuccgcgacccucgugagcgacaucgacaucaccuuccugaagaaggacgcccccuacaucgucggcgacguggugcaggagggcguccugaccgccguggugauccccacgaagaaggccgggggcaccaccgagaugcucgccaaggcgcugcgcaaggucccgaccgacaacuacaucacgaccuaccccgggcagggccugaacggguacaccguggaggaggccaagaccgugcucaagaagugcaaguccgccuucuacauccugcccagcaucaucuccaacgagaagcaggagauccugggcaccgucagcuggaaccuccgggagaugcuggcccacgcggaggagacgcgcaagcugaugcccgugugcguggagaccaaggccaucgucuccaccauccagcggaaguacaagggcaucaagauccaggagggggugguggacuacggcgcccgcuucuacuucuacaccagcaagacgaccgucgccucccugaucaacacccucaacgaccugaacgagacccuggugacgaugccgcucggguacgugacccacggccugaaccuggaggaggccgcgcgguacaugcgcagccucaagguccccgccaccguguccgugagcucccccgacgccgucaccgccuacaacggguaccugacgagcuccagcaagacccccgaggagcacuucaucgagaccaucucccuggccggcagcuacaaggacuggagcuacuccggccagagcacccagcucgggaucgaguuccugaagcggggcgacaaguccguguacuacacgagcaacccgaccaccuuccaccuggacggggaggugaucaccuucgacaaccucaagacgcugcugucccuccgcgagguccggaccaucaagguguucaccaccguggacaacaucaaccugcacacgcaggucguggacaugagcaugaccuacggccagcaguucggccccaccuaccuggacggggcggacgugaccaagaucaagccccacaacucccacgagggcaagacguucuacguccucccgaacgacgacacccugcgcguggaggccuucgaguacuaccacaccaccgaccccagcuuccuggggcgguacauguccgcccucaaccacacgaagaaguggaaguacccccaggugaacggccugaccagcaucaagugggccgacaacaacugcuaccuggccaccgcgcuccugacccugcagcagaucgagcucaaguucaaccccccggcccugcaggacgccuacuaccgcgcccgggcgggggaggccgccaacuucugcgcccugauccucgccuacugcaacaagacggucggcgagcugggcgacgugcgcgagaccauguccuaccuguuccagcacgcgaaccucgacagcugcaagcggguccugaacguggugugcaagaccugcgggcagcagcagaccacccugaagggcgucgaggccgugauguacauggggacgcucuccuacgagcaguucaagaagggcgugcagauccccugcaccugcgggaagcaggccaccaaguaccugguccagcaggagagccccuucgugaugauguccgcccccccggcccaguacgagcugaagcacggcaccuucacgugcgcgagcgaguacaccggcaacuaccagugcgggcacuacaagcacaucaccuccaaggagacccucuacugcaucgacggcgcccugcugacgaagagcagcgaguacaaggggcccaucaccgacguguucuacaaggagaacuccuacaccaccacgaucaagcccgucaccuacaagcucgacggcguggugugcaccgagaucgaccccaagcuggacaacuacuacaagaaggacaacagcuacuucaccgagcagccgaucgaccugguccccaaccagcccuaccccaacgccuccuucgacaacuucaaguucgugugcgacaacaucaaguucgccgacgaccucaaccagcugacgggguacaagaagccggccagccgcgagcugaaggugaccuucuuccccgaccucaacggcgacgucguggcgaucgacuacaagcacuacacccccuccuucaagaagggcgccaagcugcugcacaagcccaucguguggcacgucaacaacgccaccaacaaggccacguacaagccgaacaccuggugcauccggugccucuggagcaccaagcccguggagaccuccaacagcuucgacgugcugaaguccgaggacgcgcaggggauggacaaccuggccugcgaggaccucaagcccgucagcgaggaggugguggagaaccccacgauccagaaggacguccuggagugcaacgugaagaccaccgagguggucggcgacaucauccugaagccggccaacaacucccucaagaucaccgaggagguggggcacacggaccugauggccgccuacguggacaacagcucccugaccaucaagaagcccaacgagcucagccgcguccugggccugaagacccucgcgacccacgggcuggccgccgugaacuccgugcccugggacacgaucgccaacuacgccaagccguuccugaacaaggucgugagcaccaccaccaacaucgugacgcgcugccucaaccgggucugcaccaacuacaugcccuacuucuucacccugcugcuccagcugugcaccuucacccgcuccacgaacagccggaucaaggcguccaugcccaccaccaucgccaagaacaccgugaagagcgugggcaaguucugccuggaggccagcuucaacuaccucaagucccccaacuucagcaagcugaucaacaucaucaucugguuccugcuccuguccgucugccugggcagccucaucuacuccacggccgcccugggggugcugaugagcaaccucggcaugccguccuacugcaccggguaccgcgagggcuaccugaacagcaucaacgugaccaucgcgaccuacugcacgggcuccauccccugcagcgucugccuguccgggcucgacagccuggacaccuaccccucccuggagaccauccagaucaccaucagcuccuucaagugggaccucacggccuucggccugguggccgagugguuccuggccuacauccucuucacccgguucuucuacgugcuggggcuggccgcgaucaugcagcucuucuucagcuacuucgccguccacuucaucuccaacagcuggcugauguggcugaucaucaaccuggugcagauggcccccaucuccgccauggugcgcauguacaucuucuucgcgagcuucuacuacgucuggaagagcuacgugcacguggucgacggcugcaacuccagcaccugcaugaugugcuacaagcggaaccgcgccacccggguggagugcacgaccaucgucaacggggugcgccgguccuucuacguguacgccaacggcggcaagggguucugcaagcuccacaacuggaacugcgucaacugcgacaccuucugcgccggcagcaccuucaucuccgacgagguggcccgcgaccugagccugcaguucaagcggccgaucaaccccacggaccaguccagcuacaucguggacuccgucaccgugaagaacgggagcauccaccucuacuucgacaaggcgggccagaagaccuacgagcgccacucccugagccacuucgugaaccuggacaaccuccgggccaacaacaccaaggggucccugcccaucaacgucaucguguucgacggcaagagcaagugcgaggaguccagcgccaaguccgccagcguguacuacucccagcugaugugccagcccauccuccugcuggaccaggcccucgucagcgacgugggcgacagcgcggagguggccgucaagauguucgacgccuacgugaacacguucuccagcaccuucaacgugccgauggagaagcugaagacccuggucgccaccgccgaggcggagcucgccaagaacgugucccuggacaacgugcugagcacguucaucuccgccgcccgccagggguucgucgacagcgacguggagaccaaggacguggucgagugccucaagcugucccaccagagcgacaucgaggugaccggcgacuccugcaacaacuacaugcugaccuacaacaagguggagaacaugacgccccgggaccucggggcgugcaucgacugcagcgcccgccacaucaacgcccaggucgccaagucccacaacaucgcccugaucuggaacgugaaggacuucaugagccuguccgagcagcuccggaagcagauccgcagcgcggccaagaagaacaaccugcccuucaagcugaccugcgccaccacccgccagguggucaacguggugacgaccaagaucgcccucaagggcgggugaggacuaguuauaagacugacuagcccgaugggccucccaacgggcccuccuccccuccuugcaccgagauuaauaaaaaaaaaaaaaaaaaaaaaaaaaaaaaaaaaaaaaaaaaaaaaaaaaaaaaaaaaaaaaaaaugcaucccccccccccccccccccccccccccccccaaaggcucuuuucagagccaccagaauu

SEQ ID NO: 21421 - RNA, 6058 nt, Artificial Sequence
  SARS-CoV-2__MT890355.1__non-structural protein 3 (NSP3) mRNA gc
aggagaaagcuuaccauggcccccaccaaggugaccuucggcgacgacacggucaucgaggugcagggguacaagagcgugaacaucaccuucgagcuggacgagcgcaucgacaagguccucaacgagaagugcuccgccuacaccguggagcugggcaccgaggugaacgaguucgcgugcgucguggccgacgccgugaucaagacgcugcagccggucagcgagcuccugaccccccuggggaucgaccucgacgagugguccauggccaccuacuaccuguucgacgagagcggcgaguucaagcuggccucccacauguacugcagcuucuacccccccgacgaggacgaggaggagggggacugcgaggaggaggaguucgagccguccacccaguacgaguacggcacggaggacgacuaccagggcaagccccucgaguucggggcgaccagcgccgcccugcagcccgaggaggagcaggaggaggacuggcuggacgacgacucccagcagaccgugggccagcaggacgggagcgaggacaaccagaccacgaccauccagaccaucguggagguccagccccagcucgagauggagcugaccccgguggugcagacgaucgaggucaacuccuucagcggcuaccugaagcucaccgacaacguguacaucaagaacgccgacaucguggaggaggcgaagaaggucaagcccaccgugguggucaacgccgccaacguguaccugaagcacgggggcggcguggccggggcccugaacaaggcgaccaacaacgccaugcaggucgaguccgacgacuacaucgccacgaacggcccccucaagguggggggcagcugcguccuguccggccacaaccuggccaagcacugccuccacgugguggggcccaacgucaacaagggcgaggacauccagcugcugaagagcgccuacgagaacuucaaccagcacgaggugcuccuggcgccgcugcucuccgccgggaucuucggcgccgaccccauccacagccugcgggugugcgucgacaccgugcgcaccaacguguaccuggccgucuucgacaagaaccucuacgacaagcugguguccagcuuccuggagaugaagagcgagaagcagguggagcagaagaucgccgagauccccaaggaggaggucaagcccuucaucaccgaguccaagccgagcguggagcagcggaagcaggacgacaagaagaucaaggcgugcguggaggaggucacgaccacccucgaggagaccaaguuccugacggagaaccugcuccuguacaucgacaucaacgggaaccugcaccccgacuccgccacccucgugagcgacaucgacaucaccuuccugaagaaggacgcccccuacaucgugggcgacgucgugcaggagggcgugcugaccgccgucgugauccccacgaagaaggccgggggcaccaccgagaugcucgcgaaggcccugcgcaaggugccgaccgacaacuacaucacgaccuaccccgggcagggccugaacggguacaccgucgaggaggccaagaccgugcucaagaagugcaaguccgccuucuacauccugcccagcaucaucuccaacgagaagcaggagauccugggcaccgugagcuggaaccuccgggagaugcuggcgcacgccgaggagacgcgcaagcugaugcccgucugcguggagaccaaggccaucguguccaccauccagcggaaguacaagggcaucaagauccaggagggggucguggacuacggcgcccgcuucuacuucuacaccagcaagacgaccguggccucccugaucaacacccucaacgaccugaacgagacccuggucacgaugccgcucggguacgugacccacggccugaaccuggaggaggcggcccgguacaugcgcagccucaaggugcccgccaccgucuccgugagcucccccgacgccgugaccgccuacaacggguaccugacgagcuccagcaagacccccgaggagcacuucaucgagaccaucucccuggcgggcagcuacaaggacuggagcuacuccggccagagcacccagcucgggaucgaguuccugaagcggggcgacaaguccgucuacuacacgagcaacccgaccaccuuccaccuggacggggaggugaucaccuucgacaaccucaagacgcugcugucccuccgcgaggugcggaccaucaaggucuucaccaccguggacaacaucaaccugcacacgcagguggucgacaugagcaugaccuacggccagcaguucggccccaccuaccuggacggggccgacgugaccaagaucaagccccacaacucccacgagggcaagacguucuacgugcucccgaacgacgacacccugcgcgucgaggccuucgaguacuaccacaccaccgaccccagcuuccuggggcgguacauguccgcccucaaccacacgaagaaguggaaguacccccaggugaacggccugaccagcaucaagugggccgacaacaacugcuaccuggcgaccgcccuccugacccugcagcagaucgagcucaaguucaaccccccggcccugcaggacgccuacuaccgcgcgcgggccggggaggccgccaacuucugcgcccugauccucgcguacugcaacaagacggugggcgagcugggcgacguccgcgagaccauguccuaccuguuccagcacgccaaccucgacagcugcaagcgggugcugaacgucgugugcaagaccugcgggcagcagcagaccacccugaagggcguggaggccgucauguacauggggacgcucuccuacgagcaguucaagaagggcgugcagauccccugcaccugcgggaagcaggccaccaaguaccuggugcagcaggagagccccuucgucaugauguccgcccccccggcgcaguacgagcugaagcacggcaccuucacgugcgccagcgaguacaccggcaacuaccagugcgggcacuacaagcacaucaccuccaaggagacccucuacugcaucgacggcgcccugcugacgaagagcagcgaguacaaggggcccaucaccgacguguucuacaaggagaacuccuacaccaccacgaucaagcccgugaccuacaagcucgacggcgucgugugcaccgagaucgaccccaagcuggacaacuacuacaagaaggacaacagcuacuucaccgagcagccgaucgaccuggugcccaaccagcccuaccccaacgccuccuucgacaacuucaaguucgucugcgacaacaucaaguucgccgacgaccucaaccagcugacgggguacaagaagccggcgagccgcgagcugaaggugaccuucuuccccgaccucaacggcgacguggucgccaucgacuacaagcacuacacccccuccuucaagaagggcgccaagcugcugcacaagcccaucguguggcacgugaacaacgccaccaacaaggcgacguacaagccgaacaccuggugcauccggugccucuggagcaccaagcccgucgagaccuccaacagcuucgacgugcugaaguccgaggacgcccaggggauggacaaccuggccugcgaggaccucaagcccgugagcgaggaggucguggagaaccccacgauccagaaggacgugcuggagugcaacgucaagaccaccgagguggugggcgacaucauccugaagccggccaacaacucccucaagaucaccgaggaggucgggcacacggaccugauggccgcguacguggacaacagcucccugaccaucaagaagcccaacgagcucagccgcgugcugggccugaagacccucgccacccacgggcuggccgccgucaacuccgugcccugggacacgaucgccaacuacgcgaagccguuccugaacaagguggucagcaccaccaccaacaucgugacgcgcugccucaaccgggugugcaccaacuacaugcccuacuucuucacccugcugcuccagcugugcaccuucacccgcuccacgaacagccggaucaaggccuccaugcccaccaccaucgccaagaacaccgucaagagcgugggcaaguucugccuggaggccagcuucaacuaccucaagucccccaacuucagcaagcugaucaacaucaucaucugguuccugcuccuguccgugugccugggcagccucaucuacuccacggccgcgcuggggguccugaugagcaaccucggcaugccguccuacugcaccggguaccgcgagggcuaccugaacagcaccaacgugaccaucgccacguacugcaccggcuccauccccugcagcgugugccuguccgggcucgacagccuggacaccuaccccuuccuggagaccauccagaucacgaucuccagcuucaagugggaccucaccgccuucggccuggucgccgagugguuccuggccuacauccucuucacccgguucuucuacgugcuggggcuggcggccaucaugcagcucuucuucuccuacuucgccgugcacuucaucagcaacuccuggcugauguggcugaucaucaaccugguccagauggcccccaucagcgcgauggugcgcauguacaucuucuucgccuccuucuacuacguguggaagagcuacguccacgugguggacggcugcaacagcuccaccugcaugaugugcuacaagcggaaccgcgccacgcgggucgagugcaccaccaucgugaacgggguccgccggagcuucuacguguacgccaacggcggcaagggguucugcaagcuccacaacuggaacugcgugaacugcgacaccuucugcgccggcuccacguucaucagcgacgaggucgcgcgcgaccugucccugcaguucaagcggccgaucaaccccaccgaccagagcuccuacaucguggacagcgugaccgucaagaacggguccauccaccucuacuucgacaaggccggccagaagaccuacgagcgccacagccugucccacuucgugaaccuggacaaccuccgggccaacaacacgaaggggagccugcccaucaacgugaucgucuucgacggcaaguccaagugcgaggagagcuccgccaagagcgccuccguguacuacagccagcugaugugccagcccauccuccugcuggaccaggcgcucguguccgacgucggcgacagcgccgagguggccgugaagauguucgacgccuacgucaacaccuucagcuccaccuucaacgugccgauggagaagcugaagacccugguggccacggcggaggccgagcucgccaagaacgucagccuggacaacgugcuguccaccuucaucagcgccgcgcgccagggguucguggacuccgacgucgagaccaaggacgugguggagugccucaagcugagccaccaguccgacaucgaggucaccggcgacagcugcaacaacuacaugcugacguacaacaagguggagaacaugaccccccgggaccucggggccugcaucgacugcuccgcccgccacaucaacgcccagguggccaagagccacaacaucgcgcugaucuggaacgucaaggacuucaugucccugagcgagcagcuccggaagcagauccgcuccgccgccaagaagaacaaccugcccuucaagcugaccugcgccaccacgcgccagguggugaacgucgugaccaccaagaucgcccucaagggcgggugaggacuaguuauaagacugacuagcccgaugggccucccaacgggcccuccuccccuccuugcaccgagauuaauaaaaaaaaaaaaaaaaaaaaaaaaaaaaaaaaaaaaaaaaaaaaaaaaaaaaaaaaaaaaaaaaugcaucccccccccccccccccccccccccccccccaaaggcucuuuucagagccaccagaauu

SEQ ID NO: 21422 - RNA, 6058 nt, Artificial Sequence
  SARS-CoV-2__MT890669.1__non-structural protein 3 (NSP3) mRNA gc
aggagaaagcuuaccauggcccccaccaaggugaccuucggcgacgacacggucaucgaggugcagggguacaagagcgugaacaucaccuucgagcuggacgagcgcaucgacaagguccucaacgagaagugcuccgccuacaccguggagcugggcaccgaggugaacgaguucgcgugcgucguggccgacgccgugaucaagacgcugcagccggucagcgagcuccugaccccccuggggaucgaccucgacgagugguccauggccaccuacuaccuguucgacgagagcggcgaguucaagcuggccucccacauguacugcagcuucuacccccccgacgaggacgaggaggagggggacugcgaggaggaggaguucgagccguccacccaguacgaguacggcacggaggacgacuaccagggcaagccccucgaguucggggcgaccagcgccgcccugcagcccgaggaggagcaggaggaggacuggcuggacgacgacucccagcagaccgugggccagcaggacgggagcgaggacaaccagaccacgaccauccagaccaucguggagguccagccccagcucgagauggagcugaccccgguggugcagacgaucgaggucaacuccuucagcggcuaccugaagcucaccgacaacguguacaucaagaacgccgacaucguggaggaggcgaagaaggucaagcccaccgugguggucaacgccgccaacguguaccugaagcacgggggcggcguggccggggcccugaacaaggcgaccaacaacgccaugcaggucgaguccgacgacuacaucgccacgaacggcccccucaagguggggggcagcugcguccuguccggccacaaccuggccaagcacugccuccacgugguggggcccaacgucaacaagggcgaggacauccagcugcugaagagcgccuacgagaacuucaaccagcacgaggugcuccuggcgccgcugcucuccgccgggaucuucggcgccgaccccauccacagccugcgggugugcgucgacaccgugcgcaccaacguguaccuggccgucuucgacaagaaccucuacgacaagcugguguccagcuuccuggagaugaagagcgagaagcagguggagcagaagaucgccgagauccccaaggaggaggucaagcccuucaucaccgaguccaagccgcucguggagcagcggaagcaggacgacaagaagaucaaggcgugcguggaggaggucacgaccacccuggaggagaccaaguuccugacggagaaccuccugcuguacaucgacaucaacgggaaccuccaccccgacagcgccacccugguguccgacaucgacaucaccuuccugaagaaggacgcccccuacaucgugggcgacgucgugcaggagggcgugcucaccgccgucgugauccccacgaagaaggccgggggcaccaccgagaugcuggcgaaggcccugcgcaaggugccgaccgacaacuacaucacgaccuaccccgggcagggccucaacggguacaccgucgaggaggccaagaccgugcugaagaagugcaagagcgccuucuacauccugcccuccaucaucagcaacgagaagcaggagauccucggcaccguguccuggaaccugcgggagaugcuggcgcacgccgaggagacgcgcaagcugaugcccgucugcguggagaccaaggccaucgugagcaccauccagcggaaguacaagggcaucaagauccaggagggggucguggacuacggcgcccgcuucuacuucuacaccuccaagacgaccguggccagccucaucaacacccugaacgaccugaacgagacccucgucacgaugccgcugggguacgugacccacggccugaaccucgaggaggcggcccgguacaugcgcucccugaaggugcccgccaccgucagcguguccagccccgacgccgugaccgccuacaacggguaccugacguccagcuccaagacccccgaggagcacuucaucgagaccaucagccucgcgggcuccuacaaggacuggagcuacagcggccaguccacccagcuggggaucgaguuccugaagcggggcgacaagagcgucuacuacacguccaacccgaccaccuuccaccucgacggggaggugaucaccuucgacaaccugaagacgcugcucagccugcgcgaggugcggaccaucaaggucuucaccaccguggacaacaucaaccugcacacgcagguggucgacauguccaugaccuacggccagcaguucggccccaccuaccucgacggggccgacgugaccaagaucaagccccacaacagccacgagggcaagacguucuacgugcugccgaacgacgacacccugcgcgucgaggccuucgaguacuaccacaccaccgaccccuccuuccucgggcgguacaugagcgcccugaaccacacgaagaaguggaaguacccccaggugaacggccugaccuccaucaagugggccgacaacaacugcuaccucgcgaccgcccugcugacccuccagcagaucgagcugaaguucaaccccccggcccugcaggacgccuacuaccgcgcgcgggccggggaggccgccaacuucugcgcccucauccuggcguacugcaacaagacggugggcgagcugggcgacguccgcgagaccaugagcuaccucuuccagcacgccaaccuggacuccugcaagcgggugcugaacgucgugugcaagaccugcgggcagcagcagaccacccucaagggcguggaggccgucauguacauggggacgcugagcuacgagcaguucaagaagggcgugcagauccccugcaccugcgggaagcaggccaccaaguaccuggugcagcaggagucccccuucgucaugaugagcgcccccccggcgcaguacgagcucaagcacggcaccuucacgugcgccuccgaguacaccggcaacuaccagugcgggcacuacaagcacaucaccagcaaggagacccuguacugcaucgacggcgcccugcucacgaaguccagcgaguacaaggggcccaucaccgacguguucuacaaggagaacagcuacaccaccacgaucaagcccgugaccuacaagcuggacggcgucgugugcaccgagaucgaccccaagcuggacaacuacuacaagaaggacaacuccuacuucaccgagcagccgaucgaccucgugcccaaccagcccuaccccaacgccagcuucgacaacuucaaguucgucugcgacaacaucaaguucgccgacgaccugaaccagcugacgggguacaagaagccggcgucccgcgagcucaaggugaccuucuuccccgaccugaacggcgacguggucgccaucgacuacaagcacuacacccccagcuucaagaagggcgccaagcugcuccacaagcccaucguguggcacgugaacaacgccaccaacaaggcgacguacaagccgaacaccuggugcauccggugccugugguccaccaagcccgucgagaccagcaacuccuucgacgugcugaagagcgaggacgcccaggggauggacaaccucgccugcgaggaccugaagcccguguccgaggaggucguggagaaccccacgauccagaaggacgugcuggagugcaacgucaagaccaccgagguggugggcgacaucauccucaagccggccaacaacagccugaagaucaccgaggaggucgggcacacggaccugauggccgcguacguggacaacuccagccucaccaucaagaagcccaacgagcugucccgcgugcugggccucaagacccuggccacccacgggcuggccgccgucaacagcgugcccugggacacgaucgccaacuacgcgaagccguuccucaacaagguggucuccaccaccaccaacaucgugacgcgcugccugaaccgggugugcaccaacuacaugcccuacuucuucacccugcuccugcagcugugcaccuucacccgcagcacgaacucccggaucaaggccagcaugcccaccaccaucgccaagaacaccgucaaguccgugggcaaguucugccucgaggccagcuucaacuaccugaagagccccaacuucuccaagcugaucaacaucaucaucugguuccuccugcugagcgugugccucggcucccugaucuacagcacggccgcgcuggggguccucauguccaaccugggcaugccgagcuacugcaccggguaccgcgagggcuaccugaacuccaccaacgugaccaucgccacguacugcaccggcagcauccccugcuccgugugccucagcgggcuggacucccuggacaccuaccccagccucgagaccauccagaucacgaucuccagcuucaagugggaccugaccgccuucggccuggucgccgagugguuccucgccuacauccuguucacccgguucuucuacgugcuggggcucgcggccaucaugcagcuguucuucuccuacuucgccgugcacuucaucagcaacuccuggcugauguggcugaucaucaaccucguccagauggcccccaucagcgcgauggugcgcauguacaucuucuucgccuccuucuacuacguguggaagagcuacguccacgugguggacggcugcaacagcuccaccugcaugaugugcuacaagcggaaccgcgccacgcgggucgagugcaccaccaucgugaacgggguccgccggagcuucuacguguacgccaacggcggcaagggguucugcaagcugcacaacuggaacugcgugaacugcgacaccuucugcgccggcuccacguucaucagcgacgaggucgcgcgcgaccugucccuccaguucaagcggccgaucaaccccaccgaccagagcuccuacaucguggacagcgugaccgucaagaacggguccauccaccuguacuucgacaaggccggccagaagaccuacgagcgccacagccugucccacuucgugaaccucgacaaccugcgggccaacaacacgaaggggagccugcccaucaacgugaucgucuucgacggcaaguccaagugcgaggagagcuccgccaagagcgccuccguguacuacagccagcucaugugccagcccauccugcugcucgaccaggcgcugguguccgacgucggcgacagcgccgagguggccgugaagauguucgacgccuacgucaacaccuucagcuccaccuucaacgugccgauggagaagcugaagacccucguggccacggcggaggccgagcuggccaagaacgucagccuggacaacgugcucuccaccuucaucagcgccgcgcgccagggguucguggacuccgacgucgagaccaaggacgugguggagugccugaagcugagccaccaguccgacaucgaggucaccggcgacagcugcaacaacuacaugcucacguacaacaagguggagaacaugaccccccgggaccugggggccugcaucgacugcuccgcccgccacaucaacgcccagguggccaagagccacaacaucgcgcugaucuggaacgucaaggacuucaugucccucagcgagcagcugcggaagcagauccgcuccgccgccaagaagaacaaccugcccuucaagcucaccugcgccaccacgcgccagguggugaacgucgugaccaccaagaucgcccugaagggcgggugaggacuaguuauaagacugacuagcccgaugggccucccaacgggcccuccuccccuccuugcaccgagauuaauaaaaaaaaaaaaaaaaaaaaaaaaaaaaaaaaaaaaaaaaaaaaaaaaaaaaaaaaaaaaaaaaugcaucccccccccccccccccccccccccccccccaaaggcucuuuucagagccaccagaauu

SEQ ID NO: 21423 - RNA, 6058 nt, Artificial Sequence
  SARS-CoV-2__MT892964.1__non-structural protein 3 (NSP3) mRNA gc
aggagaaagcuuaccauggcccccaccaaggugaccuucggcgacgacacggucaucgaggugcagggguacaagagcgugaacaucaccuucgagcuggacgagcgcaucgacaagguccucaacgagaagugcuccgccuacaccguggagcugggcaccgaggugaacgaguucgcgugcgucguggccgacgccgugaucaagacgcugcagccggucagcgagcuccugaccccccuggggaucgaccucgacgagugguccauggccaccuacuaccuguucgacgagagcggcgaguucaagcuggccucccacauguacugcagcuucuacccccccgacgaggacgaggaggagggggacugcgaggaggaggaguucgagccguccacccaguacgaguacggcacggaggacgacuaccagggcaagccccucgaguucggggcgaccagcgccgcccugcagcccgaggaggagcaggaggaggacuggcuggacgacgacucccagcagaccgugggccagcaggacgggagcgaggacaaccagaccacgaccauccagaccaucguggagguccagccccagcucgagauggagcugaccccgguggugcagacgaucgaggucaacuccuucagcggcuaccugaagcucaccgacaacguguacaucaagaacgccgacaucguggaggaggcgaagaaggucaagcccaccgugguggucaacgccgccaacguguaccugaagcacgggggcggcguggccggggcccugaacaaggcgaccaacaacgccaugcaggucgaguccgacgacuacaucgccacgaacggcccccucaagguggggggcagcugcguccuguccggccacaaccuggccaagcacugccuccacgugguggggcccaacgucaacaagggcgaggacauccagcugcugaagagcgccuacgagaacuucaaccagcacgaggugcuccuggcgccgcugcucuccgccgggaucuucggcgccgaccccauccacagccugcgggugugcgucgacaccgugcgcaccaacguguaccuggccgucuucgacaagaaccucuacgacaagcugguguccagcuuccuggagaugaagagcgagaagcagguggagcagaagaucgccgagauccccaaggaggaggucaagcccuucaucaccgaguccaagccgagcguggagcagcggaagcaggacgacaagaagaucaaggcgugcguggaggaggucacgaccacccucgaggagaccaaguuccugacggagaaccugcuccuguacaucgacaucaacgggaaccugcaccccgacuccgccacccucgugagcgacaucgacaucaccuuccugaagaaggacgcccccuacaucgugggcgacgucgugcaggagggcgugcugaccgccgucgugauccccacgaagaaggccgggggcaccaccgagaugcucgcgaaggcccugcgcaaggugccgaccgacaacuacaucacgaccuaccccgggcagggccugaacggguacaccgucgaggaggccaagaccgugcucaagaagugcaaguccgccuucuacauccugcccagcaucaucuccaacgagaagcaggagauccugggcaccgugagcuggaaccuccgggagaugcuggcgcacgccgaggagacgcgcaagcugaugcccgucugcguggagaccaaggccaucguguccaccauccagcggaaguacaagggcaucaagauccaggagggggucguggacuacggcgcccgcuucuacuucuacaccagcaagacgaccguggccucccugaucaacacccucaacgaccugaacgagacccuggucacgaugccgcucggguacgugacccacggccugaaccuggaggaggcggcccgguacaugcgcagccucaaggugcccgccaccgucuccgugagcucccccgacgccgugaccgccuacaacggguaccugacgagcuccagcaagacccccgaggagcacuucaucgagaccaucucccuggcgggcagcuacaaggacuggagcuacuccggccagagcacccagcucgggaucgaguuccugaagcggggcgacaaguccgucuacuacacgagcaacccgaccaccuuccaccuggacggggaggugaucaccuucgacaaccucaagacgcugcugucccuccgcgaggugcggaccaucaaggucuucaccaccguggacaacaucaaccugcacacgcagguggucgacaugagcaugaccuacggccagcaguucggccccaccuaccuggacggggccgacgugaccaagaucaagccccacaacucccacgagggcaagacguucuacgugcucccgaacgacgacacccugcgcgucgaggccuucgaguacuaccacaccaccgaccccagcuuccuggggcgguacauguccgcccucaaccacacgaagaaguggaaguacccccaggugaacggccugaccagcaucaagugggccgacaacaacugcuaccuggcgaccgcccuccugacccugcagcagaucgagcucaaguucaaccccccggcccugcaggacgccuacuaccgcgcgcgggccggggaggccgccaacuucugcgcccugauccucgcguacugcaacaagacggugggcgagcugggcgacguccgcgagaccauguccuaccuguuccagcacgccaaccucgacagcugcaagcgggugcugaacgucgugugcaagaccugcgggcagcagcagaccacccugaagggcguggaggccgucauguacauggggacgcucuccuacgagcaguucaagaagggcgugcagauccccugcaccugcgggaagcaggccaccaaguaccuggugcagcaggagagccccuucgucaugauguccgcccccccggcgcaguacgagcugaagcacggcaccuucacgugcgccagcgaguacaccggcaacuaccagugcgggcacuacaagcacaucaccuccaaggagacccucuacugcaucgacggcgcccugcugacgaagagcagcgaguacaaggggcccaucaccgacguguucuacaaggagaacuccuacaccaccacgaucaagcccgugaccuacaagcucgacggcgucgugugcaccgagaucgaccccaagcuggacaacuacuacaagaaggacaacagcuacuucaccgagcagccgaucgaccuggugcccaaccagcccuaccccaacgccuccuucgacaacuucaaguucgucugcgacaacaucaaguucgccgacgaccucaaccagcugacgggguacaagaagccggcgagccgcgagcugaaggugaccuucuuccccgaccucaacggcgacguggucgccaucgacuacaagcacuacacccccuccuucaagaagggcgccaagcugcugcacaagcccaucguguggcacgugaacaacgccaccaacaaggcgacguacaagccgaacaccuggugcauccggugccucuggagcaccaagcccgucgagaccuccaacagcuucgacgugcugaaguccgaggacgcccaggggauggacaaccuggccugcgaggaccucaagcccgugagcgaggaggucguggagaaccccacgauccagaaggacgugcuggagugcaacgucaagaccaccgagguggugggcgacaucauccugaagccggccaacaacucccucaagaucaccgaggaggucgggcacacggaccugauggccgcguacguggacaacagcucccugaccaucaagaagcccaacgagcucagccgcgugcugggccugaagacccucgccacccacgggcuggccgccgucaacuccgugcccugggacacgaucgccaacuacgcgaagccguuccugaacaagguggucagcaccaccaccaacaucgugacgcgcugccucaaccgggugugcaccaacuacaugcccuacuucuucacccugcugcuccagcugugcaccuucacccgcuccacgaacagccggaucaaggccuccaugcccaccaccaucgccaagaacaccgucaagagcgugggcaaguucugccuggaggccagcuucaacuaccucaagucccccaacuucagcaagcugaucaacaucaucaucugguuccugcuccuguccgugugccugggcagccucaucuacuccacggccgcgcuggggguccugaugagcaaccucggcaugccguccuacugcaccggguaccgcgagggcuaccugaacagcaccaacgugaccaucgccacguacugcaccggcuccauccccugcagcgugugccuguccgggcucgacagccuggacaccuaccccucccuggagaccauccagaucacgaucagcuccuucaagugggaccucaccgccuucggccuggucgccgagugguuccuggccuacauccucuucacccgguucuucuacgugcuggggcuggcggccaucaugcagcucuucuucagcuacuucgccgugcacuucaucuccaacagcuggcugauguggcugaucaucaaccugguccagauggcccccaucuccgcgauggugcgcauguacaucuucuucgccagcuucuacuacguguggaagagcuacguccacgugguggacggcugcaacuccagcaccugcaugaugugcuacaagcggaaccgcgccacgcgggucgagugcaccaccaucgugaacgggguccgccgguccuucuacguguacgccaacggcggcaagggguucugcaagcuccacaacuggaacugcgugaacugcgacaccuucugcgccggcagcacguucaucuccgacgaggucgcgcgcgaccugagccugcaguucaagcggccgaucaaccccaccgaccaguccagcuacaucguggacuccgugaccgucaagaacgggagcauccaccucuacuucgacaaggccggccagaagaccuacgagcgccacucccugagccacuucgugaaccuggacaaccuccgggccaacaacacgaaggggucccugcccaucaacgugaucgucuucgacggcaagagcaagugcgaggaguccagcgccaaguccgccagcguguacuacucccagcugaugugccagcccauccuccugcuggaccaggcgcucgugagcgacgucggcgacagcgccgagguggccgugaagauguucgacgccuacgucaacaccuucuccagcaccuucaacgugccgauggagaagcugaagacccugguggccacggcggaggccgagcucgccaagaacgucucccuggacaacgugcugagcacccucaucuccgccgcgcgccagggguucguggacagcgacgucgagaccaaggacgugguggagugccugaagcugucccaccagagcgacaucgaggucaccggcgacuccugcaacaacuacaugcucacguacaacaagguggagaacaugaccccccgggaccugggggccugcaucgacugcagcgcccgccacaucaacgcccagguggccaagucccacaacaucgcgcugaucuggaacgucaaggacuucaugagccucuccgagcagcugcggaagcagauccgcagcgccgccaagaagaacaaccugcccuucaagcucaccugcgccaccacgcgccagguggugaacgucgugaccaccaagaucgcccugaagggcgggugaggacuaguuauaagacugacuagcccgaugggccucccaacgggcccuccuccccuccuugcaccgagauuaauaaaaaaaaaaaaaaaaaaaaaaaaaaaaaaaaaaaaaaaaaaaaaaaaaaaaaaaaaaaaaaaaugcaucccccccccccccccccccccccccccccccaaaggcucuuuucagagccaccagaauu

SEQ ID NO: 21424 - RNA, 6058 nt, Artificial Sequence
  SARS-CoV-2__MT892973.1__non-structural protein 3 (NSP3) mRNA gc
aggagaaagcuuaccauggcccccaccaaggugaccuucggcgacgacacggucaucgaggugcagggguacaagagcgugaacaucaccuucgagcuggacgagcgcaucgacaagguccucaacgagaagugcuccgccuacaccguggagcugggcaccgaggugaacgaguucgcgugcgucguggccgacgccgugaucaagacgcugcagccggucagcgagcuccugaccccccuggggaucgaccucgacgagugguccauggccaccuacuaccuguucgacgagagcggcgaguucaagcuggccucccacauguacugcagcuucuacccccccgacgaggacgaggaggagggggacugcgaggaggaggaguucgagccguccacccaguacgaguacggcacggaggacgacuaccagggcaagccccucgaguucggggcgaccagcgccgcccugcagcccgaggaggagcaggaggaggacuggcuggacgacgacucccagcagaccgugggccagcaggacgggagcgaggacaaccagaccacgaccauccagaccaucguggagguccagccccagcucgagauggagcugaccccgguggugcagacgaucgaggucaacuccuucagcggcuaccugaagcucaccgacaacguguacaucaagaacgccgacaucguggaggaggcgaagaaggucaagcccaccgugguggucaacgccgccaacguguaccugaagcacgggggcggcguggccggggcccugaacaaggcgaccaacaacgccaugcaggucgaguccgacgacuacaucgccacgaacggcccccucaagguggggggcagcugcguccuguccggccacaaccuggccaagcacugccuccacgugguggggcccaacgucaacaagggcgaggacauccagcugcugaagagcgccuacgagaacuucaaccagcacgaggugcuccuggcgccgcugcucuccgccgggaucuucggcgccgaccccauccacagccugcgggugugcgucgacaccgugcgcaccaacguguaccuggccgucuucgacaagaaccucuacgacaagcugguguccagcuuccuggagaugaagagcgagaagcagguggagcagaacaucgccgagauccccaaggaggaggucaagcccuucaucaccgaguccaagccgagcguggagcagcggaagcaggacgacaagaagaucaaggcgugcguggaggaggucacgaccacccucgaggagaccaaguuccugacggagaaccugcuccuguacaucgacaucaacgggaaccugcaccccgacuccgccacccucgugagcgacaucgacaucaccuuccugaagaaggacgcccccuacaucgugggcgacgucgugcaggagggcgugcugaccgccgucgugauccccacgaagaaggccgggggcaccaccgagaugcucgcgaaggcccugcgcaaggugccgaccgacaacuacaucacgaccuaccccgggcagggccugaacggguacaccgucgaggaggccaagaccgugcucaagaagugcaaguccgccuucuacauccugcccagcaucaucuccaacgagaagcaggagauccugggcaccgugagcuggaaccuccgggagaugcuggcgcacgccgaggagacgcgcaagcugaugcccgucugcguggagaccaaggccaucguguccaccauccagcggaaguacaagggcaucaagauccaggagggggucguggacuacggcgcccgcuucuacuucuacaccagcaagacgaccguggccucccugaucaacacccucaacgaccugaacgagacccuggucacgaugccgcucggguacgugacccacggccugaaccuggaggaggcggcccgguacaugcgcagccucaaggugcccgccaccgucuccgugagcucccccgacgccgugaccgccuacaacggguaccugacgagcuccagcaagacccccgaggagcacuucaucgagaccaucucccuggcgggcagcuacaaggacuggagcuacuccggccagagcacccagcucgggaucgaguuccugaagcggggcgacaaguccgucuacuacacgagcaacccgaccaccuuccaccuggacggggaggugaucaccuucgacaaccucaagacgcugcugucccuccgcgaggugcggaccaucaaggucuucaccaccguggacaacaucaaccugcacacgcagguggucgacaugagcaugaccuacggccagcaguucggccccaccuaccuggacggggccgacgugaccaagaucaagccccacaacucccacgagggcaagacguucuacgugcucccgaacgacgacacccugcgcgucgaggccuucgaguacuaccacaccaccgaccccagcuuccuggggcgguacauguccgcccucaaccacacgaagaaguggaaguacccccaggugaacggccugaccagcaucaagugggccgacaacaacugcuaccuggcgaccgcccuccugacccugcagcagaucgagcucaaguucaaccccccggcccugcaggacgccuacuaccgcgcgcgggccggggaggccgccaacuucugcgcccugauccucgcguacugcaacaagacggugggcgagcugggcgacguccgcgagaccauguccuaccuguuccagcacgccaaccucgacagcugcaagcgggugcugaacgucgugugcaagaccugcgggcagcagcagaccacccugaagggcguggaggccgucauguacauggggacgcucuccuacgagcaguucaagaagggcgugcagauccccugcaccugcgggaagcaggccaccaaguaccuggugcagcaggagagccccuucgucaugauguccgcccccccggcgcaguacgagcugaagcacggcaccuucacgugcgccagcgaguacaccggcaacuaccagugcgggcacuacaagcacaucaccuccaaggagacccucuacugcaucgacggcgcccugcugacgaagagcagcgaguacaaggggcccaucaccgacguguucuacaaggagaacuccuacaccaccacgaucaagcccgugaccuacaagcucgacggcgucgugugcaccgagaucgaccccaagcuggacaacuacuacaagaaggacaacagcuacuucaccgagcagccgaucgaccuggugcccaaccagcccuaccccaacgccuccuucgacaacuucaaguucgucugcgacaacaucaaguucgccgacgaccucaaccagcugacgggguacaagaagccggcgagccgcgagcugaaggugaccuucuuccccgaccucaacggcgacguggucgccaucgacuacaagcacuacacccccuccuucaagaagggcgccaagcugcugcacaagcccaucguguggcacgugaacaacgccaccaacaaggcgacguacaagccgaacaucuggugcauccggugccucuggagcaccaagcccgucgagaccuccaacagcuucgacgugcugaaguccgaggacgcccaggggauggacaaccuggccugcgaggaccucaagcccgugagcgaggaggucguggagaaccccaccauccagaaggacgugcuggagugcaacgucaagacgaccgagguggugggcgacaucauccugaagccggccaacaacucccucaagaucaccgaggaggucgggcacaccgaccugauggccgcguacguggacaacagcucccugacgaucaagaagcccaacgagcucagccgcgugcugggccugaagacccucgccacccacgggcuggccgccgucaacuccgugcccugggacaccaucgccaacuacgcgaagccguuccugaacaagguggucagcacgaccaccaacaucgugacccgcugccucaaccgggugugcacgaacuacaugcccuacuucuucacccugcugcuccagcugugcaccuucacccgcuccaccaacagccggaucaaggccuccaugcccacgaccaucgccaagaacaccgucaagagcgugggcaaguucugccuggaggccagcuucaacuaccucaagucccccaacuucagcaagcugaucaacaucaucaucugguuccugcuccuguccgugugccugggcagccucaucuacuccaccgccgcgcuggggguccugaugagcaaccucggcaugccguccuacugcacgggguaccgcgagggcuaccugaacagcaccaacgugaccaucgccaccuacugcacgggcuccauccccugcagcgugugccuguccgggcucgacagccuggacaccuaccccucccuggagaccauccagaucaccaucagcuccuucaagugggaccucacggccuucggccuggucgccgagugguuccuggccuacauccucuucacccgguucuucuacgugcuggggcuggcggccaucaugcagcucuucuucagcuacuucgccgugcacuucaucuccaacagcuggcugauguggcugaucaucaaccugguccagauggcccccaucuccgcgauggugcgcauguacaucuucuucgccagcuucuacuacguguggaagagcuacguccacgugguggacggcugcaacuccagcaccugcaugaugugcuacaagcggaaccgcgccacccgggucgagugcacgaccaucgugaacgggguccgccgguccuucuacguguacgccaacggcggcaagggguucugcaagcuccacaacuggaacugcgugaacugcgacaccuucugcgccggcagcaccuucaucuccgacgaggucgcgcgcgaccugagccugcaguucaagcggccgaucaaccccacggaccaguccagcuacaucguggacuccgugaccgucaagaacgggagcauccaccucuacuucgacaaggccggccagaagaccuacgagcgccacucccugagccacuucgugaaccuggacaaccuccgggccaacaacaccaaggggucccugcccaucaacgugaucgucuucgacggcaagagcaagugcgaggaguccagcgccaaguccgccagcguguacuacucccagcugaugugccagcccauccuccugcuggaccaggcgcucgugagcgacgucggcgacagcgccgagguggccgugaagauguucgacgccuacgucaacacguucuccagcaccuucaacgugccgauggagaagcugaagacccugguggccaccgcggaggccgagcucgccaagaacgucucccuggacaacgugcugagcacguucaucuccgccgcgcgccagggguucguggacagcgacgucgagaccaaggacgugguggagugccucaagcugucccaccagagcgacaucgaggucaccggcgacuccugcaacaacuacaugcugaccuacaacaagguggagaacaugacgccccgggaccucggggccugcaucgacugcagcgcccgccacaucaacgcccagguggccaagucccacaacaucgcgcugaucuggaacgucaaggacuucaugagccuguccgagcagcuccggaagcagauccgcagcgccgccaagaagaacaaccugcccuucaagcugaccugcgccaccacccgccagguggugaacgucgugacgaccaagaucgcccucaagggcgggugaggacuaguuauaagacugacuagcccgaugggccucccaacgggcccuccuccccuccuugcaccgagauuaauaaaaaaaaaaaaaaaaaaaaaaaaaaaaaaaaaaaaaaaaaaaaaaaaaaaaaaaaaaaaaaaaugcaucccccccccccccccccccccccccccccccaaaggcucuuuucagagccaccagaauu

SEQ ID NO: 21425 - RNA, 6058 nt, Artificial Sequence
  SARS-CoV-2__MT892977.1__non-structural protein 3 (NSP3) mRNA gc
aggagaaagcuuaccauggcccccaccaaggugaccuucggcgacgacacggucaucgaggugcagggguacaagagcgugaacaucaccuucgagcuggacgagcgcaucgacaagguccucaacgagaagugcuccgccuacaccguggagcugggcaccgaggugaacgaguucgcgugcgucguggccgacgccgugaucaagacgcugcagccggucagcgagcuccugaccccccuggggaucgaccucgacgagugguccauggccaccuacuaccuguucgacgagagcggcgaguucaagcuggccucccacauguacugcagcuucuacccccccgacgaggacgaggaggagggggacugcgaggaggaggaguucgagccguccacccaguacgaguacggcacggaggacgacuaccagggcaagccccucgaguucggggcgaccagcgccgcccugcagcccgaggaggagcaggaggaggacuggcuggacgacgacucccagcagaccgugggccagcaggacgggagcgaggacaaccagaccacgaccauccagaccaucguggagguccagccccagcucgagauggagcugaccccgguggugcagacgaucgaggucaacuccuucagcggcuaccugaagcucaccgacaacguguacaucaagaacgccgacaucguggaggaggcgaagaaggucaagcccaccgugguggucaacgccgccaacguguaccugaagcacgggggcggcguggccggggcccugaacaaggcgaccaacaacgccaugcaggucgaguccgacgacuacaucgccacgaacggcccccucaagguggggggcagcugcguccuguccggccacaaccuggccaagcacugccuccacgugguggggcccaacgucaacaagggcgaggacauccagcugcugaagagcgccuacgagaacuucaaccagcacgaggugcuccuggcgccgcugcucuccgccgggaucuucggcgccgaccccauccacagccugcgggugugcgucgacaccgugcgcaccaacguguaccuggccgucuucgacaagaaccucuacgacaagcugguguccagcuuccuggagaugaagagcgagaagcagguggagcagaagaucgccgagauccccaaggaggaggucaagcccuucaucaccgaguccaagccgagcguggagcagcggaagcaggacgacaagaagaucaaggcgugcguggaggaggucacgaccacccucgaggagaccaaguuccugacggagaaccugcuccuguacaucgacaucaacgggaaccugcaccccgacuccgccacccucgugagcgacaucgacaucaccuuccugaagaaggacgcccccuacaucgugggcgacgucgugcaggagggcgugcugaccgccgucgugauccccacgaagaaggccgggggcaccaccgagaugcucgcgaaggcccugcgcaaggugccgaccgacaacuacaucacgaccuaccccgggcagggccugaacggguacaccgucgaggaggccaagaccgugcucaagaagugcaaguccgccuucuacauccugcccagcaucaucuccaacgagaagcaggagauccugggcaccgugagcuggaaccuccgggagaugcuggcgcacgccgaggagacgcgcaagcugaugcccgucugcguggagaccaaggccaucguguccaccauccagcggaaguacaagggcaucaagauccaggagggggucguggacuacggcgcccgcuucuacuucuacaccagcaagacgaccguggccucccugaucaacacccucaacgaccugaacgagacccuggucacgaugccgcucggguacgugacccacggccugaaccuggaggaggcggcccgguacaugcgcagccucaaggugcccgccaccgucuccgugagcucccccgacgccgugaccgccuacaacggguaccugacgagcuccagcaagacccccgaggagcacuucaucgagaccaucucccuggcgggcagcuacaaggacuggagcuacuccggccagagcacccagcucgggaucgaguuccugaagcggggcgacaaguccgucuacuacacgagcaacccgaccaccuuccaccuggacggggaggugaucaccuucgacaaccucaagacgcugcugucccuccgcgaggugcggaccaucaaggucuucaccaccguggacaacaucaaccugcacacgcagguggucgacaugagcaugaccuacggccagcaguucggccccaccuaccuggacggggccgacgugaccaagaucaagccccacaacucccacgagggcaagacguucuacgugcucccgaacgacgacacccugcgcgucgaggccuucgaguacuaccacaccaccgacagcuccuuccuggggcgguacaugagcgcccucaaccacacgaagaaguggaaguacccccaggugaacggccugaccuccaucaagugggccgacaacaacugcuaccuggcgaccgcccuccugacccugcagcagaucgagcucaaguucaacccccccgcccugcaggacgccuacuaccgcgcgcgggccggggaggccgccaacuucugcgcccugauccucgcguacugcaacaagacggugggcgagcugggcgacguccgcgagaccaugagcuaccuguuccagcacgccaaccucgacuccugcaagcgggugcugaacgucgugugcaagaccugcgggcagcagcagaccacccugaagggcguggaggccgucauguacauggggacgcucagcuacgagcaguucaagaagggcgugcagaucccgugcaccugcgggaagcaggccaccaaguaccuggugcagcaggagucccccuucgucaugaugagcgccccccccgcgcaguacgagcugaagcacggcaccuucacgugcgccuccgaguacaccggcaacuaccagugcgggcacuacaagcacaucaccagcaaggagacccucuacugcaucgacggcgcccugcugacgaagagcuccgaguacaaggggccgaucaccgacguguucuacaaggagaacagcuacaccaccacgaucaagcccgugaccuacaagcucgacggcgucgugugcaccgagaucgaccccaagcuggacaacuacuacaagaaggacaacuccuacuucaccgagcagcccaucgaccuggugccgaaccagcccuaccccaacgccagcuucgacaacuucaaguucgucugcgacaacaucaaguucgccgacgaccucaaccagcugacgggguacaagaagcccgcgucccgcgagcugaaggugaccuucuucccggaccucaacggcgacguggucgccaucgacuacaagcacuacacccccagcuucaagaagggcgccaagcugcugcacaagcccaucguguggcacgugaacaacgccaccaacaaggcgacguacaagcccaacaccuggugcauccggugccucugguccaccaagccggucgagaccagcaacuccuucgacgugcugaagagcgaggacgcccaggggauggacaaccuggccugcgaggaccucaagcccguguccgaggaggucguggagaaccccacgauccagaaggacgugcuggagugcaacgucaagaccaccgagguggugggcgacaucauccugaagcccgccaacaacagccucaagaucaccgaggaggucgggcacacggaccugauggccgcguacguggacaacuccagccugaccaucaagaagccgaacgagcucucccgcgugcugggccugaagacccucgccacccacgggcuggccgccgucaacagcgugcccugggacacgaucgccaacuacgcgaagcccuucuucaacaagguggucuccaccaccaccaacaucgugacgcgcugccugaaccgggugugcaccaacuacaugccguacuucuucacccuccugcugcagcucugcaccuucacccgcagcacgaacucccggaucaaggccagcaugcccaccaccaucgccaagaacaccgucaagagcgugggcaaguucugccuggaggccuccuucaacuaccugaagagccccaacuucuccaagcucaucaacaucaucaucugguuccugcugcucagcgugugccugggcucccugaucuacagcacggccgcgcucgggguccugauguccaaccugggcaugcccagcuacugcaccggguaccgcgagggcuaccucaacuccaccaacgugaccaucgccacguacugcaccggcagcaucccgugcuccgugugccugagcgggcuggacucccucgacaccuaccccagccuggagaccauccagaucacgaucuccagcuucaagugggaccugaccgccuucggccucgucgccgagugguuccuggccuacauccuguucacccgguucuucuacgugcucgggcuggcggccaucaugcagcuguucuucuccuacuucgccgugcacuucaucagcaacuccuggcucauguggcugaucaucaaccugguccagauggcccccaucagcgcgauggugcgcauguacaucuucuucgccagcuucuacuacguguggaaguccuacguccacgugguggacggcugcaacagcuccaccugcaugaugugcuacaagcggaaccgcgccacgcgggucgagugcaccaccaucgugaacgggguccgccggagcuucuacguguacgccaacggcggcaagggguucugcaagcugcacaacuggaacugcgugaacugcgacaccuucugcgccggcuccacguucaucagcgacgaggucgcgcgcgaccucucccugcaguucaagcggcccaucaacccgaccgaccagagcuccuacaucguggacagcgugaccgucaagaacggguccauccaccuguacuucgacaaggccggccagaagaccuacgagcgccacagccucucccacuucgugaaccuggacaaccugcgggccaacaacacgaaggggagccuccccaucaacgugaucgucuucgacggcaaguccaagugcgaggagagcuccgccaagagcgccuccguguacuacagccagcugaugugccagcccauccugcuccuggaccaggcgcuggugagcgacgucggcgacuccgccgagguggccgugaagauguucgacgccuacgucaacaccuucagcuccaccuucaacgugcccauggagaagcucaagacccugguggccacggcggaggccgagcuggccaagaacgucagccucgacaacgugcuguccaccuucaucagcgccgcgcgccagggguucguggacuccgacgucgagaccaaggacgugguggagugccugaagcucagccaccaguccgacaucgaggucaccggcgacagcugcaacaacuacaugcugacguacaacaagguggagaacaugaccccgcgggaccugggggccugcaucgacugcuccgcccgccacaucaacgcccagguggccaagagccacaacaucgcgcucaucuggaacgucaaggacuucaugucccugagcgagcagcugcggaagcagauccgcuccgccgccaagaagaacaaccuccccuucaagcugaccugcgccaccacgcgccagguggugaacgucgugaccaccaagaucgcccugaagggcgggugaggacuaguuauaagacugacuagcccgaugggccucccaacgggcccuccuccccuccuugcaccgagauuaauaaaaaaaaaaaaaaaaaaaaaaaaaaaaaaaaaaaaaaaaaaaaaaaaaaaaaaaaaaaaaaaaugcaucccccccccccccccccccccccccccccccaaaggcucuuuucagagccaccagaauu

SEQ ID NO: 21426 - RNA, 6058 nt, Artificial Sequence
  SARS-CoV-2__MT892981.1__non-structural protein 3 (NSP3) mRNA gc
aggagaaagcuuaccauggcccccaccaaggugaccuucggcgacgacacggucaucgaggugcagggguacaagagcgugaacaucaccuucgagcuggacgagcgcaucgacaagguccucaacgagaagugcuccgccuacaccguggagcugggcaccgaggugaacgaguucgcgugcgucguggccgacgccgugaucaagacgcugcagccggucagcgagcuccugaccccccuggggaucgaccucgacgagugguccauggccaccuacuaccuguucgacgagagcggcgaguucaagcuggccucccacauguacugcagcuucuacccccccgacgaggacgaggaggagggggacugcgaggaggaggaguucgagccguccacccaguacgaguacggcacggaggacgacuaccagggcaagccccucgaguucggggcgaccagcgccgcccugcagcccgaggaggagcaggaggaggacuggcuggacgacgacucccagcagaccgugggccagcaggacgggagcgaggacaaccagaccacgaccauccagaccaucguggagguccagccccagcucgagauggagcugaccccgguggugcagacgaucgaggucaacuccuucagcggcuaccugaagcucaccgacaacguguacaucaagaacgccgacaucguggaggaggcgaagaaggucaagcccaccgugguggucaacgccgccaacguguaccugaagcacgggggcggcguggccggggcccugaacaaggcgaccaacaacgccaugcaggucgaguccgacgacuacaucgccacgaacggcccccucaagguggggggcagcugcguccuguccggccacaaccuggccaagcacugccuccacgugguggggcccaacgucaacaagggcgaggacauccagcugcugaagagcgccuacgagaacuucaaccagcacgaggugcuccuggcgccgcugcucuccgccgggaucuucggcgccgaccccauccacagccugcgggugugcgucgacaccgugcgcaccaacguguaccuggccgucuucgacaagaaccucuacgacaagcugguguccagcuuccuggagaugaagagcgagaagcagguggagcagaagaucgccgagauccccaaggaggaggucaagcccuucaucaccgaguccaagccgagcguggagcagcggaagcaggacgacaagaagaucaaggcgugcguggaggaggucacgaccacccucgaggagaccaaguuccugacggagaaccugcuccuguacaucgacaucaacgggaaccugcaccccgacuccgccacccucgugagcgacaucgacaucaccuuccugaagaaggacgcccccuacaucgugggcgacgucgugcaggagggcgugcugaccgccgucgugauccccacgaagaaggccgggggcaccaccgagaugcucgcgaaggcccugcgcaaggugccgaccgacaacuacaucacgaccuaccccgggcagggccugaacggguacaccgucgaggaggccaagaccgugcucaagaagugcaaguccgccuucuacauccugcccagcaucaucuccaacgagaagcaggagauccugggcaccgugagcuggaaccuccgggagaugcuggcgcacgccgaggagacgcgcaagcugaugcccgucugcguggagaccaaggccaucguguccaccauccagcggaaguacaagggcaucaagauccaggagggggucguggacuacggcgcccgcuucuacuucuacaccagcaagacgaccguggccucccugaucaacacccucaacgaccugaacgagacccuggucacgaugccgcucggguacgugacccacggccugaaccuggaggaggcggcccgguacaugcgcagccucaaggugcccgccaccgucuccgugagcucccccgacgccgugaccgccuacaacggguaccugacgagcuccagcaagacccccgaggagcacuucaucgagaccaucucccuggcgggcagcuacaaggacuggagcuacuccggccagagcacccagcucgggaucgaguuccugaagcggggcgacaaguccgucuacuacacgagcaacccgaccaccuuccaccuggacggggaggugaucaccuucgacaaccucaagacgcugcugucccuccgcgaggugcggaccaucaaggucuucaccaccguggacaacaucaaccugcacacgcagguggucgacaugagcaugaccuacggccagcaguucggccccaccuaccuggacggggccgacgugaccaagaucaagccccacaacucccacgagggcaagacguucuacgugcucccgaacgacgacacccugcgcgucgaggccuucgaguacuaccacaccaccgaccccagcuuccuggggcgguacauguccgcccucaaccacacgaagaaguggaaguacccccaggugaacggccugaccagcaucaagugggccgacaacaacugcuaccuggcgaccgcccuccugauccugcagcagaucgagcucaaguucaaccccccggcccugcaggacgccuacuaccgcgcgcgggccggggaggccgccaacuucugcgcccugauccucgcguacugcaacaagaccgugggcgagcugggcgacguccgcgagacgauguccuaccuguuccagcacgccaaccucgacagcugcaagcgggugcugaacgucgugugcaagaccugcgggcagcagcagaccacccugaagggcguggaggccgucauguacauggggacccucuccuacgagcaguucaagaagggcgugcagauccccugcacgugcgggaagcaggccaccaaguaccuggugcagcaggagagccccuucgucaugauguccgcccccccggcgcaguacgagcugaagcacggcaccuucaccugcgccagcgaguacacgggcaacuaccagugcgggcacuacaagcacaucaccuccaaggagacccucuacugcaucgacggcgcccugcugaccaagagcagcgaguacaaggggcccaucacggacguguucuacaaggagaacuccuacaccaccaccaucaagcccgugacguacaagcucgacggcgucgugugcaccgagaucgaccccaagcuggacaacuacuacaagaaggacaacagcuacuucaccgagcagccgaucgaccuggugcccaaccagcccuaccccaacgccuccuucgacaacuucaaguucgucugcgacaacaucaaguucgccgacgaccucaaccagcugaccggguacaagaagccggcgagccgcgagcugaaggugacguucuuccccgaccucaacggcgacguggucgccaucgacuacaagcacuacacccccuccuucaagaagggcgccaagcugcugcacaagcccaucguguggcacgugaacaacgccaccaacaaggcgaccuacaagccgaacacguggugcauccggugccucuggagcaccaagcccgucgagaccuccaacagcuucgacgugcugaaguccgaggacgcccaggggauggacaaccuggccugcgaggaccucaagcccgugagcgaggaggucguggagaaccccaccauccagaaggacgugcuggagugcaacgucaagacgaccgagguggugggcgacaucauccugaagccggccaacaacucccucaagaucaccgaggaggucgggcacaccgaccugauggccgcguacguggacaacagcucccugacgaucaagaagcccaacgagcucagccgcgugcugggccugaagacccucgccacccacgggcuggccgccgucaacuccgugcccugggacaccaucgccaacuacgcgaagccguuccugaacaagguggucagcacgaccaccaacaucgugacccgcugccucaaccgggugugcacgaacuacaugcccuacuucuucacccugcugcuccagcugugcaccuucacccgcuccaccaacagccggaucaaggccuccaugcccacgaccaucgccaagaacaccgucaagagcgugggcaaguucugccuggaggccagcuucaacuaccucaagucccccaacuucagcaagcugaucaacaucaucaucugguuccugcuccuguccgugugccugggcagccucaucuacuccaccgccgcgcuggggguccugaugagcaaccucggcaugccguccuacugcacgggguaccgcgagggcuaccugaacagcaccaacgugaccaucgccaccuacugcacgggcuccauccccugcagcgugugccuguccgggcucgacagccuggacaccuaccccucccuggagaccauccagaucaccaucagcuccuucaagugggaccucacggccuucggccuggucgccgagugguuccuggccuacauccucuucacccgguucuucuacgugcuggggcuggcggccaucaugcagcucuucuucagcuacuucgccgugcacuucaucuccaacagcuggcugauguggcugaucaucaaccugguccagauggcccccaucuccgcgauggugcgcauguacaucuucuucgccagcuucuacuacguguggaagagcuacguccacgugguggacggcugcaacuccagcaccugcaugaugugcuacaagcggaaccgcgccacccgggucgagugcacgaccaucgugaacgggguccgccgguccuucuacguguacgccaacggcggcaagggguucugcaagcuccacaacuggaacugcgugaacugcgacaccuucugcgccggcagcaccuucaucuccgacgaggucgcgcgcgaccugagccugcaguucaagcggccgaucaaccccacggaccaguccagcuacaucguggacuccgugaccgucaagaacgggagcauccaccucuacuucgacaaggccggccagaagaccuacgagcgccacucccugagccacuucgugaaccuggacaaccuccgggccaacaacaccaaggggucccugcccaucaacgugaucgucuucgacggcaagagcaagugcgaggaguccagcgccaaguccgccagcguguacuacucccagcugaugugccagcccauccuccugcuggaccaggcgcucgugagcgacgucggcgacagcgccgagguggccgugaagauguucgacgccuacgucaacacguucuccagcaccuucaacgugccgauggagaagcugaagacccugguggccaccgcggaggccgagcucgccaagaacgucucccuggacaacgugcugagcacguucaucuccgccgcgcgccagggguucguggacagcgacgucgagaccaaggacgugguggagugccucaagcugucccaccagagcgacaucgaggucaccggcgacuccugcaacaacuacaugcugaccuacaacaagguggagaacaugacgccccgggaccucggggccugcaucgacugcagcgcccgccacaucaacgcccagguggccaagucccacaacaucgcgcugaucuggaacgucaaggacuucaugagccuguccgagcagcuccggaagcagauccgcagcgccgccaagaagaacaaccugcccuucaagcugaccugcgccaccacccgccagguggugaacgucgugacgaccaagaucgcccucaagggcgggugaggacuaguuauaagacugacuagcccgaugggccucccaacgggcccuccuccccuccuugcaccgagauuaauaaaaaaaaaaaaaaaaaaaaaaaaaaaaaaaaaaaaaaaaaaaaaaaaaaaaaaaaaaaaaaaaugcaucccccccccccccccccccccccccccccccaaaggcucuuuucagagccaccagaauu

SEQ ID NO: 21427 - RNA, 6058 nt, Artificial Sequence
  SARS-CoV-2__MT892982.1__non-structural protein 3 (NSP3) mRNA gc
aggagaaagcuuaccauggcccccaccaaggugaccuucggcgacgacacggucaucgaggugcagggguacaagagcgugaacaucaccuucgagcuggacgagcgcaucgacaagguccucaacgagaagugcuccgccuacaccguggagcugggcaccgaggugaacgaguucgcgugcgucguggccgacgccgugaucaagacgcugcagccggucagcgagcuccugaccccccuggggaucgaccucgacgagugguccauggccaccuacuaccuguucgacgagagcggcgaguucaagcuggccucccacauguacugcagcuucuacccccccgacgaggacgaggaggagggggacugcgaggaggaggaguucgagccguccacccaguacgaguacggcacggaggacgacuaccagggcaagccccucgaguucggggcgaccagcgccgcccugcagcccgaggaggagcaggaggaggacuggcuggacgacgacucccagcagaccgugggccagcaggacgggagcgaggacaaccagaccacgaccauccagaccaucguggagguccagccccagcucgagauggagcugaccccgguggugcagacgaucgaggucaacuccuucagcggcuaccugaagcucaccgacaacguguacaucaagaacgccgacaucguggaggaggcgaagaaggucaagcccaccgugguggucaacgccgccaacguguaccugaagcacgggggcggcguggccggggcccugaacaaggcgaccaacaacgccaugcaggucgaguccgacgacuacaucgccacgaacggcccccucaagguggggggcagcugcguccuguccggccacaaccuggccaagcacugccuccacgugguggggcccaacgucaacaagggcgaggacauccagcugcugaagagcgccuacgagaacuucaaccagcacgaggugcuccuggcgccgcugcucuccgccgggaucuucggcgccgaccccauccacagccugcgggugugcgucgacaccgugcgcaccaacguguaccuggccgucuucgacaagaaccucuacgacaagcugguguccagcuuccuggagaugaagagcgagaagcagguggagcagaagaucgccgagauccccaaggaggaggucaagcccuucaucaccgaguccaagccgagcguggagcagcggaagcaggacgacaagaagaucaaggcgugcguggaggaggucacgaccacccucgaggagaccaaguuccugacggagaaccugcuccuguacaucgacaucaacgggaaccugcaccccgacuccgccacccucgugagcgacaucgacaucaccuuccugaagaaggacgcccccuacaucgugggcgacgucgugcaggagggcgugcugaccgccgucgugauccccacgaagaaggccgggggcaccaccgagaugcucgcgaaggcccugcgcaaggugccgaccgacaacuacaucacgaccuaccccgggcagggccugaacggguacaccgucgaggaggccaagaccgugcucaagaagugcaaguccgccuucuacauccugcccagcaucaucuccaacgagaagcaggagauccugggcaccgugagcuggaaccuccgggagaugcuggcgcacgccgaggagacgcgcaagcugaugcccgucugcguggagaccaaggccaucguguccaccauccagcggaaguacaagggcaucaagauccaggagggggucguggacuacggcgcccgcuucuacuucuacaccagcaagacgaccguggccucccugaucaacacccucaacgaccugaacgagacccuggucacgaugccgcucggguacgugacccacggccugaaccuggaggaggcggcccgguacaugcgcagccucaaggugcccgccaccgucuccgugagcucccccgacgccgugaccgccuacaacggguaccugacgagcuccagcaagacccccgaggagcacuucaucgagaccaucucccuggcgggcagcuacaaggacuggagcuacuccggccagagcacccagcucgggaucgaguuccugaagcggggcgacaaguccgucuacuacacgagcaacccgaccaccuuccaccuggacggggaggugaucaccuucgacaaccucaagacgcugcugucccuccgcgaggugcggaccaucaaggucuucaccaccguggacaacaucaaccugcacacgcagguggucgacaugagcaugaccuacggccagcaguucggccccaccuaccuggacggggccgacgugaccaagaucaagccccacaacucccacgagggcaagacguucuacgugcucccgaacgacgacacccugcgcgucgaggccuucgaguacuaccacaccaccgaccccagcuuccuggggcgguacauguccgcccucaaccacacgaagaaguggaaguacccccaggugaacggccugaccagcaucaagugggccgacaacaacugcuaccuggcgaccgcccuccugacccugcagcagaucgagcucaaguucaaccccccggcccugcaggacgccuacuaccgcgcgcgggccggggaggccgugaacuucugcgcccugauccucgccuacugcaacaagacggucggcgagcugggcgacgugcgcgagaccauguccuaccuguuccagcacgcgaaccucgacagcugcaagcggguccugaacguggugugcaagaccugcgggcagcagcagaccacccugaagggcgucgaggccgugauguacauggggacgcucuccuacgagcaguucaagaagggcgugcagauccccugcaccugcgggaagcaggccaccaaguaccugguccagcaggagagccccuucgugaugauguccgcccccccggcccaguacgagcugaagcacggcaccuucacgugcgcgagcgaguacaccggcaacuaccagugcgggcacuacaagcacaucaccuccaaggagacccucuacugcaucgacggcgcccugcugacgaagagcagcgaguacaaggggcccaucaccgacguguucuacaaggagaacuccuacaccaccacgaucaagcccgucaccuacaagcucgacggcguggugugcaccgagaucgaccccaagcuggacaacuacuacaagaaggacaacagcuacuucaccgagcagccgaucgaccugguccccaaccagcccuaccccaacgccuccuucgacaacuucaaguucgugugcgacaacaucaaguucgccgacgaccucaaccagcugacgggguacaagaagccggccagccgcgagcugaaggugaccuucuuccccgaccucaacggcgacgucguggcgaucgacuacaagcacuacacccccuccuucaagaagggcgccaagcugcugcacaagcccaucguguggcacgucaacaacgccaccaacaaggccacguacaagccgaacaccuggugcauccggugccucuggagcaccaagcccguggagaccuccaacagcuucgacgugcugaaguccgaggacgcgcaggggauggacaaccuggccugcgaggaccucaagcccgucagcgaggaggugguggagaaccccacgauccagaaggacguccuggagugcaacgugaagaccaccgagguggucggcgacaucauccugaagccggccaacaacucccucaagaucaccgaggagguggggcacacggaccugauggccgccuacguggacaacagcucccugaccaucaagaagcccaacgagcucagccgcguccugggccugaagacccucgcgacccacgggcuggccgccgugaacuccgugcccugggacacgaucgccaacuacgccaagccguuccugaacaaggucgugagcaccaccaccaacaucgugacgcgcugccucaaccgggucugcaccaacuacaugcccuacuucuucacccugcugcuccagcugugcaccuucacccgcuccacgaacagccggaucaaggcguccaugcccaccaccaucgccaagaacaccgugaagagcgugggcaaguucugccuggaggccagcuucaacuaccucaagucccccaacuucagcaagcugaucaacaucaucaucugguuccugcuccuguccgucugccugggcagccucaucuacuccacggccgcccugggggugcugaugagcaaccucggcaugccguccuacugcaccggguaccgcgagggcuaccugaacagcaccaacgugaccaucgcgacguacugcaccggcuccauccccugcagcgucugccuguccgggcucgacagccuggacaccuaccccucccuggagaccauccagaucacgaucagcuccuucaagugggaccucaccgccuucggccugguggccgagugguuccuggccuacauccucuucacccgguucuucuacgugcuggggcuggccgcgaucaugcagcucuucuucagcuacuucgccguccacuucaucuccaacagcuggcugauguggcugaucaucaaccuggugcagauggcccccaucuccgccauggugcgcauguacaucuucuucgcgagcuucuacuacgucuggaagagcuacgugcacguggucgacggcugcaacuccagcaccugcaugaugugcuacaagcggaaccgcgccacgcggguggagugcaccaccaucgucaacggggugcgccgguccuucuacguguacgccaacggcggcaagggguucugcaagcuccacaacuggaacugcgucaacugcgacaccuucugcgccggcagcacguucaucuccgacgagguggcccgcgaccugagccugcaguucaagcggccgaucaaccccaccgaccaguccagcuacaucguggacuccgucaccgugaagaacgggagcauccaccucuacuucgacaaggcgggccagaagaccuacgagcgccacucccugagccacuucgugaaccuggacaaccuccgggccaacaacacgaaggggucccugcccaucaacgucaucguguucgacggcaagagcaagugcgaggaguccagcgccaaguccgccagcguguacuacucccagcugaugugccagcccauccuccugcuggaccaggcccucgucagcgacgugggcgacagcgcggagguggccgucaagauguucgacgccuacgugaacaccuucuccagcaccuucaacgugccgauggagaagcugaagacccuggucgccacggccgaggcggagcucgccaagaacgugucccuggacaacgugcugagcaccuucaucuccgccgcccgccagggguucgucgacagcgacguggagaccaaggacguggucgagugccucaagcugucccaccagagcgacaucgaggugaccggcgacuccugcaacaacuacaugcugacguacaacaagguggagaacaugaccccccgggaccucggggcgugcaucgacugcagcgcccgccacaucaacgcccaggucgccaagucccacaacaucgcccugaucuggaacgugaaggacuucaugagccuguccgagcagcuccggaagcagauccgcagcgcggccaagaagaacaaccugcccuucaagcugaccugcgccaccacgcgccagguggucaacguggugaccaccaagaucgcccucaagggcgggugaggacuaguuauaagacugacuagcccgaugggccucccaacgggcccuccuccccuccuugcaccgagauuaauaaaaaaaaaaaaaaaaaaaaaaaaaaaaaaaaaaaaaaaaaaaaaaaaaaaaaaaaaaaaaaaaugcaucccccccccccccccccccccccccccccccaaaggcucuuuucagagccaccagaauu

SEQ ID NO: 21428 - RNA, 6058 nt, Artificial Sequence
  SARS-CoV-2__MT892985.1__non-structural protein 3 (NSP3) mRNA gc
aggagaaagcuuaccauggcccccaccaaggugaccuucggcgacgacacggucaucgaggugcagggguacaagagcgugaacaucaccuucgagcuggacgagcgcaucgacaagguccucaacgagaagugcuccgccuacaccguggagcugggcaccgaggugaacgaguucgcgugcgucguggccgacgccgugaucaagacgcugcagccggucagcgagcuccugaccccccuggggaucgaccucgacgagugguccauggccaccuacuaccuguucgacgagagcggcgaguucaagcuggccucccacauguacugcagcuucuacccccccgacgaggacgaggaggagggggacugcgaggaggaggaguucgagccguccacccaguacgaguacggcacggaguacgacuaccagggcaagccccucgaguucggggcgaccagcgccgcccugcagcccgaggaggagcaggaggaggacuggcuggacgacgacucccagcagaccgugggccagcaggacgggagcgaggacaaccagaccacgaccauccagaccaucguggagguccagccccagcucgagauggagcugaccccgguggugcagacgaucgaggucaacuccuucagcggcuaccugaagcucaccgacaacguguacaucaagaacgccgacaucguggaggaggcgaagaaggucaagcccaccgugguggucaacgccgccaacguguaccugaagcacgggggcggcguggccggggcccugaacaaggcgaccaacaacgccaugcaggucgaguccgacgacuacaucgccacgaacggcccccucaagguggggggcagcugcguccuguccggccacaaccuggccaagcacugccuccacgugguggggcccaacgucaacaagggcgaggacauccagcugcugaagagcgccuacgagaacuucaaccagcacgaggugcuccuggcgccgcugcucuccgccgggaucuucggcgccgaccccauccacagccugcgggugugcgucgacaccgugcgcaccaacguguaccuggccgucuucgacaagaaccucuacgacaagcugguguccagcuuccuggagaugaagagcgagaagcagguggagcagaagaucgccgagauccccaaggaggaggucaagcccuucaucaccgaguccaagccgagcguggagcagcggaagcaggacgacaagaagaucaaggcgugcguggaggaggucacgaccacccucgaggagaccaaguuccugacggagaaccugcuccuguacaucgacaucaacgggaaccugcaccccgacuccgccacccucgugagcgacaucgacaucaccuuccugaagaaggacgcccccuacaucgugggcgacgucgugcaggagggcgugcugaccgccgucgugauccccacgaagaaggccgggggcaccaccgagaugcucgcgaaggcccugcgcaaggugccgaccgacaacuacaucacgaccuaccccgggcagggccugaacggguacaccgucgaggaggccaagaccgugcucaagaagugcaaguccgccuucuacauccugcccagcaucaucuccaacgagaagcaggagauccugggcaccgugagcuggaaccuccgggagaugcuggcgcacgccgaggagacgcgcaagcugaugcccgucugcguggagaccaaggccaucguguccaccauccagcggaaguacaagggcaucaagauccaggagggggucguggacuacggcgcccgcuucuacuucuacaccagcaagacgaccguggccucccugaucaacacccucaacgaccugaacgagacccuggucacgaugccgcucggguacgugacccacggccugaaccuggaggaggcggcccgguacaugcgcagccucaaggugcccgccaccgucuccgugagcucccccgacgccgugaccgccuacaacggguaccugacgagcuccagcaagacccccgaggagcacuucaucgagaccaucucccuggcgggcagcuacaaggacuggagcuacuccggccagagcacccagcucgggaucgaguuccugaagcggggcgacaaguccgucuacuacacgagcaacccgaccaccuuccaccuggacggggaggugaucaccuucgacaaccucaagacgcugcugucccuccgcgaggugcggaccaucaaggucuucaccaccguggacaacaucaaccugcacacgcagguggucgacaugagcaugaccuacggccagcaguucggccccaccuaccuggacggggccgacgugaccaagaucaagccccacaacucccacgagggcaagacguucuacgugcucccgaacgacgacacccugcgcgucgaggccuucgaguacuaccacaccaccgaccccagcuuccuggggcgguacauguccgcccucaaccacacgaagaaguggaaguacccccaggugaacggccugaccagcaucaagugggccgacaacaacugcuaccuggcgaccgcccuccugacccugcagcagaucgagcucaaguucaaccccccggcccugcaggacgccuacuaccgcgcgcgggccggggaggccgccaacuucugcgcccugauccucgcguacugcaacaagacggugggcgagcugggcgacguccgcgagaccauguccuaccuguuccagcacgccaaccucgacagcugcaagcgggugcugaacgucgugugcaagaccugcgggcagcagcagaccacccugaagggcguggaggccgucauguacauggggacgcucuccuacgagcaguucaagaagggcgugcagauccccugcaccugcgggaagcaggccaccaaguaccuggugcagcaggagagccccuucgucaugauguccgcccccccggcgcaguacgagcugaagcacggcaccuucacgugcgccagcgaguacaccggcaacuaccagugcgggcacuacaagcacaucaccuccaaggagacccucuacugcaucgacggcgcccugcugacgaagagcagcgaguacaaggggcccaucaccgacguguucuacaaggagaacuccuacaccaccacgaucaagcccgugaccuacaagcucgacggcgucgugugcaccgagaucgaccccaagcuggacaacuacuacaagaaggacaacagcuacuucaccgagcagccgaucgaccuggugcccaaccagcccuaccccaacgccuccuucgacaacuucaaguucgucugcgacaacaucaaguucgccgacgaccucaaccagcugacgggguacaagaagccggcgagccgcgagcugaaggugaccuucuuccccgaccucaacggcgacguggucgccaucgacuacaagcacuacacccccuccuucaagaagggcgccaagcugcugcacaagcccaucguguggcacgugaacaacgccaccaacaaggcgacguacaagccgaacaccuggugcauccggugccucuggagcaccaagcccgucgagaccuccaacagcuucgacgugcugaaguccgaggacgcccaggggauggacaaccuggccugcgaggaccucaagcccgugagcgaggaggucguggagaaccccacgauccagaaggacgugcuggagugcaacgucaagaccaccgagguggugggcgacaucauccugaagccggccaacaacucccucaagaucaccgaggaggucgggcacacggaccugauggccgcguacguggacaacagcucccugaccaucaagaagcccaacgagcucagccgcgugcugggccugaagacccucgccacccacgggcuggccgccgucaacuccgugcccugggacacgaucgccaacuacgcgaagccguuccugaacaagguggucagcaccaccaccaacaucgugacgcgcugccucaaccgggugugcaccaacuacaugcccuacuucuucacccugcugcuccagcugugcaccuucacccgcuccacgaacagccggaucaaggccuccaugcccaccaccaucgccaagaacaccgucaagagcgugggcaaguucugccuggaggccagcuucaacuaccucaagucccccaacuucagcaagcugaucaacaucaucaucugguuccugcuccuguccgugugccugggcagccucaucuacuccacggccgcgcuggggguccugaugagcaaccucggcaugccguccuacugcaccggguaccgcgagggcuaccugaacagcaccaacgugaccaucgccacguacugcaccggcuccauccccugcagcgugugccuguccgggcucgacagccuggacaccuaccccucccuggagaccauccagaucacgaucagcuccuucaagugggaccucaccgccuucggccuggucgccgagugguuccuggccuacauccucuucacccgguucuucuacgugcuggggcuggcggccaucaugcagcucuucuucagcuacuucgccgugcacuucaucuccaacagcuggcugauguggcugaucaucaaccugguccagauggcccccaucuccgcgauggugcgcauguacaucuucuucgccagcuucuacuacguguggaagagcuacguccacgugguggacggcugcaacuccagcaccugcaugaugugcuacaagcggaaccgcgccacgcgggucgagugcaccaccaucgugaacgggguccgccgguccuucuacguguacgccaacggcggcaagggguucugcaagcuccacaacuggaacugcgugaacugcgacaccuucugcgccggcagcacguucaucuccgacgaggucgcgcgcgaccugagccugcaguucaagcggccgaucaaccccaccgaccaguccagcuacaucguggacuccgugaccgucaagaacgggagcauccaccucuacuucgacaaggccggccagaagaccuacgagcgccacucccugagccacuucgugaaccuggacaaccuccgggccaacaacacgaaggggucccugcccaucaacgugaucgucuucgacggcaagagcaagugcgaggaguccagcgccaaguccgccagcguguacuacucccagcugaugugccagcccauccuccugcuggaccaggcgcucgugagcgacgucggcgacagcgccgagguggccgugaagauguucgacgccuacgucaacaccuucuccagcaccuucaacgugccgauggagaagcugaagacccugguggccacggcggaggccgagcucgccaagaacgucucccuggacaacgugcugagcaccuucaucuccgccgcgcgccagggguucguggacagcgacgucgagaccaaggacgugguggagugccucaagcugucccaccagagcgacaucgaggucaccggcgacuccugcaacaacuacaugcugacguacaacaagguggagaacaugaccccccgggaccucggggccugcaucgacugcagcgcccgccacaucaacgcccagguggccaagucccacaacaucgcgcugaucuggaacgucaaggacuucaugagccuguccgagcagcuccggaagcagauccgcagcgccgccaagaagaacaaccugcccuucaagcugaccugcgccaccacgcgccagguggugaacgucgugaccaccaagaucgcccucaagggcgggugaggacuaguuauaagacugacuagcccgaugggccucccaacgggcccuccuccccuccuugcaccgagauuaauaaaaaaaaaaaaaaaaaaaaaaaaaaaaaaaaaaaaaaaaaaaaaaaaaaaaaaaaaaaaaaaaugcaucccccccccccccccccccccccccccccccaaaggcucuuuucagagccaccagaauu

SEQ ID NO: 21429 - RNA, 6058 nt, Artificial Sequence
  SARS-CoV-2__MT893006.1__non-structural protein 3 (NSP3) mRNA gc
aggagaaagcuuaccauggcccccaccaaggugaccuucggcgacgacacggucaucgaggugcagggguacaagagcgugaacaucaccuucgagcuggacgagcgcaucgacaagguccucaacgagaagugcuccgccuacaccguggagcugggcaccgaggugaacgaguucgcgugcgucguggccgacgccgugaucaagacgcugcagccggucagcgagcuccugaccccccuggggaucgaccucgacgagugguccauggccaccuacuaccuguucgacgagagcggcgaguucaagcuggccucccacauguacugcagcuucuacccccccgacgaggacgaggaggagggggacugcgaggaggaggaguucgagccguccacccaguacgaguacggcacggaggacgacuaccagggcaagccccucgaguucggggcgaccagcgccgcccugcagcccgaggaggagcaggaggaggacuggcuggacgacgacucccagcagaccgugggccagcaggacgggagcgaggacaaccagaccacgaccauccagaccaucguggagguccagccccagcucgagauggagcugaccccgguggugcagacgaucgaggucaacuccuucagcggcuaccugaagcucaccgacaacguguacaucaagaacgccgacaucguggaggaggcgaagaaggucaagcccaccgugguggucaacgccgccaacguguaccugaagcacgggggcggcguggccggggcccugaacaaggcgaccaacaacgccaugcaggucgaguccgacgacuacaucgccacgaacggcccccucaagguggggggcagcugcguccuguccggccacaaccuggccaagcacugccuccacgugguggggcccaacgucaacaagggcgaggacauccagcugcugaagagcgccuacgagaacuucaaccagcacgaggugcuccuggcgccgcugcucuccgccgggaucuucggcgccgaccccauccacagccugcgggugugcgucgacaccgugcgcaccaacguguaccuggccgucuucgacaagaaccucuacgacaagcugguguccagcuuccuggagaugaagagcgagaagcagguggagcagaagaucgccgagauccccaaggaggaggucaagcccuucaucaccgaguccaagccgagcguggagcagcggaagcaggacgacaagaagaucaaggcgugcguggaggaggucacgaccacccucgaggagaccaaguuccugacggagaaccugcuccuguacaucgacaucaacgggaaccugcaccccgacuccgccacccucgugagcgacaucgacaucaccuuccugaagaaggacgcccccuacaucgugggcgacgucgugcaggagggcgugcugaccgccgucgugauccccacgaagaaggccgggggcaccaccgagaugcucgcgaaggcccugcgcaaggugccgaccgacaacuacaucacgaccuaccccgggcagggccugaacggguacaccgucgaggaggccaagaccgugcucaagaagugcaaguccgccuucuacauccugcccagcaucaucuccaacgagaagcaggagauccugggcaccgugagcuggaaccuccgggagaugcuggcgcacgccgaggagacgcgcaagcugaugcccgucugcguggagaccaaggccaucguguccaccauccagcggaaguacaagggcaucaagauccaggagggggucguggacuacggcgcccgcuucuacuucuacaccagcaagacgaccguggccucccugaucaacacccucaacgaccugaacgagacccuggucacgaugccgcucggguacgugacccacggccugaaccuggaggaggcggcccgguacaugcgcagccucaaggugcccgccaccgucuccgugagcucccccgacgccgugaccgccuacaacggguaccugacgagcuccagcaagacccccgaggagcacuucaucgagaccaucucccuggcgggcagcuacaaggacuggagcuacuccggccagagcacccagcucgggaucgaguuccugaagcggggcgacaaguccgucuacuacacgagcaacccgaccaccuuccaccuggacggggaggugaucaccuucgacaaccucaagacgcugcugucccuccgcgaggugcggaccaucaaggucuucaccaccguggacaacaucaaccugcacacgcagguggucgacaugagcaugaccuacggccagcaguucggccccaccuaccuggacggggccgacgugaccaagaucaagccccacaacucccacgagggcaagacguucuacgugcucccgaacgacgacacccugcgcgucgaggccuucgaguacuaccacaccaccgaccccagcuuccuggggcgguacauguccgcccucaaccacacgaagaaguggaaguacccccaggugaacggccugaccagcaucaagugggccgacaacaacugcuaccuggcgaccgcccuccugacccugcagcagaucgagcucaaguucaaccccccggcccugcaggacgccuacuaccgcgcgcgggccggggaggccgccaacuucugcgcccugauccucgcguacugcaacaagacggugggcgagcugggcgacguccgcgagaccauguccuaccuguuccagcacgccaaccucgacagcugcaagcgggugcugaacgucgugugcaagaccugcgggcagcagcagaccacccugaagggcguggaggccgucauguacauggggacgcucuccuacgagcaguucaagaagggcgugcagauccccugcaccugcgggaagcaggccaccaaguaccuggugcagcaggagagccccuucgucaugauguccgcccccccggcgcaguacgagcugaagcacggcaccuucacgugcgccagcgaguacaccggcaacuaccagugcgggcacuacaagcacaucaccuccaaggagacccucuacugcaucgacggcgcccugcugacgaagagcagcgaguacaaggggcccaucaccgacguguucuacaaggagaacuccuacaccaccacgaucaagcccgugaucuacaagcucgacggcgucgugugcaccgagaucgaccccaagcuggacaacuacuacaagaaggacaacagcuacuucaccgagcagccgaucgaccuggugcccaaccagcccuaccccaacgccuccuucgacaacuucaaguucgucugcgacaacaucaaguucgccgacgaccucaaccagcugaccggguacaagaagccggcgagccgcgagcugaaggugacguucuuccccgaccucaacggcgacguggucgccaucgacuacaagcacuacacccccuccuucaagaagggcgccaagcugcugcacaagcccaucguguggcacgugaacaacgccaccaacaaggcgaccuacaagccgaacacguggugcauccggugccucuggagcaccaagcccgucgagaccuccaacagcuucgacgugcugaaguccgaggacgcccaggggauggacaaccuggccugcgaggaccucaagcccgugagcgaggaggucguggagaaccccaccauccagaaggacgugcuggagugcaacgucaagacgaccgagguggugggcgacaucauccugaagccggccaacaacucccucaagaucaccgaggaggucgggcacaccgaccugauggccgcguacguggacaacagcucccugacgaucaagaagcccaacgagcucagccgcgugcugggccugaagacccucgccacccacgggcuggccgccgucaacuccgugcccugggacaccaucgccaacuacgcgaagccguuccugaacaagguggucagcacgaccaccaacaucgugacccgcugccucaaccgggugugcacgaacuacaugcccuacuucuucacccugcugcuccagcugugcaccuucacccgcuccaccaacagccggaucaaggccuccaugcccacgaccaucgccaagaacaccgucaagagcgugggcaaguucugccuggaggccagcuucaacuaccucaagucccccaacuucagcaagcugaucaacaucaucaucugguuccugcuccuguccgugugccugggcagccucaucuacuccaccgccgcgcuggggguccugaugagcaaccucggcaugccguccuacugcacgggguaccgcgagggcuaccugaacagcaccaacgugaccaucgccaccuacugcacgggcuccauccccugcagcgugugccuguccgggcucgacagccuggacaccuaccccucccuggagaccauccagaucaccaucagcuccuucaagugggaccucacggccuucggccuggucgccgagugguuccuggccuacauccucuucacccgguucuucuacgugcuggggcuggcggccaucaugcagcucuucuucagcuacuucgccgugcacuucaucuccaacagcuggcugauguggcugaucaucaaccugguccagauggcccccaucuccgcgauggugcgcauguacaucuucuucgccagcuucuacuacguguggaagagcuacguccacgugguggacggcugcaacuccagcaccugcaugaugugcuacaagcggaaccgcgccacccgggucgagugcacgaccaucgugaacgggguccgccgguccuucuacguguacgccaacggcggcaagggguucugcaagcuccacaacuggaacugcgugaacugcgacaccuucugcgccggcagcaccuucaucuccgacgaggucgcgcgcgaccugagccugcaguucaagcggccgaucaaccccacggaccaguccagcuacaucguggacuccgugaccgucaagaacgggagcauccaccucuacuucgacaaggccggccagaagaccuacgagcgccacucccugagccacuucgugaaccuggacaaccuccgggccaacaacaccaaggggucccugcccaucaacgugaucgucuucgacggcaagagcaagugcgaggaguccagcgccaaguccgccagcguguacuacucccagcugaugugccagcccauccuccugcuggaccaggcgcucgugagcgacgucggcgacagcgccgagguggccgugaagauguucgacgccuacgucaacacguucuccagcaccuucaacgugccgauggagaagcugaagacccugguggccaccgcggaggccgagcucgccaagaacgucucccuggacaacgugcugagcacguucaucuccgccgcgcgccagggguucguggacagcgacgucgagaccaaggacgugguggagugccucaagcugucccaccagagcgacaucgaggucaccggcgacuccugcaacaacuacaugcugaccuacaacaagguggagaacaugacgccccgggaccucggggccugcaucgacugcagcgcccgccacaucaacgcccagguggccaagucccacaacaucgcgcugaucuggaacgucaaggacuucaugagccuguccgagcagcuccggaagcagauccgcagcgccgccaagaagaacaaccugcccuucaagcugaccugcgccaccacccgccagguggugaacgucgugacgaccaagaucgcccucaagggcgggugaggacuaguuauaagacugacuagcccgaugggccucccaacgggcccuccuccccuccuugcaccgagauuaauaaaaaaaaaaaaaaaaaaaaaaaaaaaaaaaaaaaaaaaaaaaaaaaaaaaaaaaaaaaaaaaaugcaucccccccccccccccccccccccccccccccaaaggcucuuuucagagccaccagaauu

SEQ ID NO: 21430 - RNA, 6058 nt, Artificial Sequence
  SARS-CoV-2__MT893010.1__non-structural protein 3 (NSP3) mRNA gc
aggagaaagcuuaccauggcccccaccaaggugaccuucggcgacgacacggucaucgaggugcagggguacaagagcgugaacaucaccuucgagcuggacgaguccaucgacaagguccucaacgagaagugcagcgccuacaccguggagcugggcaccgaggugaacgaguucgcgugcgucguggccgacgccgugaucaagacgcugcagccggucuccgagcuccugaccccccuggggaucgaccucgacgaguggagcauggccaccuacuaccuguucgacgaguccggcgaguucaagcuggccagccacauguacugcuccuucuacccccccgacgaggacgaggaggagggggacugcgaggaggaggaguucgagccgagcacccaguacgaguacggcacggaggacgacuaccagggcaagccccucgaguucggggcgaccuccgccgcccugcagcccgaggaggagcaggaggaggacuggcuggacgacgacagccagcagaccgugggccagcaggacggguccgaggacaaccagaccacgaccauccagaccaucguggagguccagccccagcucgagauggagcugaccccgguggugcagacgaucgaggucaacagcuucuccggcuaccugaagcucaccgacaacguguacaucaagaacgccgacaucguggaggaggcgaagaaggucaagcccaccgugguggucaacgccgccaacguguaccugaagcacgggggcggcguggccggggcccugaacaaggcgaccaacaacgccaugcaggucgagagcgacgacuacaucgccacgaacggcccccucaagguggggggcuccugcguccugagcggccacaaccuggccaagcacugccuccacgugguggggcccaacgucaacaagggcgaggacauccagcugcugaaguccgccuacgagaacuucaaccagcacgaggugcuccuggcgccgcugcucagcgccgggaucuucggcgccgaccccauccacucccugcgcgugugcgucgacaccgugcggaccaacguguaccuggccgucuucgacaagaaccucuacgacaagcuggugagcagcuuccuggagaugaaguccgagaagcagguggagcagaagaucgccgagauccccaaggaggaggucaagcccuucaucaccgagagcaagccguccguggagcagcgcaagcaggacgacaagaagaucaaggcgugcguggaggaggucacgaccacccucgaggagaccaaguuccugacggagaaccugcuccuguacaucgacaucaacgggaaccugcaccccgacagcgccacccucguguccgacaucgacaucaccuuccugaagaaggacgcccccuacaucgugggcgacgucgugcaggagggcgugcugaccgccgucgugauccccacgaagaaggccgggggcaccaccgagaugcucgcgaaggcccugcggaaggugccgaccgacaacuacaucacgaccuaccccgggcagggccugaacggguacaccgucgaggaggccaagaccgugcucaagaagugcaagagcgccuucuacauccugcccuccaucaucagcaacgagaagcaggagauccugggcaccguguccuggaaccuccgcgagaugcuggcgcacgccgaggagacgcggaagcugaugcccgucugcguggagaccaaggccaucgugagcaccauccagcgcaaguacaagggcaucaagauccaggagggggucguggacuacggcgcccgguucuacuucuacaccuccaagacgaccguggccagccugaucaacacccucaacgaccugaacgagacccuggucacgaugccgcucggguacgugacccacggccugaaccuggaggaggcggcccgcuacaugcggucccucaaggugcccgccaccgucagcguguccagccccgacgccgugaccgccuacaacggguaccugacguccagcuccaagacccccgaggagcacuucaucgagaccaucagccuggcgggcagcuacaaggacugguccuacagcggccaguccacccagcucgggaucgaguuccugaagcgcggcgacaagagcgucuacuacacguccaacccgaccaccuuccaccuggacggggaggugaucaccuucgacaaccucaagacgcugcugagccuccgggaggugcgcaccaucaaggucuucaccaccguggacaacaucaaccugcacacgcagguggucgacauguccaugaccuacggccagcaguucggccccaccuaccuggacggggccgacgugaccaagaucaagccccacaacagccacgagggcaagacguucuacgugcucccgaacgacgacacccugcgggucgaggccuucgaguacuaccacaccaccgaccccuccuuccuggggcgcuacaugagcgcccucaaccacacgaagaaguggaaguacccccaggugaacggccugaccuccaucaagugggccgacaacaacugcuaccuggcgaccgcccuccugacccugcagcagaucgagcucaaguucaaccccccggcccugcaggacgccuacuaccgggcgcgcgccggggaggccgccaacuucugcgcccugauccucgcguacugcaacaagacggugggcgagcugggcgacguccgggagaccaugagcuaccuguuccagcacgccaaccucgacuccugcaagcgcgugcugaacgucgugugcaagaccugcgggcagcagcagaccacccugaagggcguggaggccgucauguacauggggacgcucagcuacgagcaguucaagaagggcgugcagauccccugcaccugcgggaagcaggccaccaaguaccuggugcagcaggagucccccuucgucaugaugagcgcccccccggcgcaguacgagcugaagcacggcaccuucacgugcgccuccgaguacaccggcaacuaccagugcgggcacuacaagcacaucaccagcaaggagacccucuacugcaucgacggcgcccugcugacgaagagcuccgaguacaaggggcccaucaccgacguguucuacaaggagaacagcuacaccaccacgaucaagcccgugaccuacaagcucgacggcgucgugugcaccgagaucgaccccaagcuggacaacuacuacaagaaggacaacuccuacuucaccgagcagccgaucgaccuggugcccaaccagcccuaccccaacgccagcuucgacaacuucaaguucgucugcgacaacaucaaguucgccgacgaccucaaccagcugacgggguacaagaagccggcgucccgggagcugaaggugaccuucuuccccgaccucaacggcgacguggucgccaucgacuacaagcacuacacccccagcuucaagaagggcgccaagcugcugcacaagcccaucguguggcacgugaacaacgccaccaacaaggcgacguacaagccgaacaccuggugcauccgcugccucugguccaccaagcccgucgagaccagcaacuccuucgacgugcugaagagcgaggacgcccaggggauggacaaccuggccugcgaggaccucaagcccguguccgaggaggucguggagaaccccacgauccagaaggacgugcuggagugcaacgucaagaccaccgagguggugggcgacaucauccugaagccggccaacaacagccucaagaucaccgaggaggucgggcacacggaccugauggccgcguacguggacaacuccagccugaccaucaagaagcccaacgagcucucccgggugcugggccugaagacccucgccacccacgggcuggccgccgucaacagcgugcccugggacacgaucgccaacuacgcgaagccguuccugaacaagguggucuccaccaccaccaacaucgugacgcgcugccucaaccgcgugugcaccaacuacaugcccuacuucuucacccugcugcuccagcugugcaccuucacccggagcacgaacucccgcaucaaggccagcaugcccaccaccaucgccaagaacaccgucaagagcgugggcaaguucugccuggaggccuccuucaacuaccucaagagccccaacuucuccaagcugaucaacaucaucaucugguuccugcuccugagcgugugccugggcucccucaucuacagcacggccgcgcuggggguccugauguccaaccucggcaugccgagcuacugcaccggguaccgggagggcuaccugaacuccaccaacgugaccaucgccacguacugcaccggcagcauccccugcuccgugugccugagcgggcucgacucccuggacaccuaccccagccuggagaccauccagaucacgaucuccagcuucaagugggaccucaccgccuucggccuggucgccgagugguuccuggccuacauccucuucacccgcuucuucuacgugcuggggcuggcggccaucaugcagcucuucuucuccuacuucgccgugcacuucaucagcaacuccuggcugauguggcugaucaucaaccugguccagauggcccccaucagcgcgauggugcggauguacaucuucuucgccagcuucuacuacguguggaaguccuacguccacgugguggacggcugcaacagcuccaccugcaugaugugcuacaagcgcaaccgggccacgcgcgucgagugcaccaccaucgugaacgggguccggcgcagcuucuacguguacgccaacggcggcaagggguucugcaagcuccacaacuggaacugcgugaacugcgacaccuucugcgccggcuccacguucaucagcgacgaggucgcgcgggaccugucccugcaguucaagcgcccgaucaaccccaccgaccagagcuccuacaucguggacagcgugaccgucaagaacggguccauccaccucuacuucgacaaggccggccagaagaccuacgagcggcacagccugucccacuucgugaaccuggacaaccuccgcgccaacaacacgaaggggagccugcccaucaacgugaucgucuucgacggcaaguccaagugcgaggagagcuccgccaagagcgccuccguguacuacagccagcugaugugccagcccauccuccugcuggaccaggcgcucgugagcgacgucggcgacuccgccgagguggccgugaagauguucgacgccuacgucaacaccuucagcuccaccuucaacgugccgauggagaagcugaagacccugguggccacggcggaggccgagcucgccaagaacgucagccuggacaacgugcuguccaccuucaucagcgccgcgcggcagggguucguggacuccgacgucgagaccaaggacgugguggagugccucaagcugagccaccaguccgacaucgaggucaccggcgacagcugcaacaacuacaugcugacguacaacaagguggagaacaugaccccccgcgaccucggggccugcaucgacugcuccgcccggcacaucaacgcccagguggccaagagccacaacaucgcgcugaucuggaacgucaaggacuucaugucccugagcgagcagcuccgcaagcagauccgguccgccgccaagaagaacaaccugcccuucaagcugaccugcgccaccacgcgccagguggugaacgucgugaccaccaagaucgcccucaagggcgggugaggacuaguuauaagacugacuagcccgaugggccucccaacgggcccuccuccccuccuugcaccgagauuaauaaaaaaaaaaaaaaaaaaaaaaaaaaaaaaaaaaaaaaaaaaaaaaaaaaaaaaaaaaaaaaaaugcaucccccccccccccccccccccccccccccccaaaggcucuuuucagagccaccagaauu

SEQ ID NO: 21431 - RNA, 6058 nt, Artificial Sequence
  SARS-CoV-2__MT893018.1__non-structural protein 3 (NSP3) mRNA gc
aggagaaagcuuaccauggcccccaccaaggugaccuucggcgacgacacggucaucgaggugcagggguacaagagcgugaacaucaccuucgagcuggacgagcgcaucgacaagguccucaacgagaagugcuccgccuacaccguggagcugggcaccgaggugaacgaguucgcgugcgucguggccgacgccgugaucaagacgcugcagccggucagcgagcuccugaccccccuggggaucgaccucgacgagugguccauggccaccuacuaccuguucgacgagagcggcgaguucaagcuggccucccacauguacugcagcuucuacccccccgacgaggacgaggaggagggggacugcgaggaggaggaguucgagccguccacccaguacgaguacggcacggaggacgacuaccagggcaagccccucgaguucggggcgaccagcgccgcccugcagcccgaggaggagcaggaggaggacuggcuggacgacgacucccagcagaccgugggccagcaggacgggagcgaggacaaccagaccacgaccauccagaccaucguggagguccagccccagcucgagauggagcugaccccgguggugcagacgaucgaggucaacuccuucagcggcuaccugaagcucaccgacaacguguacaucaagaacgccgacaucguggaggaggcgaagaaggucaagcccaccgugguggucaacgccgccaacguguaccugaagcacgggggcggcguggccggggcccugaacaaggcgaccaacaacgccaugcaggucgaguccgacgacuacaucgccacgaacggcccccucaagguggggggcagcugcguccuguccggccacaaccuggccaagcacugccuccacgugguggggcccaacgucaacaagggcgaggacauccagcugcugaagagcgccuacgagaacuucaaccagcacgaggugcuccuggcgccgcugcucuccgccgggaucuucggcgccgaccccauccacagccugcgggugugcgucgacaccgugcgcaccaacguguaccuggccgucuucgacaagaaccucuacgacaagcugguguccagcuuccuggagaugaagagcgagaagcagguggagcagaagaucgccgagauccccaaggaggaggucaagcccuucaucaccgaguccaagccgagcguggagcagcggaagcaggacgacaagaagaucaaggcgugcguggaggaggucacgaccacccucgaggagaccaaguuccugacggagaaccugcuccuguacaucgacaucaacgggaaccugcaccccgacuccgccacccucgugagcgacaucgacaucaccuuccugaagaaggacgcccccuacaucgugggcgacgucgugcaggagggcgugcugaccgccgucgugauccccacgaagaaggccgggggcaccaccgagaugcucgcgaaggcccugcgcaaggugccgaccgacaacuacaucacgaccuaccccgggcagggccugaacggguacaccgucgaggaggccaagaccgugcucaagaagugcaaguccgccuucuacauccugcccagcaucaucuccaacgagaagcaggagauccugggcaccgugagcuggaaccuccgggagaugcuggcgcacgccgaggagacgcgcaagcugaugcccgucugcguggagaccaaggccaucguguccaccauccagcggaaguacaagggcaucaagauccaggagggggucguggacuacggcgcccgcuucuacuucuacaccagcaagacgaccguggccucccugaucaacacccucaacgaccugaacgagacccuggucacgaugccgcucggguacgugacccacggccugaaccuggaggaggcggcccgguacaugcgcagccucaaggugcccgccaccgucuccgugagcucccccgacgccgugaccgccuacaacggguaccugacgagcuccagcaagacccccgaggagcacuucaucgagaccaucucccuggcgggcagcuacaaggacuggagcuacuccggccagagcacccagcucgggaucgaguuccugaagcggggcgacaaguccgucuacuacacgagcaacccgaccaccuuccaccuggacggggaggugaucaccuucgacaaccucaagacgcugcugucccuccgcgaggugcggaccaucaaggucuucaccaccguggacaacaucaaccugcacacgcagguggucgacaugagcaugaccuacggccagcaguucggccccaccuaccuggacggggccgacgugaccaagaucaagccccacaacucccacgagggcaagacguucuacgugcucccgaacgacgacauccugcgcgucgaggccuucgaguacuaccacaccaccgaccccagcuuccuggggcgguacauguccgcccucaaccacaccaagaaguggaaguacccccaggugaacggccugacgagcaucaagugggccgacaacaacugcuaccuggcgaccgcccuccugacccugcagcagaucgagcucaaguucaaccccccggcccugcaggacgccuacuaccgcgcgcgggccggggaggccgccaacuucugcgcccugauccucgcguacugcaacaagaccgugggcgagcugggcgacguccgcgagacgauguccuaccuguuccagcacgccaaccucgacagcugcaagcgggugcugaacgucgugugcaagaccugcgggcagcagcagaccacccugaagggcguggaggccgucauguacauggggacccucuccuacgagcaguucaagaagggcgugcagauccccugcacgugcgggaagcaggccaccaaguaccuggugcagcaggagagccccuucgucaugauguccgcccccccggcgcaguacgagcugaagcacggcaccuucaccugcgccagcgaguacacgggcaacuaccagugcgggcacuacaagcacaucaccuccaaggagacccucuacugcaucgacggcgcccugcugaccaagagcagcgaguacaaggggcccaucacggacguguucuacaaggagaacuccuacaccaccaccaucaagcccgugacguacaagcucgacggcgucgugugcaccgagaucgaccccaagcuggacaacuacuacaagaaggacaacagcuacuucaccgagcagccgaucgaccuggugcccaaccagcccuaccccaacgccuccuucgacaacuucaaguucgucugcgacaacaucaaguucgccgacgaccucaaccagcugaccggguacaagaagccggcgagccgcgagcugaaggugacguucuuccccgaccucaacggcgacguggucgccaucgacuacaagcacuacacccccuccuucaagaagggcgccaagcugcugcacaagcccaucguguggcacgugaacaacgccaccaacaaggcgaccuacaagccgaacacguggugcauccggugccucuggagcaccaagcccgucgagaccuccaacagcuucgacgugcugaaguccgaggacgcccaggggauggacaaccuggccugcgaggaccucaagcccgugagcgaggaggucguggagaaccccaccauccagaaggacgugcuggagugcaacgucaagacgaccgagguggugggcgacaucauccugaagccggccaacaacucccucaagaucaccgaggaggucgggcacaccgaccugauggccgcguacguggacaacagcucccugacgaucaagaagcccaacgagcucagccgcgugcugggccugaagacccucgccacccacgggcuggccgccgucaacuccgugcccugggacaccaucgccaacuacgcgaagccguuccugaacaagguggucagcacgaccaccaacaucgugacccgcugccucaaccgggugugcacgaacuacaugcccuacuucuucacccugcugcuccagcugugcaccuucacccgcuccaccaacagccggaucaaggccuccaugcccacgaccaucgccaagaacaccgucaagagcgugggcaaguucugccuggaggccagcuucaacuaccucaagucccccaacuucagcaagcugaucaacaucaucaucugguuccugcuccuguccgugugccugggcagccucaucuacuccaccgccgcgcuggggguccugaugagcaaccucggcaugccguccuacugcacgggguaccgcgagggcuaccugaacagcaccaacgugaccaucgccaccuacugcacgggcuccauccccugcagcgugugccuguccgggcucgacagccuggacaccuaccccucccuggagaccauccagaucaccaucagcuccuucaagugggaccucacggccuucggccuggucgccgagugguuccuggccuacauccucuucacccgguucuucuacgugcuggggcuggcggccaucaugcagcucuucuucagcuacuucgccgugcacuucaucuccaacagcuggcugauguggcugaucaucaaccugguccagauggcccccaucuccgcgauggugcgcauguacaucuucuucgccagcuucuacuacguguggaagagcuacguccacgugguggacggcugcaacuccagcaccugcaugaugugcuacaagcggaaccgcgccacccgggucgagugcacgaccaucgugaacgggguccgccgguccuucuacguguacgccaacggcggcaagggguucugcaagcuccacaacuggaacugcgugaacugcgacaccuucugcgccggcagcaccuucaucuccgacgaggucgcgcgcgaccugagccugcaguucaagcggccgaucaaccccacggaccaguccagcuacaucguggacuccgugaccgucaagaacgggagcauccaccucuacuucgacaaggccggccagaagaccuacgagcgccacucccugagccacuucgugaaccuggacaaccuccgggccaacaacaccaaggggucccugcccaucaacgugaucgucuucgacggcaagagcaagugcgaggaguccagcgccaaguccgccagcguguacuacucccagcugaugugccagcccauccuccugcuggaccaggcgcucgugagcgacgucggcgacagcgccgagguggccgugaagauguucgacgccuacgucaacacguucuccagcaccuucaacgugccgauggagaagcugaagacccugguggccaccgcggaggccgagcucgccaagaacgucucccuggacaacgugcugagcacguucaucuccgccgcgcgccagggguucguggacagcgacgucgagaccaaggacgugguggagugccucaagcugucccaccagagcgacaucgaggucaccggcgacuccugcaacaacuacaugcugaccuacaacaagguggagaacaugacgccccgggaccucggggccugcaucgacugcagcgcccgccacaucaacgcccagguggccaagucccacaacaucgcgcugaucuggaacgucaaggacuucaugagccuguccgagcagcuccggaagcagauccgcagcgccgccaagaagaacaaccugcccuucaagcugaccugcgccaccacccgccagguggugaacgucgugacgaccaagaucgcccucaagggcgggugaggacuaguuauaagacugacuagcccgaugggccucccaacgggcccuccuccccuccuugcaccgagauuaauaaaaaaaaaaaaaaaaaaaaaaaaaaaaaaaaaaaaaaaaaaaaaaaaaaaaaaaaaaaaaaaaugcaucccccccccccccccccccccccccccccccaaaggcucuuuucagagccaccagaauu

SEQ ID NO: 21432 - RNA, 6058 nt, Artificial Sequence
  SARS-CoV-2__MT889692.1__non-structural protein 3 (NSP3) mRNA gc
aggagaaagcuuaccauggcccccaccaaggugaccuucggcgacgacacggucaucgaggugcagggguacaagagcgugaacaucaccuucgagcuggacgagcgcaucgacaagguccucaacgagaagugcuccgccuacaccguggagcugggcaccgaggugaacgaguucgcgugcgucguggccgacgccgugaucaagacgcugcagccggucagcgagcuccugaccccccuggggaucgaccucgacgagugguccauggccaccuacuaccuguucgacgagagcggcgaguucaagcuggccucccacauguacugcagcuucuacccccccgacgaggacgaggaggagggggacugcgaggaggaggaguucgagccguccacccaguacgaguacggcacggaggacgacuaccagggcaagccccucgaguucggggcgaccagcgccgcccugcagcccgaggaggagcaggaggaggacuggcuggacgacgacucccagcagaccgugggccagcaggacgggagcgaggacaaccagaccacgaccauccagaccaucguggagguccagccccagcucgagauggagcugaccccgguggugcagacgaucgaggucaacuccuucagcggcuaccugaagcucaccgacaacguguacaucaagaacgccgacaucguggcggaggccaccaaggucaagcccaccgugguggucaacgccgccaacguguaccugaagcacgggggcggcguggccggggcgcugaacaaggccacgaacaacgccaugcaggucgaguccgacgacuacaucgccaccaacggcccccucaagguggggggcagcugcguccuguccggccacaaccuggccaagcaccggcuccacgugguggggcccaacgucaacaagggcgaggacauccagcugcugaagagcgcguacgagaacuucaaccagcacgaggugcuccuggccccgcugcucuccgccgggaucuucggcgccgaccccauccacagccugcgcgugugcgucgacaccgugcggaccaacguguaccuggccgucuucgacaagaaccucuacgacaagcugguguccagcuuccuggagaugaagagcgagaagcagguggagcagaagaucgcggagauccccaaggaggaggucaagcccuucaucacggaguccaagccgagcguggagcagcgcaagcaggacgacaagaagaucaaggccugcguggaggaggucaccaccacccucgaggagacgaaguuccugaccgagaaccugcuccuguacaucgacaucaacgggaaccugcaccccgacuccgccacccucgugagcgacaucgacaucaccuuccugaagaaggacgcccccuacaucgugggcgacgucgugcaggagggcgugcugacggccgucgugauccccaccaagaaggcggggggcaccaccgagaugcucgccaaggcccugcggaaggugccgacggacaacuacaucaccaccuaccccgggcagggccugaacggguacaccgucgaggaggccaagaccgugcucaagaagugcaaguccgcguucuacauccugcccagcaucaucuccaacgagaagcaggagauccugggcacggugagcuggaaccuccgcgagaugcuggcccacgccgaggagacccggaagcugaugcccgucugcguggagaccaaggccaucguguccaccauccagcgcaaguacaagggcaucaagauccaggagggggucguggacuacggcgcccgguucuacuucuacacgagcaagaccaccguggcgucccugaucaacacccucaacgaccugaacgagacgcuggucaccaugccgcucggguacgugacccacggccugaaccuggaggaggccgcccgcuacaugcggagccucaaggugcccgccaccgucuccgugagcucccccgacgccgugacggcguacaacggguaccugaccagcuccagcaagacccccgaggagcacuucaucgagaccaucucccuggccggcagcuacaaggacuggagcuacuccggccagagcacgcagcucgggaucgaguuccugaagcgcggcgacaaguccgucuacuacaccagcaacccgaccaccuuccaccuggacggggaggugaucacguucgacaaccucaagacccugcugucccuccgggaggugcgcaccaucaaggucuucaccacgguggacaacaucaaccugcacacccagguggucgacaugagcaugaccuacggccagcaguucggccccaccuaccuggacggggccgacgugacgaagaucaagccccacaacucccacgagggcaagaccuucuacgugcucccgaacgacgacacccugcgggucgaggccuucgaguacuaccacaccacggaccccagcuuccuggggcgcuacauguccgcccucaaccacaccaagaaguggaaguacccccaggugaacggccugaccagcaucaagugggcggacaacaacugcuaccuggccaccgcccuccugacgcugcagcagaucgagcucaaguucaaccccccggcccugcaggacgcguacuaccgggcccgcgccggggaggccgccaacuucugcgcgcugauccucgccuacugcaacaagaccgugggcgagcugggcgacguccgggagaccauguccuaccuguuccagcacgccaaccucgacagcugcaagcgcgugcugaacgucgugugcaagaccugcgggcagcagcagaccacgcugaagggcguggaggccgucauguacauggggacccucuccuacgagcaguucaagaagggcgugcagauccccugcaccugcgggaagcaggccaccaaguaccuggugcagcaggagagccccuucgucaugauguccgcgcccccggcccaguacgagcugaagcacggcacguucaccugcgccagcgaguacaccggcaacuaccagugcgggcacuacaagcacaucaccuccaaggagacgcucuacugcaucgacggcgcccugcugaccaagagcagcgaguacaaggggcccaucaccgacguguucuacaaggagaacuccuacaccacgaccaucaagcccgugaccuacaagcucgacggcgucgugugcaccgagaucgaccccaagcuggacaacuacuacaagaaggacaacagcuacuucacggagcagccgaucgaccuggugcccaaccagcccuaccccaacgccuccuucgacaacuucaaguucgucugcgacaacaucaaguucgcggacgaccucaaccagcugaccggguacaagaagccggccagccgggagcugaaggugaccuucuuccccgaccucaacggcgacguggucgccaucgacuacaagcacuacacccccuccuucaagaagggcgccaagcugcugcacaagcccaucguguggcacgugaacaacgcgacgaacaaggccaccuacaagccgaacaccuggugcauccgcugccucuggagcaccaagcccgucgagacguccaacagcuucgacgugcugaaguccgaggacgcccaggggauggacaaccuggccugcgaggaccucaagcccgugagcgaggaggucguggagaaccccaccauccagaaggacgugcuggagugcaacgucaagaccaccgagguggugggcgacaucauccugaagccggccaacaacucccucaagaucacggaggaggucgggcacaccgaccugauggcggccuacguggacaacagcucccugaccaucaagaagcccaacgagcucagccgcgugcugggccugaagacccucgccacgcacgggcuggccgccgucaacuccgugcccugggacaccaucgcgaacuacgccaagccguuccugaacaagguggucagcaccaccacgaacaucgugacccucugccugaaccgggugugcaccaacuacaugcccuacuucuucacccugcuccugcagcugugcaccuucacgcgcuccaccaacagccggaucaaggccuccaugcccaccaccaucgccaagaacacggucaagagcgugggcaaguucugccucgaggccagcuucaacuaccugaagucccccaacuucagcaagcugaucaacaucaucaucugguuccuccugcuguccgugugccucggcagccugaucuacuccaccgcggcccuggggguccucaugagcaaccugggcaugccguccuacugcaccggguaccgcgagggcuaccugaacagcaccaacgugacgaucgccaccuacugcaccggcuccauccccugcagcgugugccucuccgggcuggacagccuggacaccuaccccucccucgagacgauccagaucaccaucagcuccuucaagugggaccugaccgccuucggccuggucgccgagugguuccucgcguacauccuguucacccgguucuucuacgugcuggggcucgccgccaucaugcagcuguucuucagcuacuucgccgugcacuucaucuccaacagcuggcugauguggcugaucaucaaccucguccagauggcgcccaucuccgccauggugcgcauguacaucuucuucgccagcuucuacuacguguggaagagcuacguccacgugguggacggcugcaacuccagcacgugcaugaugugcuacaagcggaaccgcgccacccgggucgagugcaccaccaucgugaacgggguccgccgguccuucuacguguacgccaacggcggcaagggguucugcaagcugcacaacuggaacugcgugaacugcgacacguucugcgcgggcagcaccuucaucuccgacgaggucgcccgcgaccugagccuccaguucaagcggccgaucaaccccaccgaccaguccagcuacaucguggacuccgugaccgucaagaacgggagcauccaccuguacuucgacaaggccggccagaagacguacgagcgccacucccugagccacuucgugaaccucgacaaccugcgggccaacaacaccaaggggucccugcccaucaacgugaucgucuucgacggcaagagcaagugcgaggaguccagcgccaaguccgcgagcguguacuacucccagcucaugugccagcccauccugcugcucgaccaggcccuggugagcgacgucggcgacagcgccgagguggccgugaagauguucgacgccuacgucuccaccuucagcuccaccuucaacgugccgauggagaagcugaagacgcucguggcgaccgccgaggccgagcuggccaagaacgucagccuggacaacgugcucuccaccuucaucagcgcggcccgccagggguucguggacuccgacgucgagaccaaggacgugguggagugccugaagcugagccaccaguccgacaucgaggucacgggcgacagcugcaacaacuacaugcucaccuacaacaagguggagaacaugaccccccgggaccugggggccugcaucgacugcuccgcccgccacaucaacgcccagguggcgaagagccacaacaucgcccugaucuggaacgucaaggacuucaugucccucagcgagcagcugcggaagcagauccgcuccgccgccaagaagaacaaccugcccuucaagcucaccugcgccacgacccgccagguggugaacgucgugaccaccaagaucgcgcugaagggcgggugaggacuaguuauaagacugacuagcccgaugggccucccaacgggcccuccuccccuccuugcaccgagauuaauaaaaaaaaaaaaaaaaaaaaaaaaaaaaaaaaaaaaaaaaaaaaaaaaaaaaaaaaaaaaaaaaugcaucccccccccccccccccccccccccccccccaaaggcucuuuucagagccaccagaauu

SEQ ID NO: 21433 - RNA, 6058 nt, Artificial Sequence
  SARS-CoV-2__MT883499.1__non-structural protein 3 (NSP3) mRNA gc
aggagaaagcuuaccauggcccccaccaaggugaccuucggcgacgacacggucaucgaggugcagggguacaagagcgugaacaucaccuucgagcuggacgagcgcaucgacaagguccucaacgagaagugcuccgccuacaccguggagcugggcaccgaggugaacgaguucgcgugcgucguggccgacgccgugaucaagacgcugcagccggucagcgagcuccugaccccccuggggaucgaccucgacgagugguccauggccaccuacuaccuguucgacgagagcggcgaguucaagcuggccucccacauguacugcagcuucuacccccccgacgaggacgaggaggagggggacugcgaggaggaggaguucgagccguccacccaguacgaguacggcacggaggacgacuaccagggcaagccccucgaguucggggcgaccagcgccgcccugcagcccgaggaggagcaggaggaggacuggcuggacgacgacucccagcagaccgugggccagcaggacgggagcgaggacaaccagaccacgaccauccagaccaucguggagguccagccccagcucgagauggagcugaccccgguggugcagacgaucgaggucaacuccuucagcggcuaccugaagcucaccgacaacguguacaucaagaacgccgacaucguggaggaggcgaagaaggucaagcccaccgugguggucaacgccgccaacguguaccugaagcacgggggcggcguggccggggcccugaacaaggcgaccaacaacgccaugcaggucgaguccgacgacuacaucgccacgaacggcccccucaagguggggggcagcugcguccuguccggccacaaccuggccaagcacugccuccacgugguggggcccaacgucaacaagggcgaggacauccagcugcugaagagcgccuacgagaacuucaaccagcacgaggugcuccuggcgccgcugcucuccgccgggaucuucggcgccgaccccauccacagccugcgggugugcgucgacaccgugcgcaccaacguguaccuggccgucuucgacaagaaccucuacgacaagcugguguccagcuuccuggagaugaagagcgagaagcagguggagcagaagaucgccgagauccccaaggaggaggucaagcccuucaucaccgaguccaagccgagcguggagcagcggaagcaggacgacaagaagaucaaggcgugcguggaggaggucacgaccacccucgaggagaucaaguuccugaccgagaaccugcuccuguacaucgacaucaacgggaaccugcaccccgacuccgccacgcucgugagcgacaucgacaucaccuuccugaagaaggacgcccccuacaucgugggcgacgucgugcaggagggcgugcugaccgccgucgugauccccaccaagaaggccgggggcacgaccgagaugcucgcgaaggcccugcgcaaggugccgaccgacaacuacaucaccacguaccccgggcagggccugaacggguacaccgucgaggaggccaagaccgugcucaagaagugcaaguccgccuucuacauccugcccagcaucaucuccaacgagaagcaggagauccugggcaccgugagcuggaaccuccgggagaugcuggcgcacgccgaggagacccgcaagcugaugcccgucugcguggagacgaaggccaucguguccaccauccagcggaaguacaagggcaucaagauccaggagggggucguggacuacggcgcccgcuucuacuucuacaccagcaagaccacgguggccucccugaucaacacccucaacgaccugaacgagacccuggucaccaugccgcucggguacgugacgcacggccugaaccuggaggaggcggcccgguacaugcgcagccucaaggugcccgccaccgucuccgugagcucccccgacgccgugaccgccuacaacggguaccugaccagcuccagcaagacgcccgaggagcacuucaucgagaccaucucccuggcgggcagcuacaaggacuggagcuacuccggccagagcacccagcucgggaucgaguuccugaagcggggcgacaaguccgucuacuacaccagcaacccgacgaccuuccaccuggacggggaggugaucaccuucgacaaccucaagacccugcugucccuccgcgaggugcggacgaucaaggucuucaccaccguggacaacaucaaccugcacacccagguggucgacaugagcaugacguacggccagcaguucggccccaccuaccuggacggggccgacgugaccaagaucaagccccacaacucccacgagggcaagaccuucuacgugcucccgaacgacgacacgcugcgcgucgaggccuucgaguacuaccacaccaccgaccccagcuuccuggggcgguacauguccgcccucaaccacaccaagaaguggaaguacccccaggugaacggccugacgagcaucaagugggccgacaacaacugcuaccuggcgaccgcccuccugacccugcagcagaucgagcucaaguucaaccccccggcccugcaggacgccuacuaccgcgcgcgggccggggaggccgccaacuucugcgcccugauccucgcguacugcaacaagaccgugggcgagcugggcgacguccgcgagacgauguccuaccuguuccagcacgccaaccucgacagcugcaagcgggugcugaacgucgugugcaagaccugcgggcagcagcagaccacccugaagggcguggaggccgucauguacauggggacccucuccuacgagcaguucaagaagggcgugcagauccccugcacgugcgggaagcaggccaccaaguaccuggugcagcaggagagccccuucgucaugauguccgcccccccggcgcaguacgagcugaagcacggcaccuucaccugcgccagcgaguacacgggcaacuaccagugcgggcacuacaagcacaucaccuccaaggagacccucuacugcaucgacggcgcccugcugaccaagagcagcgaguacaaggggcccaucacggacguguucuacaaggagaacuccuacaccaccaccaucaagcccgugacguacaagcucgacggcgucgugugcaccgagaucgaccccaagcuggacaacuacuacaagaaggacaacagcuacuucaccgagcagccgaucgaccuggugcccaaccagcccuaccccaacgccuccuucgacaacuucaaguucgucugcgacaacaucaaguucgccgacgaccucaaccagcugaccggguacaagaagccggcgagccgcgagcugaaggugacguucuuccccgaccucaacggcgacguggucgccaucgacuacaagcacuacacccccuccuucaagaagggcgccaagcugcugcacaagcccaucguguggcacgugaacaacgccaccaacaaggcgaccuacaagccgaacacguggugcauccggugccucuggagcaccaagcccgucgagaccuccaacagcuucgacgugcugaaguccgaggacgcccaggggauggacaaccuggccugcgaggaccucaagcccgugagcgaggaggucguggagaaccccaccauccagaaggacgugcuggagugcaacgucaagacgaccgagguggugggcgacaucauccugaagccggccaacaacucccucaagaucaccgaggaggucgggcacaccgaccugauggccgcguacguggacaacagcucccugacgaucaagaagcccaacgagcucagccgcgugcugggccugaagacccucgccacccacgggcuggccgccgucaacuccgugcccugggacaccaucgccaacuacgcgaagccguuccugaacaagguggucagcacgaccaccaacaucgugacccgcugccucaaccgggugugcacgaacuacaugcccuacuucuucacccugcugcuccagcugugcaccuucacccgcuccaccaacagccggaucaaggccuccaugcccacgaccaucgccaagaacaccgucaagagcgugggcaaguucugccuggaggccagcuucaacuaccucaagucccccaacuucagcaagcugaucaacaucaucaucugguuccugcuccuguccgugugccugggcagccucaucuacuccaccgccgcgcuggggguccugaugagcaaccucggcaugccguccuacugcacgggguaccgcgagggcuaccugaacagcaccaacgugaccaucgccaccuacugcacgggcuccauccccugcagcgugugccuguccgggcucgacagccuggacaccuaccccucccuggagaccauccagaucaccaucagcuccuucaagugggaccucacggccuucggccuggucgccgagugguuccuggccuacauccucuucacccgguucuucuacgugcuggggcuggcggccaucaugcagcucuucuucagcuacuucgccgugcacuucaucuccaacagcuggcugauguggcugaucaucaaccugguccagauggcccccaucuccgcgauggugcgcauguacaucuucuucgccagcuucuacuacguguggaagagcuacguccacgugguggacggcugcaacuccagcaccugcaugaugugcuacaagcggaaccgcgccacccgggucgagugcacgaccaucgugaacgggguccgccgguccuucuacguguacgccaacggcggcaagggguucugcaagcuccacaacuggaacugcgugaacugcgacaccuucugcgccggcagcaccuucaucuccgacgaggucgcgcgcgaccugagccugcaguucaagcggccgaucaaccccacggaccaguccagcuacaucguggacuccgugaccgucaagaacgggagcauccaccucuacuucgacaaggccggccagaagaccuacgagcgccacucccugagccacuucgugaaccuggacaaccuccgggccaacaacaccaaggggucccugcccaucaacgugaucgucuucgacggcaagagcaagugcgaggaguccagcgccaaguccgccagcguguacuacucccagcugaugugccagcccauccuccugcuggaccaggcgcucgugagcgacgucggcgacagcgccgagguggccgugaagauguucgacgccuacgucaacacguucuccagcaccuucaacgugccgauggagaagcugaagacccugguggccaccgcggaggccgagcucgccaagaacgucucccuggacaacgugcugagcacguucaucuccgccgcgcgccagggguucguggacagcgacgucgagaccaaggacgugguggagugccucaagcugucccaccagagcgacaucgaggucaccggcgacuccugcaacaacuacaugcugaccuacaacaagguggagaacaugacgccccgggaccucggggccugcaucgacugcagcgcccgccacaucaacgcccagguggccaagucccacaacaucgcgcugaucuggaacgucaaggacuucaugagccuguccgagcagcuccggaagcagauccgcagcgccgccaagaagaacaaccugcccuucaagcugaccugcgccaccacccgccagguggugaacgucgugacgaccaagaucgcccucaagggcgggugaggacuaguuauaagacugacuagcccgaugggccucccaacgggcccuccuccccuccuugcaccgagauuaauaaaaaaaaaaaaaaaaaaaaaaaaaaaaaaaaaaaaaaaaaaaaaaaaaaaaaaaaaaaaaaaaugcaucccccccccccccccccccccccccccccccaaaggcucuuuucagagccaccagaauu

SEQ ID NO: 21434 - RNA, 6058 nt, Artificial Sequence
  SARS-CoV-2__MT886301.1__non-structural protein 3 (NSP3) mRNA gc
aggagaaagcuuaccauggcccccaccaaggugaccuucggcgacgacacggucaucgaggugcagggguacaagagcgugaacaucaccuucgagcuggacgagcgcaucgacaagguccucaacgagaagugcuccgccuacaccguggagcugggcaccgaggugaacgaguucgcgugcgucgugacggacgccgugaucaagacccugcagccggucagcgagcuccugaccccccuggggaucgaccucgacgagugguccauggccaccuacuaccuguucgacgagagcggcgaguucaagcuggccucccacauguacugcagcuucuacccccccgacgaggacgaggaggagggggacugcgaggaggaggaguucgagccguccacgcaguacgaguacggcaccgaggacgacuaccagggcaagccccucgaguucggggccaccagcgcggcccugcagcccgaggaggagcaggaggaggacuggcuggacgacgacucccagcagaccgugggccagcaggacgggagcgaggacaaccagacgaccaccauccagaccaucguggagguccagccccagcucgagauggagcugacgccgguggugcagaccaucgaggucaacuccuucagcggcuaccugaagcucaccgacaacguguacaucaagaacgccgacaucguggaggaggccaagaaggucaagcccaccgugguggucaacgcggccaacguguaccugaagcacgggggcggcguggccggggcccugaacaaggccacgaacaacgcgaugcaggucgaguccgacgacuacaucgccaccaacggcccccucaagguggggggcagcugcguccuguccggccacaaccuggccaagcacugccuccacgugguggggcccaacgucaacaagggcgaggacauccagcugcugaagagcgccuacgagaacuucaaccagcacgaggugcuccuggccccgcugcucuccgcggggaucuucggcgccgaccccauccacagccugcgggugugcgucgacaccgugcgcaccaacguguaccuggccgucuucgacaagaaccucuacgacaagcugguguccagcuuccuggagaugaagagcgagaagcagguggagcagaagaucgccgagauccccaaggaggaggucaagcccuucaucacggaguccaagccgagcguggagcagcggaagcaggacgacaagaagaucaaggccugcguggaggaggucaccaccacccucgaggagacgaaguuccugaccgagaaccugcuccuguacaucgacaucaacgggaaccugcaccccgacuccgcgacccucgugagcgacaucgacaucaccuuccugaagaaggacgcccccuacaucgugggcgacgucgugcaggagggcgugcugacggccgucgugauccccaccaagaaggccgggggcaccaccgagaugcucgccaaggcgcugcgcaaggugccgacggacaacuacaucaccaccuaccccgggcagggccugaacggguacaccgucgaggaggccaagaccgugcucaagaagugcaaguccgccuucuacauccugcccagcaucaucuccaacgagaagcaggagauccugggcacggugagcuggaaccuccgggagaugcuggcccacgcggaggagacccgcaagcugaugcccgucugcguggagaccaaggccaucguguccaccauccagcggaaguacaagggcaucaagauccaggagggggucguggacuacggcgcccgcuucuacuucuacacgagcaagaccaccguggccucccugaucaacacccucaacgaccugaacgagacgcuggucaccaugccgcucggguacgugacccacggccugaaccuggaggaggccgcgcgguacaugcgcagccucaaggugcccgccaccgucuccgugagcucccccgacgccgugacggccuacaacggguaccugaccagcuccagcaagacccccgaggagcacuucaucgagaccaucucccuggccggcagcuacaaggacuggagcuacuccggccagagcacgcagcucgggaucgaguuccugaagcggggcgacaaguccgucuacuacaccagcaacccgaccaccuuccaccuggacggggaggugaucacguucgacaaccucaagacccugcugucccuccgcgaggugcggaccaucaaggucuucaccacgguggacaacaucaaccugcacacccagguggucgacaugagcaugaccuacggccagcaguucggccccaccuaccuggacggggcggacgugacgaagaucaagccccacaacucccacgagggcaagaccuucuacgugcucccgaacgacgacacccugcgcgucgaggccuucgaguacuaccacaccacggaccccagcuuccuggggcgguacauguccgcccucaaccacaccaagaaguggaaguacccccaggugaacggccugaccagcaucaagugggccgacaacaacugcuaccuggccaccgcgcuccugacgcugcagcagaucgagcucaaguucaaccccccggcccugcaggacgccuacuaccgcgcccgggcgggggaggccgccaacuucugcgcccugauccucgccuacugcaacaagaccgugggcgagcugggcgacguccgcgagaccauguccuaccuguuccagcacgcgaaccucgacagcugcaagcgggugcugaacgucgugugcaagaccugcgggcagcagcagaccacgcugaagggcguggaggccgucauguacauggggacccucuccuacgagcaguucaagaagggcgugcagauccccugcaccugcgggaagcaggccaccaaguaccuggugcagcaggagagccccuucgucaugauguccgcccccccggcccaguacgagcugaagcacggcacguucaccugcgcgagcgaguacaccggcaacuaccagugcgggcacuacaagcacaucaccuccaaggagacgcucuacugcaucgacggcgcccugcugaccaagagcagcgaguacaaggggcccaucaccgacguguucuacaaggagaacuccuacaccacgaccaucaagcccgugaccuacaagcucgacggcgucgugugcaccgagaucgaccccaagcuggacaacuacuacaagaaggacaacagcuacuucacggagcagccgaucgaccuggugcccaaccagcccuaccccaacgccuccuucgacaacuucaaguucgucugcgacaacaucaaguucgccgacgaccucaaccagcugaccggguacaagaagccggccagccgcgagcugaaggugaccuucuuccccgaccucaacggcgacguggucgcgaucgacuacaagcacuacacccccuccuucaagaagggcgccaagcugcugcacaagcccaucguguggcacgugaacaacgccacgaacaaggccaccuacaagccgaacaccuggugcauccggugccucuggagcaccaagcccgucgagacguccaacagcuucgacgugcugaaguccgaggacgcgcaggggauggacaaccuggccugcgaggaccucaagcccgugagcgaggaggucguggagaaccccaccauccagaaggacgugcuggagugcaacgucaagaccaccgagguggugggcgacaucauccugaagccggccaacaacucccucaagaucacggaggaggucgggcacaccgaccugauggccgccuacguggacaacagcucccugaccaucaagaagcccaacgagcucagccgcgugcugggccugaagacccucgcgacgcacgggcuggccgccgucaacuccgugcccugggacaccaucgccaacuacgccaagccguuccugaacaagguggucagcaccaccacgaacaucgugacccgcugccucaaccgggugugcaccaacuacaugcccuacuucuucacccugcugcuccagcugugcaccuucacgcgcuccaccaacagccggaucaaggcguccaugcccaccaccaucgccaagaacacggucaagagcgugggcaaguucugccuggaggccagcuucaacuaccucaagucccccaacuucagcaagcugaucaacaucaucaucugguuccugcuccuguccgugugccugggcagccucaucuacuccaccgccguccugggggugcugaugagcaaccucggcaugccguccuacugcaccggguaccgcgagggcuaccugaacagcaccaacgugacgaucgccaccuacugcaccggcuccauccccugcagcgucugccuguccgggcucgacagccuggacaccuaccccucccuggagacgauccagaucaccaucagcuccuucaagugggaccucaccgcguucggccugguggccgagugguuccuggccuacauccucuucacccgguucuucuacgugcuggggcuggccgccaucaugcagcucuucuucagcuacuucgcgguccacuucaucuccaacagcuggcugauguggcugaucaucaaccuggugcagauggcccccaucuccgccauggugcgcauguacaucuucuucgccagcuucuacuacgucuggaagagcuacgugcacguggucgacggcugcaacuccagcacgugcaugaugugcuacaagcggaaccgcgcgacccggguggagugcaccaccaucgucaacggggugcgccgguccuucuacguguacgccaacggcggcaagggguucugcaagcuccacaacuggaacugcgucaacugcgacacguucugcgccggcagcaccuucaucuccgacgagguggcccgcgaccugagccugcaguucaagcggccgaucaaccccaccgaccaguccagcuacaucguggacuccgucaccgugaagaacgggagcauccaccucuacuucgacaaggccggccagaagacguacgagcgccacucccugagccacuucgugaaccuggacaaccuccgggcgaacaacaccaaggggucccugcccaucaacgucaucguguucgacggcaagagcaagugcgaggaguccagcgccaaguccgccagcguguacuacucccagcugaugugccagcccauccuccugcuggaccaggcccucgucagcgacgugggcgacagcgccgagguggcggucaagauguucgacgccuacgugaacaccuucuccagcaccuucaacgugccgauggagaagcugaagacgcuggucgccaccgccgaggccgagcucgcgaagaacgugucccuggacaacgugcugagcaccuucaucuccgccgcccgccagggguucgucgacagcgacguggagaccaaggacguggucgagugccucaagcugucccaccagagcgacaucgaggugacgggcgacuccugcaacaacuacaugcugaccuacaacaagguggagaacaugaccccccgggaccucggggccugcaucgacugcagcgcgcgccacaucaacgcccaggucgccaagucccacaacaucgcccugaucuggaacgugaaggacuucaugagccuguccgagcagcuccggaagcagauccgcagcgccgcgaagaagaacaaccugcccuucaagcugaccugcgccacgacccgccagguggucaacguggugaccaccaagaucgcccucaagggcgggugaggacuaguuauaagacugacuagcccgaugggccucccaacgggcccuccuccccuccuugcaccgagauuaauaaaaaaaaaaaaaaaaaaaaaaaaaaaaaaaaaaaaaaaaaaaaaaaaaaaaaaaaaaaaaaaaugcaucccccccccccccccccccccccccccccccaaaggcucuuuucagagccaccagaauu

SEQ ID NO: 21435 - RNA, 6058 nt, Artificial Sequence
  SARS-CoV-2__MT886315.1__non-structural protein 3 (NSP3) mRNA gc
aggagaaagcuuaccauggcccccaccaaggugaccuucggcgacgacacggucaucgaggugcagggguacaagagcgugaacaucaccuucgagcuggacgagcgcaucgacaagguccucaacgagaagugcuccgccuacaccguggagcugggcaccgaggugaacgaguucgcgugcgucguggccgacgccgugaucaagacgcugcagccggucagcgagcuccugaccccccuggggaucgaccucgacgagugguccauggccaccuacuaccuguucgacgagagcggcgaguucaagcuggccucccacauguacugcagcuucuacccccccgacgaggacgaggaggagggggacugcgaggaggaggaguucgagccguccacccaguacgaguacggcacggaggacgacuaccagggcaagccccucgaguucggggcgaccagcgccgcccugcagcccgaggaggagcaggaggaggacuggcuggacgacgacucccagcagaccgugggccagcaggacgggagcgaggacaaccagaccacgaccauccagaccaucguggagguccagccccagcucgagauggagcugaccccgguggugcagacgaucgaggucaacuccuucagcggcuaccugaagcucaccgacaacguguacaucaagaacgccgacaucguggaggaggcgaagaaggucaagcccaccgugguggucaacgccgccaacguguaccugaagcacgggggcggcguggccggggcccugaacaaggcgaccaacaacgccaugcaggucgaguccgacgacuacaucgccacgaacggcccccucaagguggggggcagcugcguccuguccggccacaaccuggccaagcacugccuccacgugguggggcccaacgucaacaagggcgaggacauccagcugcugaagagcgccuacgagaacuucaaccagcacgaggugcuccuggcgccgcugcucuccgccgggaucuucggcgccgaccccauccacagccugcgggugugcgucgacaccgugcgcaccaacguguaccuggccgucuucgacaagaaccucuacgacaagcugguguccagcuuccuggagaugaagagcgagaagcagguggagcagaagaucgccgagauccccaaggaggaggucaagcccuucaucaccgaguccaagccgagcguggagcagcggaagcaggacgacaagaagaucaaggcgugcguggaggaggucacgaccacccucgaggagaccaaguuccugacggagaaccugcuccuguacaucgacaucaacgggaaccugcaccccgacuccgccacccucgugagcgacaucgacaucaccuuccugaagaaggacgcccccuacaucgugggcgacgucgugcaggagggcgugcugaccgccgucgugauccccacgaagaaggccgggggcaccaccgagaugcucgcgaaggcccugcgcaaggugccgaccgacaacuacaucacgaccuaccccgggcagggccugaacggguacaccgucgaggaggccaagaccgugcucaagaagugcaaguccgccuucuacauccugcccagcaucaucuccaacgagaagcaggagauccugggcaccgugagcuggaaccuccgggagaugcuggcgcacgccgaggagacgcgcaagcugaugcccgucugcguggagaccaaggccaucguguccaccauccagcggaaguacaagggcaucaagauccaggagggggucguggacuacggcgcccgcuucuacuucuacaccagcaagacgaccguggccucccugaucaacacccucaacgaccugaacgagacccuggucacgaugccgcucggguacgugacccacggccugaaccuggaggaggcggcccgguacaugcgcagccucaaggugcccgccaccgucuccgugagcucccccgacgccgugaccgccuacaacggguaccugacgagcuccagcaagacccuggaggagcacuucaucgagaccaucucccucgcgggcagcuacaaggacuggagcuacuccggccagagcacccagcuggggaucgaguuccugaagcggggcgacaaguccgucuacuacacgagcaaccccaccaccuuccaccucgacggggaggugaucaccuucgacaaccugaagacgcugcucucccugcgcgaggugcggaccaucaaggucuucaccaccguggacaacaucaaccugcacacgcagguggucgacaugagcaugaccuacggccagcaguucggcccgaccuaccucgacggggccgacgugaccaagaucaagccccacaacucccacgagggcaagacguucuacgugcugcccaacgacgacacccugcgcgucgaggccuucgaguacuaccacaccaccgacccgagcuuccucgggcgguacauguccgcccugaaccacacgaagaaguggaaguacccccaggugaacggccugaccagcaucaagugggccgacaacaacugcuaccucgcgaccgcccugcugacccuccagcagaucgagcugaaguucaacccccccgcccugcaggacgccuacuaccgcgcgcgggccggggaggccgccaacuucugcgcccucauccuggcguacugcaacaagacggugggcgagcugggcgacguccgcgagaccauguccuaccucuuccagcacgccaaccuggacagcugcaagcgggugcugaacgucgugugcaagaccugcgggcagcagcagaccacccucaagggcguggaggccgucauguacauggggacgcuguccuacgagcaguucaagaagggcgugcagaucccgugcaccugcgggaagcaggccaccaaguaccuggugcagcaggagagccccuucgucaugauguccgccccccccgcgcaguacgagcucaagcacggcaccuucacgugcgccagcgaguacaccggcaacuaccagugcgggcacuacaagcacaucaccuccaaggagacccuguacugcaucgacggcgcccugcucacgaagagcagcgaguacaaggggccgaucaccgacguguucuacaaggagaacuccuacaccaccacgaucaagcccgugaccuacaagcuggacggcgucgugugcaccgagaucgaccccaagcuggacaacuacuacaagaaggacaacagcuacuucaccgagcagcccaucgaccucgugccgaaccagcccuaccccaacgccuccuucgacaacuucaaguucgucugcgacaacaucaaguucgccgacgaccugaaccagcugacgggguacaagaagcccgcgagccgcgagcucaaggugaccuucuucccggaccugaacggcgacguggucgccaucgacuacaagcacuacacccccuccuucaagaagggcgccaagcugcuccacaagcccaucguguggcacgugaacaacgccaccaacaaggcgacguacaagcccaacaccuggugcauccggugccuguggagcaccaagccggucgagaccuccaacagcuucgacgugcugaaguccgaggacgcccaggggauggacaaccucgccugcgaggaccugaagcccgugagcgaggaggucguggagaaccccacgauccagaaggacgugcuggagugcaacgucaagaccaccgagguggugggcgacaucauccucaagcccgccaacaacucccugaagaucaccgaggaggucgggcacacggaccugauggccgcguacguggacaacagcucccucaccaucaagaagccgaacgagcugagccgcgugcugggccucaagacccuggccacccacgggcuggccgccgucaacuccgugcccugggacacgaucgccaacuacgcgaagcccuuccucaacaagguggucagcaccaccaccaacaucgugacgcgcugccugaaccgggugugcaccaacuacaugccguacuucuucacccugcuccugcagcugugcaccuucacccgcuccacgaacagccggaucaaggccuccaugcccaccaccaucgccaagaacaccgucaagagcgugggcaaguucugccucgaggccagcuucaacuaccugaagucccccaacuucagcaagcugaucaacaucaucaucugguuccuccugcuguccgugugccucggcagccugaucuacuccacggccgcgcuggggguccucaugagcaaccugggcaugcccuccuacugcaccggguaccgcgagggcuaccugaacagcaccaacgugaccaucgccacguacugcaccggcuccaucccgugcagcgugugccucuccgggcuggacagccuggacaccuaccccucccucgagaccauccagaucacgaucagcuccuucaagugggaccugaccgccuucggccuggucgccgagugguuccucgccuacauccuguucacccgguucuucuacgugcuggggcucgcggccaucaugcagcuguucuucagcuacuucgccgugcacuucaucuccaacagcuggcugauguggcugaucaucaaccucguccagauggcccccaucuccgcgauggugcgcauguacaucuucuucgccagcuucuacuacguguggaagagcuacguccacgugguggacggcugcaacuccagcaccugcaugaugugcuacaagcggaaccgcgccacgcgggucgagugcaccaccaucgugaacgggguccgccgguccuucuacguguacgccaacggcggcaagggguucugcaagcugcacaacuggaacugcgugaacugcgacaccuucugcgccggcagcacguucaucuccgacgaggucgcgcgcgaccugagccuccaguucaagcggcccaucaacccgaccgaccaguccagcuacaucguggacuccgugaccgucaagaacgggagcauccaccuguacuucgacaaggccggccagaagaccuacgagcgccacucccugagccacuucgugaaccucgacaaccugcgggccaacaacacgaaggggucccugcccaucaacgugaucgucuucgacggcaagagcaagugcgaggaguccagcgccaaguccgccagcguguacuacucccagcucaugugccagcccauccugcugcucgaccaggcgcuggugagcgacgucggcgacagcgccgagguggccgugaagauguucgacgccuacgucaacaccuucuccagcaccuucaacgugcccauggagaagcugaagacccucguggccacggcggaggccgagcuggccaagaacgucucccuggacaacgugcucagcaccuucaucuccgccgcgcgccagggguucguggacagcgacgucgagaccaaggacgugguggagugccugaagcugucccaccagagcgacaucgaggucaccggcgacuccugcaacaacuacaugcucacguacaacaagguggagaacaugaccccgcgggaccugggggccugcaucgacugcagcgcccgccacaucaacgcccagguggccaagucccacaacaucgcgcugaucuggaacgucaaggacuucaugagccucuccgagcagcugcggaagcagauccgcagcgccgccaagaagaacaaccugcccuucaagcucaccugcgccaccacgcgccagguggugaacgucgugaccaccaagaucgcccugaagggcgggugaggacuaguuauaagacugacuagcccgaugggccucccaacgggcccuccuccccuccuugcaccgagauuaauaaaaaaaaaaaaaaaaaaaaaaaaaaaaaaaaaaaaaaaaaaaaaaaaaaaaaaaaaaaaaaaaugcaucccccccccccccccccccccccccccccccaaaggcucuuuucagagccaccagaauu

SEQ ID NO: 21436 - RNA, 6058 nt, Artificial Sequence
  SARS-CoV-2__MT886334.1__non-structural protein 3 (NSP3) mRNA gc
aggagaaagcuuaccauggcccccaccaaggugaccuucggcgacgacacggucaucgaggugcagggguacaagagcgugaacaucaccuucgagcuggacgagcgcaucgacaagguccucaacgagaagugcuccgccuacaccguggagcugggcaccgaggugaacgaguucgcgugcgucguggccgacgccgugaucaagacgcugcagccggucagcgagcuccugaccccccuggggaucgaccucgacgagugguccauggccaccuacuaccuguucgacgagagcggcgaguucaagcuggccucccacauguacugcagcuucuacccccccgacgaggacgaggaggagggggacugcgaggaggaggaguucgagccguccacccaguacgaguacggcacggaggacgacuaccagggcaagccccucgaguucggggcgaccagcgccgcccugcagcccgaggaggagcaggaggaggacuggcuggacgacgacucccagcagaccgugggccagcaggacgggagcgaggacaaccagaccacgaccauccagaccaucguggagguccagccccagcucgagauggagcugaccccgguggugcagacgaucgaggucaacuccuucagcggcuaccugaagcucaccgacaacguguacaucaagaacgccgacaucguggaggaggcgaagaaggucaagcccaccgugguggucaacgccgccaacguguaccugaagcacgggggcggcguggccggggcccugaacaaggcgaccaacaacgccaugcaggucgaguccgacgacuacaucgccacgaacggcccccucaagguggggggcagcugcguccuguccggccacaaccuggccaagcacugccuccacgugguggggcccaacgucaacaagggcgaggacauccagcugcugaagagcgccuacgagaacuucaaccagcacgaggugcuccuggcgccgcugcucuccgccgggaucuucggcgccgaccccauccacagccugcgggugugcgucgacaccgugcgcaccaacguguaccuggccgucuucgacaagaaccucuacgacaagcugguguccagcuuccuggagaugaagagcgagaagcagguggagcagaagaucgccgagauccccaaggaggaggucaagcccuucaucaccgaguccaagccgagcguggagcagcggaagcaggacgacaagaagaucaaggcgugcguggaggaggucacgaccacccucgaggagaccaaguuccugacggagaaccugcuccuguacaucgacaucaacgggaaccugcaccccgacuccgccacccucgugagcgacaucgacaucaccuuccugaagaaggacgcccccuacaucgugggcgacgucgugcaggagggcgugcugaccgccgucgugauccccacgaagaaggccgggggcaccaccgagaugcucgcgaaggcccugcgcaaggugccgaccgacaacuacaucacgaccuaccccgggcagggccugaacggguacaccgucgaggaggccaagaccgugcucaagaagugcaaguccgccuucuacauccugcccagcaucaucuccaacgagaagcaggagauccugggcaccgugagcuggaaccuccgggagaugcuggcgcacgccgaggagacgcgcaagcugaugcccgucugcguggagaccaaggccaucguguccaccauccagcggaaguacaagggcaucaagauccaggagggggucguggacuacggcgcccgcuucuacuucuacaccagcaagacgaccguggccucccugaucaacacccucaacgaccugaacgagacccuggucacgaugccgcucggguacgugacccacggccugaaccuggaggaggcggcccgguacaugcgcagccucaaggugcccgccaccgucuccgugagcucccccgacgccgugaccgccuacaacggguaccugacgagcuccagcaagacccccgaggagcacuucaucgagaccaucucccuggcgggcagcuacaaggacuggagcuacuccggccagagcacccagcucgggaucgaguuccugaagcggggcgacaaguccgucuacuacacgagcaacccgaccaccuuccaccuggacggggaggugaucaccuucgacaaccucaagacgcugcugucccuccgcgaggugcggaccaucaaggucuucaccaccguggacaacaucaaccugcacacgcagguggucgacaugagcaugaccuacggccagcaguucggccccaccuaccuggacggggccgacgugaccaagaucaagccccacaacucccacgagggcaagacguucuacgugcucccgaacgacgacacccugcgcgucgaggccuucgaguacuaccacaccaccgaccccagcuuccuggggcgguacauguccgcccucaaccacacgaagaaguggaaguacccccaggugaacggccugaccagcaucaagugggccgacaacaacugcuaccuggcgaccgcccuccugacccugcagcagaucgagcucaaguucaaccccccggcccugcaggacgccuacuaccgcgcgcgggccggggaggccgccaacuucugcgcccugauccucgcguacugcaacaagacggugggcgagcugggcgacguccgcgagaccauguccuaccuguuccagcacgccaaccucgacagcugcaagcgggugcugaacgucgugugcaagaccugcgggcagcagcagaccacccugaagggcguggaggccgucauguacauggggacgcucuccuacgagcaguucaagaagggcgugcagauccccugcaccugcgggaagcaggccaccaaguaccuggugcagcaggagagccccuucgucaugauguccgcccccccggcgcaguacgagcugaagcacggcaccuucacgugcgccagcgaguacaccggcaacuaccagugcgggcacuacaagcacaucaccuccaaggagacccucuacugcaucgacggcgcccugcugacgaagagcagcgaguacaaggggcccaucaccgacguguucuacaaggagaacuccuacaccaccacgaucaagcccgugaccuacaagcucgacggcgucgugugcaccgagaucgaccccaagcuggacaacuacuacaagaaggacaacagcuacuucaccgagcagccgaucgaccuggugcccaaccagcccuaccccaacgccuccuucgacaacuucaaguucgucugcgacaacaucaaguucgccgacgaccucaaccagcugacgggguacaagaagccggcgagccgcgagcugaaggugaccuucuuccccgaccucaacggcgacguggucgccaucgacuacaagcacuacacccccuccuucaagaagggcgccaagcugcugcacaagcccaucguguggcacgugaacaacgccaccaacaaggcgacguacaagccgaacaccuggugcauccggugccucuggagcaccaagcccgucgagaccuccaacagcuucgacgugcugaaguccgaggacgcccaggggauggacaaccuggccugcgaggaccucaagcccgugagcgaggaggucguggagaaccccacgauccagaaggacgugcuggagugcaacgucaagaccaccgagguggugggcgacaucauccugaagccggccaacaacucccucaagaucaccgaggaggucgggcacacggaccugauggccgcguacguggacaacagcucccugaccaucaagaagcccaacgagcucagccgcgugcugggccugaagacccucgccacccacgggcuggccgccgucaacuccgugcccugggacacgaucgccaacuacgcgaagccguuccugaacaagguggucagcaccaccaccaacaucgugacgcgcugccucaaccgggugugcaccaacuacaugcccuacuucuucacccugcugcuccagcugugcaccuucacccgcuccacgaacagccggaucaaggccuccaugcccaccaccaucgccaagaacaccgucaagagcgugggcaaguucugccuggaggccagcuucaacuaccucaagucccccaacuucagcaagcugaucaacaucaucaucugguuccugcuccuguccgugugccugggcagccucaucuacuccacggccgcgcuggggguccugaugagcaaccucggcaugccguccuacugcaccggguaccgcgagggcuaccugaacagcaccaacgugaccaucgccacguacugcaccggcuccauccccugcagcgugugccuguccgggcucgacagccuggacaccuaccccucccuggagaccauccagaucacgaucagcuccuucaagugggaccucaccgccuucggccuggucgccgagugguuccuggccuacauccucuucacccgguucuucuacgugcuggggcuggcggccaucaugcagcucuucuucagcuacuucgccgugcacuucaucuccaacagcuggcugauguggcugaucaucaaccugguccagauggcccccaucuccgcgauggugcgcauguacaucuucuucgccagcuucuacuacguguggaagagcuacguccacgugguggacggcugcaacuccagcaccugcaugaugugcuacaagcggaaccgcgccacgcgggucgagugcaccaccaucgugaacgggguccgccgguccuucuacguguacgccaacggcggcaagggguucugcaagcuccacaacuggaacugcgugaacugcgacaccuucugcgccggcagcacguucaucuccgacgaggucgcgcgcgaccugagccugcaguucaagcggccgaucaaccccaccgaccaguccagcuacaucguggacuccgugaccgucaagaacgggagcauccaccucuacuucgacaaggccggccagaagaccuacgagcgccacucccugagccacuucgugaaccuggacaaccuccgggccaacaacacgaaggggucccugcccaucaacgugaucgucuucgacggcaagagcaagugcgaggaguccagcgccaaguccgccagcguguacuacucccagcugaugugccagcccauccuccugcuggaccaggcgcucgugagcgacgucggcgacagcgccgagguggccgugaagauguucgacgccuacgucaacaccuucuccagcaccuucaacgugccgauggagaagcugaagacccuguucgccacggcggaggccgagcucgccaagaacgugucccuggacaacguccugagcaccuucaucuccgccgcgcgccagggguucguggacagcgacguggagaccaaggacgucguggagugccucaagcugucccaccagagcgacaucgaggugaccggcgacuccugcaacaacuacaugcugacguacaacaaggucgagaacaugaccccccgggaccucggggccugcaucgacugcagcgcccgccacaucaacgcccagguggccaagucccacaacaucgcgcugaucuggaacgugaaggacuucaugagccuguccgagcagcuccggaagcagauccgcagcgccgccaagaagaacaaccugcccuucaagcugaccugcgccaccacgcgccaggucgugaacguggucaccaccaagaucgcccucaagggcgggugaggacuaguuauaagacugacuagcccgaugggccucccaacgggcccuccuccccuccuugcaccgagauuaauaaaaaaaaaaaaaaaaaaaaaaaaaaaaaaaaaaaaaaaaaaaaaaaaaaaaaaaaaaaaaaaaugcaucccccccccccccccccccccccccccccccaaaggcucuuuucagagccaccagaauu

SEQ ID NO: 21437 - RNA, 6058 nt, Artificial Sequence
  SARS-CoV-2__MT886345.1__non-structural protein 3 (NSP3) mRNA gc
aggagaaagcuuaccauggcccccaccaaggugaccuucggcgacgacacggucaucgaggugcagggguacaagagcgugaacaucaccuucgagcuggacgagcgcaucgacaagguccucaacgagaagugcuccgccuacaccguggagcugggcaccgaggugaacgaguucgcgugcgucguggccgacgccgugaucaagacgcugcagccggucagcgagcuccugaccccccuggggaucgaccucgacgagugguccauggccaccuacuaccuguucgacgagagcggcgaguucaagcuggccucccacauguacugcagcuucuacccccccgacgaggacgaggaggagggggacugcgaggaggaggaguucgagccguccacccaguacgaguacggcacggaggacgacuaccagggcaagccccucgaguucggggcgaccagcgccgcccugcagcccgaggaggagcaggaggaggacuggcuggacgacgacucccagcagaccgugggccagcaggacgggagcgaggacaaccagaccacgaccauccagaccaucguggagguccagccccagcucgagauggagcugaccccgguggugcagacgaucgaggucaacuccuucagcggcuaccugaagcucaccgacaacguguacaucaagaacgccgacaucguggaggaggcgaagaaggucaagcccaccgugguggucaacgccgccaacguguaccugaagcacgggggcggcguggccggggcccugaacaaggcgaccaacaacgccaugcaggucgaguccgacgacuacaucgccacgaacggcccccucaagguggggggcagcugcguccuguccggccacaaccuggccaagcacugccuccacgugguggggcccaacgucaacaagggcgaggacauccagcugcugaagagcgccuacgagaacuucaaccagcacgaggugcuccuggcgccgcugcucuccgccgggaucuucggcgccgaccccauccacagccugcgggugugcgucgacaccgugcgcaccaacguguaccuggccgucuucgacaagaaccucuacgacaagcugguguccagcuuccuggagaugaagagcgagaagcagguggagcagaagaucgccgagauccccaaggaggaggucaagcccuucaucaccgaguccaagccgagcguggagcagcggaagcaggacgacaagaagaucaaggcgugcguggaggaggucacgaccacccucgaggagaccaaguuccugacggagaaccugcuccuguacaucgacaucaacgggaaccugcaccccgacuccgccacccucgugagcgacaucgacaucaccuuccugaagaaggacgcccccuacaucgugggcgacgucgugcaggagggcgugcugaccgccgucgugauccccacgaagaaggccgggggcaccaccgagaugcucgcgaaggcccugcgcaaggugccgaccgacaacuacaucacgaccuaccccgggcagggccugaacggguacaccgucgaggaggccaagaccgugcucaagaagugcaaguccgccuucuacauccugcccagcaucaucuccaacgagaagcaggagauccugggcaccgugagcuggaaccuccgggagaugcuggcgcacgccgaggagacgcgcaagcugaugcccgucugcguggagaccaaggccaucguguccaccauccagcggaaguacaagggcaucaagauccaggagggggucguggacuacggcgcccgcuucuacuucuacaccagcaagacgaccguggccucccugaucaacacccucaacgaccugaacgagacccuggucacgaugccgcucggguacgugacccacggccugaaccuggaggaggcggcccgguacaugcgcagccucaaggugcccgccaccgucuccgugagcucccccgacgccgugaccgccuacaacggguaccugacgagcuccagcaagacccccgaggagcacuucaucgagaccaucucccuggcgggcagcuacaaggacuggagcuacuccggccagagcacccagcucgggaucgaguuccugaagcggggcgacaaguccgucuacuacacgagcaacccgaccaccuuccaccuggacggggaggugaucaccuucgacaaccucaagacgcugcugucccuccgcgaggugcggaccaucaaggucuucaccaccguggacaacaucaaccugcacacgcagguggucgacaugagcaugaccuacggccagcaguucggccccaccuaccuggacggggccgacgugaccaagaucaagccccacaacucccacgagggcaagacguucuacgugcucccgaacgacgacacccugcgcgucgaggccuucgaguacuaccacaccaccgaccccagcuuccuggggcgguacauguccgcccucaaccacacgaagaaguggaaguacccccaggugaacggccugaccagcaucaagugggccgacaacaacugcuaccuggcgaccgcccuccugacccugcagcagaucgagcucaaguucaaccccccggcccugcaggacgccuacuaccgcgcgcgggccggggaggccgccaacuucugcgcccugauccucgcguacugcaacaagacggugggcgagcugggcgacguccgcgagaccauguccuaccuguuccagcacgccaaccucgacagcugcaagcgggugcugaacgucgugugcaagaccugcgggcagcagcagaccacccugaagggcguggaggccgucauguacauggggacgcucuccuacgagcaguucaagaagggcgugcagauccccugcaccugcgggaagcaggccaccaaguaccuggugcagcaggagagccccuucgucaugauguccgcccccccggcgcaguacgagcugaagcacggcaccuucacgugcgccagcgaguacaccggcaacuaccagugcgggcacuacaagcacaucaccuccaaggagacccucuacugcaucgacggcgcccugcugacgaagagcagcgaguacaaggggcccaucaccgacguguucuacaaggagaacuccuacaccaccacgaucaagcccgugaccuacaagcucgacggcgucgugugcaccgagaucgaccccaagcuggacaacuacuacaagaaggacaacagcuacuucaccgagcagccgaucgaccuggugcccaaccagcccuaccccaacgccuccuucgacaacuucaaguucgucugcgacaacaucaaguucgccgacgaccucaaccagcugacgggguacaagaagccggcgagccgcgagcugaaggugaccuucuuccccgaccucaacggcgacguggucgccaucgacuacaagcacuacacccccuccuucaagaagggcgccaagcugcugcacaagcccaucguguggcacgugaacaacgccaccaacaaggcgacguacaagccgaacaccuggugcauccggugccucuggagcaccaagcccgucgagaccuccaacagcuucgacgugcugaaguccgaggacgcccaggggauggacaaccuggccugcgaggaccucaagcccgugagcgaggaggucguggagaaccccacgauccagaaggacgugcuggagugcaacgucaagaccaccgagguggugggcgacaucauccugaagccggccaacaacucccucaagaucaccgaggaggucgggcacacggaccugauggccgcguacguggacaacagcucccugaccaucaagaagcccaacgagcucagccgcgugcugggccugaagacccucgccacccacgggcuggccgccgucaacuccgugcccugggacacgaucgccaacuacgcgaagccguuccugaacaagguggucagcaccaccaccaacaucgugacgcgcugccucaaccgggugugcaccaacuacaugcccuacuucuucacccugcugcuccagcugugcaccuucacccgcuccacgaacagccggaucaaggccuccaugcccaccaccaucgccaagaacaccgucaacagcgugggcaaguucugccuggaggccagcuucaacuaccucaagucccccaacuucagcaagcugaucaacaucaucaucugguuccugcuccuguccgugugccugggcagccucaucuacuccacggccgcgcuggggguccugaugagcaaccucggcaugccguccuacugcaccggguaccgcgagggcuaccugaacagcaccaacgugaccaucgccacguacugcaccggcuccauccccugcagcgugugccuguccgggcucgacagccuggacaccuaccccucccuggagaccauccagaucacgaucagcuccuucaagugggaccucaccgccuucggccuggucgccgagugguuccuggccuacauccucuucacccgguucuucuacgugcuggggcuggcggccaucaugcagcucuucuucagcuacuucgccgugcacuucaucuccaacagcuggcugauguggcugaucaucaaccugguccagauggcccccaucuccgcgauggugcgcauguacaucuucuucgccagcuucuacuacguguggaagagcuacguccacgugguggacggcugcaacuccagcaccugcaugaugugcuacaagcggaaccgcgccacgcgggucgagugcaccaccaucgugaacgggguccgccgguccuucuacguguacgccaacggcggcaagggguucugcaagcuccacaacuggaacugcgugaacugcgacaccuucugcgccggcagcacguucaucuccgacgaggucgcgcgcgaccugagccugcaguucaagcggccgaucaaccccaccgaccaguccagcuacaucguggacuccgugaccgucaagaacgggagcauccaccucuacuucgacaaggccggccagaagaccuacgagcgccacucccugagccacuucgugaaccuggacaaccuccgggccaacaacacgaaggggucccugcccaucaacgugaucgucuucgacggcaagagcaagugcgaggaguccagcgccaaguccgccagcguguacuacucccagcugaugugccagcccauccuccugcuggaccaggcgcucgugagcgacgucggcgacagcgccgagguggccgugaagauguucgacgccuacgucaacaccuucuccagcaccuucaacgugccgauggagaagcugaagacccugguggccacggcggaggccgagcucgccaagaacgucucccuggacaacgugcugagcaccuucaucuccgccgcgcgccagggguucguggacagcgacgucgagaccaaggacgugguggagugccucaagcugucccaccagagcgacaucgaggucaccggcgacuccugcaacaacuacaugcugacguacaacaagguggagaacaugaccccccgggaccucggggccugcaucgacugcagcgcccgccacaucaacgcccagguggccaagucccacaacaucgcgcugaucuggaacgucaaggacuucaugagccuguccgagcagcuccggaagcagauccgcagcgccgccaagaagaacaaccugcccuucaagcugaccugcgccaccacgcgccagguggugaacgucgugaccaccaagaucgcccucaagggcgggugaggacuaguuauaagacugacuagcccgaugggccucccaacgggcccuccuccccuccuugcaccgagauuaauaaaaaaaaaaaaaaaaaaaaaaaaaaaaaaaaaaaaaaaaaaaaaaaaaaaaaaaaaaaaaaaaugcaucccccccccccccccccccccccccccccccaaaggcucuuuucagagccaccagaauu

SEQ ID NO: 21438 - RNA, 6058 nt, Artificial Sequence
  SARS-CoV-2__MT886363.1__non-structural protein 3 (NSP3) mRNA gc
aggagaaagcuuaccauggcccccaccaaggugaccuucggcgacgacacggucaucgaggugcagggguacaagagcgugaacaucaccuucgagcuggacgagcgcaucgacaagguccucaacgagaagugcuccgccuacaccguggagcugggcaccgaggugaacgaguucgcgugcgucguggccgacgccgugaucaagacgcugcagccggucagcgagcuccugaccccccuggggaucgaccucgacgagugguccauggccaccuacuaccuguucgacgagagcggcgaguucaagcuggccucccacauguacugcagcuucuacccccccgacgaggacgaggaggagggggacugcgaggaggaggaguucgagccguccacccaguacgaguacggcacggaggacgacuaccagggcaagccccucgaguucggggcgaccagcgccgcccugcagcccgaggaggagcaggaggaggacuggcuggacgacgacucccagcagaccgugggccagcaggacgggagcgaggacaaccagaccacgaccauccagaccaucguggagguccagccccagcucgagauggagcugaccccgguggugcagacgaucgaggucaacuccuucagcggcuaccugaagcucaccgacaacguguacaucaagaacgccgacaucguggaggaggcgaagaaggucaagcccaccgugguggucaacgccgccaacguguaccugaagcacgggggcggcguggccggggcccugaacaaggcgaccaacaacgccaugcaggucgaguccgacgacuacaucgccacgaacggcccccucaagguggggggcagcugcguccuguccggccacaaccuggccaagcacugccuccacgugguggggcccaacgucaacaagggcgaggacauccagcugcugaagagcgccuacgagaacuucaaccagcacgaggugcuccuggcgccgcugcucuccgccgggaucuucggcgccgaccccauccacagccugcgggugugcgucgacaccgugcgcaccaacguguaccuggccgucuucgacaagaaccucuacgacaagcugguguccagcuuccuggagaugaagagcgagaagcagguggagcagaagaucgccgagauccccaaggaggaggucaagcccuucaucaccgaguccaagccgagcguggagcagcggaagcaggacgacaagaagaucaaggcgugcguggaggaggucacgaccacccucgaggagaccaaguuccugacggagaaccugcuccuguacaucgacaucaacgggaaccugcaccccgacuccgccacccucgugagcgacaucgacaucaccuuccugaagaaggacgcccccuacaucgugggcgacgucgugcaggagggcgugcugaccgccgucgugauccccacgaagaaggccgggggcaccaccgagaugcucgcgaaggcccugcgcaaggugccgaccgacaacuacaucacgaccuaccccgggcagggccugaacggguacaccgucgaggaggccaagaccgugcucaagaagugcaaguccgccuucuacauccugcccagcaucaucuccaacgagaagcaggagauccugggcaccgugagcuggaaccuccgggagaugcuggcgcacgccgaggagacgcgcaagcugaugcccgucugcguggagaccaaggccaucguguccaccauccagcggaaguacaagggcaucaagauccaggagggggucguggacuacggcgcccgcuucuacuucuacaccagcaagacgaccguggccucccugaucaacacccucaacgaccugaacgagacccuggucacgaugccgcucggguacgugacccacggccugaaccuggaggaggcggcccgguacaugcgcagccucaaggugcccgccaccgucuccgugagcucccccgacgccgugaccgccuacaacggguaccugacgagcuccagcaagacccccgaggagcacuucaucgagaccaucucccuggcgggcagcuacaaggacuggagcuacuccggccagagcacccagcucgggaucgaguuccugaagcggggcgacaaguccgucuacuacacgagcaacccgaccaccuuccaccuggacggggaggugaucaccuucgacaaccucaagacgcugcugucccuccgcgaggugcggaccaucaaggucuucaccaccguggacaacaucaaccugcacacgcagguggucgacaugagcaugaccuacggccagcaguucggccccaccuaccuggacggggccgacgugaccaagaucaagccccacaacucccacgagggcaagacguucuacgugcucccgaacgacgacacccugcgcgucgaggccuucgaguacuaccacaccaccgaccccagcuuccuggggcgguacauguccgcccucaaccacacgaagaaguggaaguacccccaggugaacggccugaccagcaucaagugggccgacaacaacugcuaccuggcgaccgcccuccugacccugcagcagaucgagcucaaguucaaccccccggcccugcaggacgccuacuaccgcgcgcgggccggggaggccgccaacuucugcgcccugauccucgcguacugcaacaagacggugggcgagcugggcgacguccgcgagaccauguccuaccuguuccagcacgccaaccucgacagcugcaagcgggugcugaacgucgugugcaagaccugcgggcagcagcagaccacccugaagggcguggaggccgucauguacauggggacgcucuccuacgagcaguucaagaagggcgugcagauccccugcaccugcgggaagcaggccaccaaguaccuggugcagcaggagagccccuucgucaugauguccgcccccccggcgcaguacgagcugaagcacggcaccuucacgugcgccagcgaguacaccggcaacuaccagugcgggcacuacaagcacaucaccuccaaggagacccucuacugcaucgacggcgcccugcugacgaagagcagcgaguacaaggggcccaucaccgacguguucuacaaggagaacuccuacaccaccacgaucaagcccgugaccuacaagcucgacggcgucgugugcaccgagaucgaccccaagcuggacaacuacuacaagaaggacaacagcuacuucaccgagcagccgaucgaccuggugcccaaccagcccuaccccaacgccuccuucgacaacuucaaguucgucugcgacaacaucaaguucgccgacgaccucaaccagcugacgggguacaagaagccggcgagccgcgagcugaaggugaccuucuuccccgaccucaacggcgacguggucgccaucgacuacaagcacuacacccccuccuucaagaagggcgccaagcugcugcacaagcccaucguguggcacgugaacaacgccaccaacaaggcgacguacaagccgaacaccuggugcauccggugccucuggagcaccaagcccgucgagaccuccaacagcuucgacgugcugaaguccgaggacgcccaggggauggacaaccuggccugcgaggaccucaagcccgugagcgaggaggucguggagaaccccacgauccagaaggacgugcuggagugcaacgucaagaccaccgagguggugggcgacaucauccugaagccggccaacaacucccucaagaucaccgaggaggucgggcacacggaccugauggccguguacguggacaacagcucccugaccaucaagaagcccaacgagcucagccgcguccugggccugaagacccucgcgacccacgggcuggccgccgugaacuccgugcccugggacacgaucgccaacuacgccaagccguuccugaacaaggucgugagcaccaccaccaacaucgugacgcgcugccucaaccgggucugcaccaacuacaugcccuacuucuucacccugcugcuccagcugugcaccuucacccgcuccacgaacagccggaucaaggcguccaugcccaccaccaucgccaagaacaccgugaagagcgugggcaaguucugccuggaggccagcuucaacuaccucaagucccccaacuucagcaagcugaucaacaucaucaucugguuccugcuccuguccgucugccugggcagccucaucuacuccacggccgcccugggggugcugaugagcaaccucggcaugccguccuacugcaccggguaccgcgagggcuaccugaacagcaccaacgugaccaucgcgacguacugcaccggcuccauccccugcagcgucugccuguccgggcucgacagccuggacaccuaccccucccuggagaccauccagaucacgaucagcuccuucaagugggaccucaccgccuucggccugguggccgagugguuccuggccuacauccucuucacccgguucuucuacgugcuggggcuggccgcgaucaugcagcucuucuucagcuacuucgccguccacuucaucuccaacagcuggcugauguggcugaucaucaaccuggugcagauggcccccaucuccgccauggugcgcauguacaucuucuucgcgagcuucuacuacgucuggaagagcuacgugcacguggucgacggcugcaacuccagcaccugcaugaugugcuacaagcggaaccgcgccacgcggguggagugcaccaccaucgucaacggggugcgccgguccuucuacguguacgccaacggcggcaagggguucugcaagcuccacaacuggaacugcgucaacugcgacaccuucugcgccggcagcacguucaucuccgacgagguggcccgcgaccugagccugcaguucaagcggccgaucaaccccaccgaccaguccagcuacaucguggacuccgucaccgugaagaacgggagcauccaccucuacuucgacaaggcgggccagaagaccuacgagcgccacucccugagccacuucgugaaccuggacaaccuccgggccaacaacacgaaggggucccugcccaucaacgucaucguguucgacggcaagagcaagugcgaggaguccagcgccaaguccgccagcguguacuacucccagcugaugugccagcccauccuccugcuggaccaggcccucgucagcgacgugggcgacagcgcggagguggccgucaagauguucgacgccuacgugaacaccuucuccagcaccuucaacgugccgauggagaagcugaagacccuggucgccacggccgaggcggagcucgccaagaacgugucccuggacaacgugcugagcaccuucaucuccgccgcccgccagggguucgucgacagcgacguggagaccaaggacguggucgagugccucaagcugucccaccagagcgacaucgaggugaccggcgacuccugcaacaacuacaugcugacguacaacaagguggagaacaugaccccccgggaccucggggcgugcaucgacugcagcgcccgccacaucaacgcccaggucgccaagucccacaacaucgcccugaucuggaacgugaaggacuucaugagccuguccgagcagcuccggaagcagauccgcagcgcggccaagaagaacaaccugcccuucaagcugaccugcgccaccacgcgccagguggucaacguggugaccaccaagaucgcccucaagggcgggugaggacuaguuauaagacugacuagcccgaugggccucccaacgggcccuccuccccuccuugcaccgagauuaauaaaaaaaaaaaaaaaaaaaaaaaaaaaaaaaaaaaaaaaaaaaaaaaaaaaaaaaaaaaaaaaaugcaucccccccccccccccccccccccccccccccaaaggcucuuuucagagccaccagaauu

SEQ ID NO: 21439 - RNA, 6058 nt, Artificial Sequence
  SARS-CoV-2__MT886381.1__non-structural protein 3 (NSP3) mRNA gc
aggagaaagcuuaccauggcccccaccaaggugaccuucggcgacgacacggucaucgaggugcagggguacaagagcgugaacaucaccuucgagcuggacgagcgcaucgacaagguccucaacgagaagugcuccgccuacaccguggagcugggcaccgaggugaacgaguucgcgugcgucguggccgacgccgugaucaagacgcugcagccggucagcgagcuccugaccccccuggggaucgaccucgacgagugguccauggccaccuacuaccuguucgacgagagcggcgaguucaagcuggccucccacauguacugcagcuucuacccccccgacgaggacgaggaggagggggacugcgaggaggaggaguucgagccguccacccaguacgaguacggcacggaggacgacuaccagggcaagccccucgaguucggggcgaccagcgccgcccugcagcccgaggaggagcaggaggaggacuggcuggacgacgacucccagcagaccgugggccagcaggacgggagcgaggacaaccagaccacgaccauccagaccaucguggagguccagccccagcucgagauggagcugaccuccguggugcagacgaucgaggucaacagcuucuccggcuaccugaagcucaccgacaacguguacaucaagaacgccgacaucguggaggaggcgaagaaggucaagccgaccgugguggucaacgccgccaacguguaccugaagcacgggggcggcguggccggggcccugaacaaggcgaccaacaacgccaugcaggucgagagcgacgacuacaucgccacgaacggcccccucaagguggggggcuccugcguccugagcggccacaaccuggccaagcacugccuccacgugguggggcccaacgucaacaagggcgaggacauccagcugcugaaguccgccuacgagaacuucaaccagcacgaggugcuccuggcgccccugcucagcgccgggaucuucggcgccgacccgauccacucccugcgggugugcgucgacaccgugcgcaccaacguguaccuggccgucuucgacaagaaccucuacgacaagcuggugagcagcuuccuggagaugaaguccgagaagcagguggagcagaagaucgccgagauccccaaggaggaggucaagcccuucaucaccgagagcaagcccuccguggagcagcggaagcaggacgacaagaagaucaaggcgugcguggaggaggucacgaccacccucgaggagaccaaguuccugacggagaaccugcuccuguacaucgacaucaacgggaaccugcacccggacagcgccacccucguguccgacaucgacaucaccuuccugaagaaggacgcccccuacaucgugggcgacgucgugcaggagggcgugcugaccgccgucgugauccccacgaagaaggccgggggcaccaccgagaugcucgcgaaggcccugcgcaaggugcccaccgacaacuacaucacgaccuacccggggcagggccugaacggguacaccgucgaggaggccaagaccgugcucaagaagugcaagagcgccuucuacauccugcccuccaucaucagcaacgagaagcaggagauccugggcaccguguccuggaaccuccgggagaugcuggcgcacgccgaggagacgcgcaagcugaugcccgucugcguggagaccaaggccaucgugagcaccauccagcggaaguacaagggcaucaagauccaggagggggucguggacuacggcgcccgcuucuacuucuacaccuccaagacgaccguggccagccugaucaacacccucaacgaccugaacgagacccuggucacgaugccccucggguacgugacccacggccugaaccuggaggaggcggcccgguacaugcgcucccucaaggugccggccaccgucagcguguccagccccgacgccgugaccgccuacaacggguaccugacguccagcuccaagacccccgaggagcacuucaucgagaccaucagccuggcgggcagcuacaaggacugguccuacagcggccaguccacccagcucgggaucgaguuccugaagcggggcgacaagagcgucuacuacacguccaaccccaccaccuuccaccuggacggggaggugaucaccuucgacaaccucaagacgcugcugagccuccgcgaggugcggaccaucaaggucuucaccaccguggacaacaucaaccugcacacgcagguggucgacauguccaugaccuacggccagcaguucggcccgaccuaccuggacggggccgacgugaccaagaucaagccccacaacagccacgagggcaagacguucuacgugcuccccaacgacgacacccugcgcgucgaggccuucgaguacuaccacaccaccgacccguccuuccuggggcgguacaugagcgcccucaaccacacgaagaaguggaaguacccccaggugaacggccugaccuccaucaagugggccgacaacaacugcuaccuggcgaccgcccuccugacccugcagcagaucgagcucaaguucaacccccccgcccugcaggacgccuacuaccgcgcgcgggccggggaggccgccaacuucugcgcccugauccucgcguacugcaacaagacggugggcgagcugggcgacguccgcgagaccaugagcuaccuguuccagcacgccaaccucgacuccugcaagcgggugcugaacgucgugugcaagaccugcgggcagcagcagaccacccugaagggcguggaggccgucauguacauggggacgcucagcuacgagcaguucaagaagggcgugcagaucccgugcaccugcgggaagcaggccaccaaguaccuggugcagcaggagucccccuucgucaugaugagcgccccccccgcgcaguacgagcugaagcacggcaccuucacgugcgccuccgaguacaccggcaacuaccagugcgggcacuacaagcacaucaccagcaaggagacccucuacugcaucgacggcgcccugcugacgaagagcuccgaguacaaggggccgaucaccgacguguucuacaaggagaacagcuacaccaccacgaucaagcccgugaccuacaagcucgacggcgucgugugcaccgagaucgaccccaagcuggacaacuacuacaagaaggacaacuccuacuucaccgagcagcccaucgaccuggugccgaaccagcccuaccccaacgccagcuucgacaacuucaaguucgucugcgacaacaucaaguucgccgacgaccucaaccagcugacgggguacaagaagcccgcgucccgcgagcugaaggugaccuucuucccggaccucaacggcgacguggucgccaucgacuacaagcacuacacccccagcuucaagaagggcgccaagcugcugcacaagcccaucguguggcacgugaacaacgccaccaacaaggcgacguacaagcccaacaccuggugcauccggugccucugguccaccaagccggucgagaccagcaacuccuucgacgugcugaagagcgaggacgcccaggggauggacaaccuggccugcgaggaccucaagcccguguccgaggaggucguggagaaccccacgauccagaaggacgugcuggagugcaacgucaagaccaccgagguggugggcgacaucauccugaagcccgccaacaacagccucaagaucaccgaggaggucgggcacacggaccugauggccgcguacguggacaacuccagccugaccaucaagaagccgaacgagcucucccgcgugcugggccugaagacccucgccacccacgggcuggccgccgucaacagcgugcccugggacacgaucgccaacuacgcgaagcccuuccugaacaagguggucuccaccaccaccaacaucgugacgcgcugccucaaccgggugugcaccaacuacaugccguacuucuucacccugcugcuccagcugugcaccuucacccgcagcacgaacucccggaucaaggccagcaugcccaccaccaucgccaagaacaccgucaagagcgugggcaaguucugccuggaggccuccuucaacuaccucaagagccccaacuucuccaagcugaucaacaucaucaucugguuccugcuccugagcgugugccugggcucccucaucuacagcacggccgcgcuggggguccugauguccaaccucggcaugcccagcuacugcaccggguaccgcgagggcuaccugaacuccaccaacgugaccaucgccacguacugcaccggcagcaucccgugcuccgugugccugagcgggcucgacucccuggacaccuaccccagccuggagaccauccagaucacgaucuccagcuucaagugggaccucaccgccuucggccuggucgccgagugguuccuggccuacauccucuucacccgguucuucuacgugcuggggcuggcggccaucaugcagcucuucuucuccuacuucgccgugcacuucaucagcaacuccuggcugauguggcugaucaucaaccugguccagauggcccccaucagcgcgauggugcgcauguacaucuucuucgccagcuucuacuacguguggaaguccuacguccacgugguggacggcugcaacagcuccaccugcaugaugugcuacaagcggaaccgcgccacgcgggucgagugcaccaccaucgugaacgggguccgccggagcuucuacguguacgccaacggcggcaagggguucugcaagcuccacaacuggaacugcgugaacugcgacaccuucugcgccggcuccacguucaucagcgacgaggucgcgcgcgaccugucccugcaguucaagcggcccaucaacccgaccgaccagagcuccuacaucguggacagcgugaccgucaagaacggguccauccaccucuacuucgacaaggccggccagaagaccuacgagcgccacagccugucccacuucgugaaccuggacaaccuccgggccaacaacacgaaggggagccugcccaucaacgugaucgucuucgacggcaaguccaagugcgaggagagcuccgccaagagcgccuccguguacuacagccagcugaugugccagcccauccuccugcuggaccaggcgcucgugagcgacgucggcgacuccgccgagguggccgugaagauguucgacgccuacgucaacaccuucagcuccaccuucaacgugcccauggagaagcugaagacccugguggccacggcggaggccgagcucgccaagaacgucagccuggacaacgugcuguccaccuucaucagcgccgcgcgccagggguucguggacuccgacgucgagaccaaggacgugguggagugccucaagcugagccaccaguccgacaucgaggucaccggcgacagcugcaacaacuacaugcugacguacaacaagguggagaacaugaccccgcgggaccucggggccugcaucgacugcuccgcccgccacaucaacgcccagguggccaagagccacaacaucgcgcugaucuggaacgucaaggacuucaugucccugagcgagcagcuccggaagcagauccgcuccgccgccaagaagaacaaccugcccuucaagcugaccugcgccaccacgcgccagguggugaacgucgugaccaccaagaucgcccucaagggcgggugaggacuaguuauaagacugacuagcccgaugggccucccaacgggcccuccuccccuccuugcaccgagauuaauaaaaaaaaaaaaaaaaaaaaaaaaaaaaaaaaaaaaaaaaaaaaaaaaaaaaaaaaaaaaaaaaugcaucccccccccccccccccccccccccccccccaaaggcucuuuucagagccaccagaauu

SEQ ID NO: 21440 - RNA, 6058 nt, Artificial Sequence
  SARS-CoV-2__MT879619.1__non-structural protein 3 (NSP3) mRNA gc
aggagaaagcuuaccauggcccccaccaaggugaccuucggcgacgacacggucaucgaggugcagggguacaagagcgugaacaucaccuucgagcuggacgagcgcaucgacaagguccucaacgagaagugcuccgccuacaccguggagcugggcaccgaggugaacgaguucgcgugcgucguggccgacgccgugaucaagacgcugcagccggucagcgagcuccugaccccccuggggaucgaccucgacgagugguccauggccaccuacuaccuguucgacgagagcggcgaguucaagcuggccucccacauguacugcagcuucuacccccccgacgaggacgaggaggagggggacugcgaggaggaggaguucgagccguccacccaguacgaguacggcacggaggacgacuaccagggcaagccccucgaguucggggcgaccagcgccgcccugcagcccgaggaggagcaggaggaggacuggcuggacgacgacucccagcagaccgugggccagcaggacgggagcgaggacaaccagaccacgaccauccagaccaucguggagguccagccccagcucgagauggagcugaccccgguggugcagacgaucgaggucaacuccuucagcggcuaccugaagcucaccgacaacguguacaucaagaacgccgacaucguggaggaggcgaagaaggucaagcccaccgugguggucaacgccgccaacguguaccugaagcacgggggcggcguggccggggcccugaacaaggcgaccaacaacgccaugcaggucgaguccgacgacuacaucgccacgaacggcccccucaagguggggggcagcugcguccuguccggccacaaccuggccaagcacugccuccacgugguggggcccaacgucaacaagggcgaggacauccagcugcugaagagcgccuacgagaacuucaaccagcacgaggugcuccuggcgccgcugcucuccgccgggaucuucggcgccgaccccauccacagccugcgggugugcgucgacaccgugcgcaccaacguguaccuggccgucuucgacaagaaccucuacgacaagcugguguccagcuuccuggagaugaagagcgagaagcagguggagcagaagaucgccgagauccccaaggaggaggucaagcccuucaucaccgaguccaagccgagcguggagcagcggaagcaggacgacaagaagaucaaggcgugcguggaggaggucacgaccacccucgaggagaccaaguuccugacggagaaccugcuccuguacaucgacaucaacgggaaccugcaccccgacuccgccacccucgugagcgacaucgacaucaccuuccugaagaaggacgcccccuacaucgugggcgacgucgugcaggagggcgugcugaccgccgucgugauccccacgaagaaggccgggggcaccaccgagaugcucgcgaaggcccugcgcaaggugccgaccgacaacuacaucacgaccuaccccgggcagggccugaacggguacaccgucgaggaggccaagaccgugcucaagaagugcaaguccgccuucuacauccugcccagcaucaucuccaacgagaagcaggagauccugggcaccgugagcuggaaccuccgggagaugcuggcgcacgccgaggagacgcgcaagcugaugcccgucugcguggagaccaaggccaucguguccaccauccagcggaaguacaagggcaucaagauccaggagggggucguggacuacggcgcccgcuucuacuucuacaccagcaagacgaccguggccucccugaucaacacccucaacgaccugaacgagacccuggucacgaugccgcucggguacgugacccacggccugaaccuggaggaggcggcccgguacaugcgcagccucaaggugcccgccaccgucuccgugagcucccccgacgccgugaccgccuacaacggguaccugacgagcuccagcaagacccccgaggagcacuucaucgagaccaucucccuggcgggcagcuacaaggacuggagcuacuccggccagagcacccagcucgggaucgaguuccugaagcggggcgacaaguccgucuacuacacgagcaacccgaccaccuuccaccuggacggggaggugaucaccuucgacaaccucaagacgcugcugucccuccgcgaggugcggaccaucaaggucuucaccaccguggacaacaucaaccugcacacgcagguggucgacaugagcaugaccuacggccagcaguucggccccaccuaccuggacggggccgacgugaccaagaucaagccccacaacucccacgagggcaagacguucuacgugcucccgaacgacgacacccugcgcgucgaggccuucgaguacuaccacaccaccgaccccagcuuccuggggcgguacauguccgcccucaaccacacgaagaaguggaaguacccccaggugaacggccugaccagcaucaagugggccgacaacaacugcuaccuggcgaccgcccuccugacccugcagcagaucgagcucaaguucaaccccccggcccugcaggacgccuacuaccgcgcgcgggccggggaggccgccaacuucugcgcccugauccucgcguacugcaacaagacggugggcgagcugggcgacguccgcgagaccauguccuaccuguuccagcacgccaaccucgacagcugcaagcgggugcugaacgucgugugcaagaccugcgggcagcagcagaccacccugaagggcguggaggccgucauguacauggggacgcucuccuacgagcaguucaagaagggcgugcagauccccugcaccugcgggaagcaggccaccaaguaccuggugcagcaggagagccccuucgucaugauguccgcccccccggcgcaguacgagcugaagcacggcaccuucacgugcgccagcgaguacaccggcaacuaccagugcgggcacuacaagcacaucaccuccaaggagacccucuacugcaucgacggcgcccugcugacgaagagcagcgaguacaaggggcccaucaccgacguguucuacaaggagaacuccuacaccaccacgaucaagcccgugaccuacaagcucgacggcgucgugugcaccgagaucgaccccaagcuggacaacuacuacaagaaggacaacagcuacuucaccgagcagccgaucgaccuggugcccaaccagcccuaccccaacgccuccuucgacaacuucaaguucgucugcgacaacaucaaguucgccgacgaccucaaccagcugacgggguacaagaagccggcgagccgcgagcugaaggugaccuucuuccccgaccucaacggcgacguggucgccaucgacuacaagcacuacacccccuccuucaagaagggcgccaagcugcugcacaagcccaucguguggcacgugaacaacgccaccaacaaggcgacguacaagccgaacaccuggugcauccggugccucuggagcaccaagcccgucgagaccuccaacagcuucgacgugcugaaguccgaggacgcccaggggauggacaaccuggccugcgaggaccucaagcccgugagcgaggaggucguggagaaccccacgauccagaaggacgugcuggagugcaacgucaagaccaccgagguggugggcgacaucauccugaagccggccaacaacucccucaagaucaccgaggaggucgggcacacggaccugauggccgcguacguggacaacagcucccugaccaucaagaagcccaacgagcucagccgcgugcugggccugaagacccucgccacccacgggcuggccgccgucaacuccgugcccugggacacgaucgccaacuacgcgaagccguuccugaacaagguggucagcaccaccaccaacaucgugacgcgcugccucaaccgggugugcaccaacuacaugcccuacuucuucacccugcugcuccagcugugcaccuucacccgcuccacgaacagccggaucaaggccuccaugcccaccaccaucgccaagaacaccgucaagagcgugggcaaguucugccuggaggccagcuucaacuaccucaagucccccaacuucagcaagcugaucaacaucaucaucugguuccugcuccuguccgugugccugggcagccucaucuacuccacggccgcgcuggggguccugaugagcaaccucggcaugccguccuacugcaccggguaccgcgagggcuaccugaacagcaccaacgugaccaucgccacguacugcaccggcuccauccccugcagcgugugccuguccgggcucgacagccuggacaccuaccccucccuggagaccauccagaucacgaucagcuccuucaagugggaccucaccgccuucggccuggucgccgagugguuccuggccuacauccucuucacccgguucuucuacgugcuggggcuggcggccaucaugcagcucuucuucagcuacuucgccgugcacuucaucuccaacagcuggcugauguggcugaucaucaaccugguccagauggcccccaucuccgcgauggugcgcauguacaucuucuucgccagcuucuacuacguguggaagagcuacguccacgugguggacggcugcaacuccagcaccugcaugaugugcuacaagcggaaccgcgccacgcgggucgagugcaccaccaucgugaacgggguccgccgguccuucuacguguacgccaacggcggcaagggguucugcaagcuccacaacuggaacugcgugaacugcgacaccuucugcgccggcagcacguucaucuccgacgaggucgcgcgcgaccugagccugcaguucaagcggccgaucaaccccaccgaccaguccagcuacaucguggacuccgugaccgucaagaacgggagcauccaccucuacuucgacaaggccggccagaagaccuacgagcgccacucccugagccacuucgugaaccuggacaaccuccgggccaacaacacgaaggggucccugcccaucaacgugaucgucuucgacggcaagagcaagugcgaggaguccagcgccaaguccgccagcguguacuacucccagcugaugugccagcccauccuccugcuggaccaggcgcucgugagcgacgucggcgacagcgccgagguggccgugaagauguucgacgccuacgucaacaccuucuccagcaccuucaacgugccgauggagaagcugaagacccugguggccacggcggaggccgagcucgccaagaacgucucccuggacaacgugcugagcaccuucaucuccgccgcgcgccagggguucguggacagcgacgucgagaccaaggacgugguggagugccucaagcugucccaccagagcgacaucgaggucaccggcgacuccugcaacaacuacaugcugacguacaacaagguggagaacaugaccccccgggaccucggggccugcaucgacugcagcgcccgccacaucaacgcccacguggccaagucccacaacaucgcgcugaucuggaacgucaaggacuucaugagccuguccgagcagcuccggaagcagauccgcagcgccgccaagaagaacaaccugcccuucaagcugaccugcgccaccacgcgccagguggugaacgucgugaccaccaagaucgcccucaagggcgggugaggacuaguuauaagacugacuagcccgaugggccucccaacgggcccuccuccccuccuugcaccgagauuaauaaaaaaaaaaaaaaaaaaaaaaaaaaaaaaaaaaaaaaaaaaaaaaaaaaaaaaaaaaaaaaaaugcaucccccccccccccccccccccccccccccccaaaggcucuuuucagagccaccagaauu

SEQ ID NO: 21441 - RNA, 6058 nt, Artificial Sequence
  SARS-CoV-2__MT880873.1__non-structural protein 3 (NSP3) mRNA gc
aggagaaagcuuaccauggcccccaccaaggugaccuucggcgacgacacggucaucgaggugcagggguacaagagcgugaacaucaccuucgagcuggacgagcgcaucgacaagguccucaacgagaagugcuccgccuacaccguggagcugggcaccgaggugaacgaguucgcgugcgucguggccgacgccgugaucaagacgcugcagccggucagcgagcuccugaccccccuggggaucgaccucgacgagugguccauggccaccuacuaccuguucgacgagagcggcgaguucaagcuggccucccacauguacugcagcuucuacccccccgacgaggacgaggaggagggggacugcgaggaggaggaguucgagccguccacccaguacgaguacggcacggaggacgacuaccagggcaagccccucgaguucggggcgaccagcgccgcccugcagcccgaggaggagcaggaggaggacuggcuggacgacgacucccagcagaccgugggccagcaggacgggagcgaggacaaccagaccacgaccauccagaccaucguggagguccagccccagcucgagauggagcugaccccgguggugcagacgaucgaggucaacuccuucagcggcuaccugaagcucaccgacaacguguacaucaagaacgccgacaucguggaggaggcgaagaaggucaagcccaccgugguggucaacgccgccaacguguaccugaagcacgggggcggcguggccggggcccugaacaaggcgaccaacaacgccaugcaggucgaguccgacgacuacaucgccacgaacggcccccucaagguggggggcagcugcguccuguccggccacaaccuggccaagcacugccuccacgugguggggcccaacgucaacaagggcgaggacauccagcugcugaagagcgccuacgagaacuucaaccagcacgaggugcuccuggcgccgcugcucuccgccgggaucuucggcgccgaccccauccacagccugcgggugugcgucgacaccgugcgcaccaacguguaccuggccgucuucgacaagaaccucuacgacaagcugguguccagcuuccuggagaugaagagcgagaagcagguggagcagaagaucgccgagauccccaaggaggaggucaagcccuucaucaccgaguccaagccgagcguggagcagcggaagcaggacgacaagaagaucaaggcgugcguggaggaggucacgaccacccucgaggagaccaaguuccugacggagaaccugcuccuguacaucgacaucaacgggaaccugcaccccgacuccgccacccucgugagcgacaucgacaucaccuuccugaagaaggacgcccccuacaucgugggcgacgucgugcaggagggcgugcugaccgccgucgugauccccacgaagaaggccgggggcaccaccgagaugcucgcgaaggcccugcgcaaggugccgaccgacaacuacaucacgaccuaccccgggcagggccugaacggguacaccgucgaggaggccaagaccgugcucaagaagugcaaguccgccuucuacauccugcccagcaucaucuccaacgagaagcaggagauccugggcaccgugagcuggaaccuccgggagaugcuggcgcacgccgaggagacgcgcaagcugaugcccgucugcguggagaccaaggccaucguguccaccauccagcggaaguacaagggcaucaagauccaggagggggucguggacuacggcgcccgcuucuacuucuacaccagcaagacgaccguggccucccugaucaacacccucaacgaccugaacgagacccuggucacgaugccgcucggguacgugacccacggccugaaccuggaggaggcggcccgguacaugcgcagccucaaggugcccgccaccgucuccgugagcucccccgacgccgugaccgccuacaacggguaccugacgagcuccagcaagacccccgaggagcacuucaucgagaccaucucccuggcgggcagcuacaaggacuggagcuacuccggccagagcacccagcucgggaucgaguuccugaagcggggcgacaaguccgucuacuacacgagcaacccgaccaccuuccaccuggacggggaggugaucaccuucgacaaccucaagacgcugcugucccuccgcgaggugcggaccaucaaggucuucaccaccguggacaacaucaaccugcacacgcagguggucgacaugagcaugaccuacggccagcaguucggccccaccuaccuggacggggccgacgugaccaagaucaagccccacaacucccacgagggcaagacguucuacgugcucccgaacgacgacacccugcgcgucgaggccuucgaguacuaccacaccaccgaccccagcuuccuggggcgguacauguccgcccucaaccacacgaagaaguggaaguacccccaggugaacggccugaccagcaucaagugggccgacaacaacugcuaccuggcgaccgcccuccugacccugcagcagaucgagcucaaguucaaccccccggcccugcaggacgccuacuaccgcgcgcgggccggggaggccgccaacuucugcgcccugauccucgcguacugcaacaagacggugggcgagcugggcgacguccgcgagaccauguccuaccuguuccagcacgccaaccucgacagcugcaagcgggugcugaacgucgugugcaagaccugcgggcagcagcagaccacccugaagggcguggaggccgucauguacauggggacgcucuccuacgagcaguucaagaagggcgugcagauccccugcaccugcgggaagcaggccaccaaguaccuggugcagcaggagagccccuucgucaugauguccgcccccccggcgcaguacgagcugaagcacggcaccuucacgugcgccagcgaguacaccggcaacuaccagugcgggcacuacaagcacaucaccuccaaggagacccucuacugcaucgacggcgcccugcugacgaagagcagcgaguacaaggggcccaucaccgacguguucuacaaggagaacuccuacaccaccacgaucaagcccgugaccuacaagcucgacggcgucgugugcaccgagaucgaccccaagcuggacaacuacuacaagaaggacaacagcuacuucaccgagcagccgaucgaccuggugcccaaccagcccuaccccaacgccuccuucgacaacuucaaguucgucugcgacaacaucaaguucgccgacgaccucaaccagcugacgggguacaagaagccggcgagccgcgagcugaaggugaccuucuuccccgaccucaacggcgacguggucgccaucgacuacaagcacuacacccccuccuucaagaagggcgccaagcugcugcacaagcccaucguguggcacgugaacaacgccaccaacaaggcgacguacaagccgaacaccuggugcauccggugccucuggagcaccaagcccgucgagaccuccaacagcuucgacgugcugaaguccgaggacgcccaggggauggacaaccuggccugcgaggaccucaagcccgugagcgaggaggucguggagaaccccacgauccagaaggacgugcuggagugcaacgucaagaccaccgagguggugggcgacaucauccugaagccggccaacaacucccucaagaucaccgaggaggucgggcacacggaccugauggccgcguacguggacaacagcucccugaccaucaagaagcccaacgagcucagccgcgugcugggccugaagacccucgccacccacgggcuggccgccgucaacuccgugcccugggacacgaucgccaacuacgcgaagccguuccugaacaagguggucagcaccaccaccaacaucgugacgcgcugccucaaccgggugugcaccaacuacaugcccuacuucuucacccugcugcuccagcugugcaccuucacccgcuccacgaacagccggaucaaggccuccaugcccaccaccaucgccaagaacaccgucaagagcgugggcaaguucugccuggaggccagcuucaacuaccucaagucccccaacuucagcaagcugaucaacaucaucaucugguuccugcuccuguccgugugccugggcagccucaucuacuccacggccgcgcuggggguccugaugagcaaccucggcaugccguccuacugcaccggguaccgcgagggcuaccugaacagcaccaacgugaccaucgccacguacugcaccggcuccauccccugcagcgugugccuguccgggcucgacagccuggacaccuaccccucccuggagaccauccagaucacgaucagcuccuucaagugggaccucaccgccuucggccuggucgccgagugguuccuggccuacauccucuucacccgguucuucuacgugcuggggcuggcggccaucaugcagcucuucuucagcuacuucgccgugcacuucaucuccaacagcuggcugauguggcugaucaucaaccugguccagauggcccccaucuccgcgauggugcgcauguacaucuucuucgccagcuucuacuacguguggaagagcuacguccacgugguggacggcugcaacuccagcaccugcaugaugugcuacaagcggaaccgcgccacgcgggucgagugcaccaccaucgugaacgggguccgccgguccuucuacguguacgccaacggcggcaagggguucugcaagcuccacaacuggaacugcgugaacugcgacaccuucugcgccggcagcacguucaucuccgacgaggucgcgcgcgaccugagccugcaguucaagcggccgaucaaccccaccgaccaguccagcuacaucguggacuccgugaccgucaagaacgggagcauccaccucuacuucgacaaggccggccagaagaccuacgagcgccacucccugagccacuucgugaaccuggacaaccuccgggccaacaacacgaaggggucccugcccaucaacgugaucgucuucgacggcaagagcaagugcgaggaguccagcgcccgcuccgccagcguguacuacucccagcugaugugccagcccauccuccugcuggaccaggcgcucgugagcgacgucggcgacagcgccgagguggccgugaagauguucgacgccuacgucaacaccuucuccagcaccuucaacgugccgauggagaagcugaagacccugguggccacggcggaggccgagcucgccaagaacgucucccuggacaacgugcugagcaccuucaucuccgccgcgcggcagggguucguggacagcgacgucgagaccaaggacgugguggagugccucaagcugucccaccagagcgacaucgaggucaccggcgacuccugcaacaacuacaugcugacguacaacaagguggagaacaugaccccccgcgaccucggggccugcaucgacugcagcgcccggcacaucaacgcccagguggccaagucccacaacaucgcgcugaucuggaacgucaaggacuucaugagccuguccgagcagcuccgcaagcagauccgcagcgccgccaagaagaacaaccugcccuucaagcugaccugcgccaccacgcggcagguggugaacgucgugaccaccaagaucgcccucaagggcgggugaggacuaguuauaagacugacuagcccgaugggccucccaacgggcccuccuccccuccuugcaccgagauuaauaaaaaaaaaaaaaaaaaaaaaaaaaaaaaaaaaaaaaaaaaaaaaaaaaaaaaaaaaaaaaaaaugcaucccccccccccccccccccccccccccccccaaaggcucuuuucagagccaccagaauu

SEQ ID NO: 21442 - RNA, 6058 nt, Artificial Sequence
  SARS-CoV-2__MT880876.1__non-structural protein 3 (NSP3) mRNA gc
aggagaaagcuuaccauggcccccaccaaggugaccuucggcgacgacacggucaucgaggugcagggguacaagagcgugaacaucaccuucgagcuggacgagcgcaucgacaagguccucaacgagaagugcuccgccuacaccguggagcugggcaccgaggugaacgaguucgcgugcgucguggccgacgccgugaucaagacgcugcagccggucagcgagcuccugaccccccuggggaucgaccucgacgagugguccauggccaccuacuaccuguucgacgagagcggcgaguucaagcuggccucccacauguacugcagcuucuacccccccgacgaggacgaggaggagggggacugcgaggaggaggaguucgagccguccacccaguacgaguacggcacggaggacgacuaccagggcaagccccucgaguucggggcgaccagcgccgcccugcagcccgaggaggagcaggaggaggacuggcuggacgacgacucccagcagaccgugggccagcaggacgggagcgaggacaaccagaccacgaccauccagaccaucguggagguccagccccagcucgagauggagcugaccccgguggugcagacgaucgaggucaacuccuucagcggcuaccugaagcucaccgacaacguguacaucaagaacgccgacaucguggaggaggcgaagaaggucaagcccaccgugguggucaacgccgccaacguguaccugaagcacgggggcggcguggccggggcccugaacaaggcgaccaacaacgccaugcaggucgaguccgacgacuacaucgccacgaacggcccccucaagguggggggcagcugcguccuguccggccacaaccuggccaagcacugccuccacgugguggggcccaacgucaacaagggcgaggacauccagcugcugaacagcgccuacgagaacuucaaccagcacgaggugcuccuggcgccgcugcucuccgccgggaucuucggcgccgaccccauccacagccugcgggugugcgucgacaccgugcgcaccaacguguaccuggccgucuucgacaagaaccucuacgacaagcugguguccagcuuccuggagaugaagagcgagaagcagguggagcagaagaucgccgagauccccaaggaggaggucaagcccuucaucaccgaguccaagccgagcguggagcagcggaagcaggacgacaagaagaucaaggcgugcguggaggaggucacgaccacccucgaggagaccaaguuccugacggagaaccugcuccuguacaucgacaucaacgggaaccugcaccccgacuccgccacccucgugagcgacaucgacaucaccuuccugaagaaggacgcccccuacaucgugggcgacgucgugcaggagggcgugcugaccgccgucgugauccccacgaagaaggccgggggcaccaccgagaugcucgcgaaggcccugcgcaaggugccgaccgacaacuacaucacgaccuaccccgggcagggccugaacggguacaccgucgaggaggccaagaccgugcucaagaagugcaaguccgccuucuacauccugcccagcaucaucuccaacgagaagcaggagauccugggcaccgugagcuggaaccuccgggagaugcuggcgcacgccgaggagacgcgcaagcugaugcccgucugcguggagaccaaggccaucguguccaccauccagcggaaguacaagggcaucaagauccaggagggggucguggacuacggcgcccgcuucuacuucuacaccagcaagacgaccguggccucccugaucaacacccucaacgaccugaacgagacccuggucacgaugccgcucggguacgugacccacggccugaaccuggaggaggcggcccgguacaugcgcagccucaaggugcccgccaccgucuccgugagcucccccgacgccgugaccgccuacaacggguaccugacgagcuccagcaagacccccgaggagcacuucaucgagaccaucucccuggcgggcagcuacaaggacuggagcuacuccggccagagcacccagcucgggaucgaguuccugaagcggggcgacaaguccgucuacuacacgagcaacccgaccaccuuccaccuggacggggaggugaucaccuucgacaaccucaagacgcugcugucccuccgcgaggugcggaccaucaaggucuucaccaccguggacaacaucaaccugcacacgcagguggucgacaugagcaugaccuacggccagcaguucggccccaccuaccuggacggggccgacgugaccaagaucaagccccacaacucccacgagggcaagacguucuacgugcucccgaacgacgacacccugcgcgucgaggccuucgaguacuaccacaccaccgaccccagcuuccuggggcgguacauguccgcccucaaccacacgaagaaguggaaguacccccaggugaacggccugaccagcaucaagugggccgacaacaacugcuaccuggcgaccgcccuccugacccugcagcagaucgagcucaaguucaaccccccggcccugcaggacgccuacuaccgcgcgcgggccggggaggccgccaacuucugcgcccugauccucgcguacugcaacaagacggugggcgagcugggcgacguccgcgagaccauguccuaccuguuccagcacgccaaccucgacagcugcaagcgggugcugaacgucgugugcaagaccugcgggcagcagcagaccacccugaagggcguggaggccgucauguacauggggacgcucuccuacgagcaguucaagaagggcgugcagauccccugcaccugcgggaagcaggccaccaaguaccuggugcagcaggagagccccuucgucaugauguccgcccccccggcgcaguacgagcugaagcacggcaccuucacgugcgccagcgaguacaccggcaacuaccagugcgggcacuacaagcacaucaccuccaaggagacccucuacugcaucgacggcgcccugcugacgaagagcagcgaguacaaggggcccaucaccgacguguucuacaaggagaacuccuacaccaccacgaucaagcccgugaccuacaagcucgacggcgucgugugcaccgagaucgaccccaagcuggacaacuacuacaagaaggacaacagcuacuucaccgagcagccgaucgaccuggugcccaaccagcccuaccccaacgccuccuucgacaacuucaaguucgucugcgacaacaucaaguucgccgacgaccucaaccagcugacgggguacaagaagccggcgagccgcgagcugaaggugaccuucuuccccgaccucaacggcgacguggucgccaucgacuacaagcacuacacccccuccuucaagaagggcgccaagcugcugcacaagcccaucguguggcacgugaacaacgccaccaacaaggcgacguacaagccgaacaccuggugcauccggugccucuggagcaccaagcccgucgagaccuccaacagcuucgacgugcugaaguccgaggacgcccaggggauggacaaccuggccugcgaggaccucaagcccgugagcgaggaggucguggagaaccccacgauccagaaggacgugcuggagugcaacgucaagaccaccgagguggugggcgacaucauccugaagccggccaacaacucccucaagaucaccgaggaggucgggcacacggaccugauggccgcguacguggacaacagcucccugaccaucaagaagcccaacgagcucagccgcgugcugggccugaagacccucgccacccacgggcuggccgccgucaacuccgugcccugggacacgaucgccaacuacgcgaagccguuccugaacaagguggucagcaccaccaccaacaucgugacgcgcugccucaaccgggugugcaccaacuacaugcccuacuucuucacccugcugcuccagcugugcaccuucacccgcuccacgaacagccggaucaaggccuccaugcccaccaccaucgccaagaacaccgucaagagcgugggcaaguucugccuggaggccagcuucaacuaccucaagucccccaacuucagcaagcugaucaacaucaucaucugguuccugcuccuguccgugugccugggcagccucaucuacuccacggccgcgcuggggguccugaugagcaaccucggcaugccguccuacugcaccggguaccgcgagggcuaccugaacagcaccaacgugaccaucgccacguacugcaccggcuccauccccugcagcgugugccuguccgggcucgacagccuggacaccuaccccucccuggagaccauccagaucacgaucagcuccuucaagugggaccucaccgccuucggccuggucgccgagugguuccuggccuacauccucuucacccgguucuucuacgugcuggggcuggcggccaucaugcagcucuucuucagcuacuucgccgugcacuucaucuccaacagcuggcugauguggcugaucaucaaccugguccagauggcccccaucuccgcgauggugcgcauguacaucuucuucgccagcuucuacuacguguggaagagcuacguccacgugguggacggcugcaacuccagcaccugcaugaugugcuacaagcggaaccgcgccacgcgggucgagugcaccaccaucgugaacgggguccgccgguccuucuacguguacgccaacggcggcaagggguucugcaagcuccacaacuggaacugcgugaacugcgacaccuucugcgccggcagcacguucaucuccgacgaggucgcgcgcgaccugagccugcaguucaagcggccgaucaaccccaccgaccaguccagcuacaucguggacuccgugaccgucaagaacgggagcauccaccucuacuucgacaaggccggccagaagaccuacgagcgccacucccugagccacuucgugaaccuggacaaccuccgggccaacaacacgaaggggucccugcccaucaacgugaucgucuucgacggcaagagcaagugcgaggaguccagcgcccgcuccgccagcguguacuacucccagcugaugugccagcccauccuccugcuggaccaggcgcucgugagcgacgucggcgacagcgccgagguggccgugaagauguucgacgccuacgucaacaccuucuccagcaccuucaacgugccgauggagaagcugaagacccugguggccacggcggaggccgagcucgccaagaacgucucccuggacaacgugcugagcaccuucaucuccgccgcgcggcagggguucguggacagcgacgucgagaccaaggacgugguggagugccucaagcugucccaccagagcgacaucgaggucaccggcgacuccugcaacaacuacaugcugacguacaacaagguggagaacaugaccccccgcgaccucggggccugcaucgacugcagcgcccggcacaucaacgcccagguggccaagucccacaacaucgcgcugaucuggaacgucaaggacuucaugagccuguccgagcagcuccgcaagcagauccgcagcgccgccaagaagaacaaccugcccuucaagcugaccugcgccaccacgcggcagguggugaacgucgugaccaccaagaucgcccucaagggcgggugaggacuaguuauaagacugacuagcccgaugggccucccaacgggcccuccuccccuccuugcaccgagauuaauaaaaaaaaaaaaaaaaaaaaaaaaaaaaaaaaaaaaaaaaaaaaaaaaaaaaaaaaaaaaaaaaugcaucccccccccccccccccccccccccccccccaaaggcucuuuucagagccaccagaauu

SEQ ID NO: 21443 - RNA, 6058 nt, Artificial Sequence
  SARS-CoV-2__MT873050.1__non-structural protein 3 (NSP3) mRNA gc
aggagaaagcuuaccauggcccccaccaaggugaccuucggcgacgacacggucaucgaggugcagggguacaagagcgugaacaucaccuucgagcuggacgagcgcaucgacaagguccucaacgagaagugcuccgccuacaccguggagcugggcaccgaggugaacgaguucgcgugcgucguggccgacgccgugaucaagacgcugcagccggucagcgagcuccugaccccccuggggaucgaccucgacgagugguccauggccaccuacuaccuguucgacgagagcggcgaguucaagcuggccucccacauguacugcagcuucuacccccccgacgaggacgaggaggagggggacugcgaggaggaggaguucgagccguccacccaguacgaguacggcacggaggacgacuaccagggcaagccccucgaguucggggcgaccagcgccgcccugcagcccgaggaggagcaggaggaggacuggcuggacgacgacucccagcagaccgugggccagcaggacgggagcgaggacaaccagaccacgaccauccagaccaucguggagguccagccccagcucgagauggagcugaccccgguggugcagacgaucgaggucaacuccuucagcggcuaccugaagcucaccgacaacguguacaucaagaacgccgacaucguggaggaggcgaagaaggucaagcccaccgugguggucaacgccgccaacguguaccugaagcacgggggcggcguggccggggcccugaacaaggcgaccaacaacgccaugcaggucgaguccgacgacuacaucgccacgaacggcccccucaagguggggggcagcugcguccuguccggccacaaccuggccaagcacugccuccacgugguggggcccaacgucaacaagggcgaggacauccagcugcugaagagcgccuacgagaacuucaaccagcacgaggugcuccuggcgccgcugcucuccgccgggaucuucggcgccgaccccauccacagccugcgggugugcgucgacaccgugcgcaccaacguguaccuggccgucuucgacaagaaccucuacgacaagcugguguccagcuuccuggagaugaagagcgagaagcagguggagcagaagaucgccgagauccucaaggaggaggucaagcccuucaucaccgaguccaagcccagcguggagcagcggaagcaggacgacaagaagaucaaggcgugcguggaggaggucacgaccacccuggaggagaccaaguuccugacggagaaccuccugcuguacaucgacaucaacgggaaccuccacccggacuccgccacccuggugagcgacaucgacaucaccuuccugaagaaggacgcccccuacaucgugggcgacgucgugcaggagggcgugcucaccgccgucgugauccccacgaagaaggccgggggcaccaccgagaugcuggcgaaggcccugcgcaaggugcccaccgacaacuacaucacgaccuacccggggcagggccucaacggguacaccgucgaggaggccaagaccgugcugaagaagugcaaguccgccuucuacauccugcccagcaucaucuccaacgagaagcaggagauccucggcaccgugagcuggaaccugcgggagaugcuggcgcacgccgaggagacgcgcaagcugaugcccgucugcguggagaccaaggccaucguguccaccauccagcggaaguacaagggcaucaagauccaggagggggucguggacuacggcgcccgcuucuacuucuacaccagcaagacgaccguggccucccucaucaacacccugaacgaccugaacgagacccucgucacgaugccccugggguacgugacccacggccugaaccucgaggaggcggcccgguacaugcgcagccugaaggugccggccaccgucuccgugagcucccccgacgccgugaccgccuacaacggguaccugacgagcuccagcaagacccccgaggagcacuucaucgagaccaucucccucgcgggcagcuacaaggacuggagcuacuccggccagagcacccagcuggggaucgaguuccugaagcggggcgacaaguccgucuacuacacgagcaaccccaccaccuuccaccucgacggggaggugaucaccuucgacaaccugaagacgcugcucucccugcgcgaggugcggaccaucaaggucuucaccaccguggacaacaucaaccugcacacgcagguggucgacaugagcaugaccuacggccagcaguucggcccgaccuaccucgacggggccgacgugaccaagaucaagccccacaacucccacgagggcaagacguucuacgugcugcccaacgacgacacccugcgcgucgaggccuucgaguacuaccacaccaccgacccgagcuuccucgggcgguacauguccgcccugaaccacacgaagaaguggaaguacccccaggugaacggccugaccagcaucaagugggccgacaacaacugcuaccucgcgaccgcccugcugacccuccagcagaucgagcugaaguucaacccccccgcccugcaggacgccuacuaccgcgcgcgggccggggaggccgccaacuucugcgcccucauccuggcguacugcaacaagacggugggcgagcugggcgacguccgcgagaccauguccuaccucuuccagcacgccaaccuggacagcugcaagcgggugcugaacgucgugugcaagaccugcgggcagcagcagaccacccucaagggcguggaggccgucauguacauggggacgcuguccuacgagcaguucaagaagggcgugcagaucccgugcaccugcgggaagcaggccaccaaguaccuggugcagcaggagagccccuucgucaugauguccgccccccccgcgcaguacgagcucaagcacggcaccuucacgugcgccagcgaguacaccggcaacuaccagugcgggcacuacaagcacaucaccuccaaggagacccuguacugcaucgacggcgcccugcucacgaagagcagcgaguacaaggggccgaucaccgacguguucuacaaggagaacuccuacaccaccacgaucaagcccgugaccuacaagcuggacggcgucgugugcaccgagaucgaccccaagcuggacaacuacuacaagaaggacaacagcuacuucaccgagcagcccaucgaccucgugccgaaccagcccuaccccaacgccuccuucgacaacuucaaguucgucugcgacaacaucaaguucgccgacgaccugaaccagcugacgggguacaagaagcccgcgagccgcgagcucaaggugaccuucuucccggaccugaacggcgacguggucgccaucgacuacaagcacuacacccccuccuucaagaagggcgccaagcugcuccacaagcccaucguguggcacgugaacaacgccaccaacaaggcgacguacaagcccaacaccuggugcauccggugccuguggagcaccaagccggucgagaccuccaacagcuucgacgugcugaaguccgaggacgcccaggggauggacaaccucgccugcgaggaccugaagcccgugagcgaggaggucguggagaaccccacgauccagaaggacgugcuggagugcaacgucaagaccaccgagguggugggcgacaucauccucaagcccgccaacaacucccugaagaucaccgaggaggucgggcacacggaccugauggccgcguacguggacaacagcucccucaccaucaagaagccgaacgagcugagccgcgugcugggccucaagacccuggccacccacgggcuggccgccgucaacuccgugcccugggacacgaucgccaacuacgcgaagcccuuccucaacaagguggucagcaccaccaccaacaucgugacgcgcugccugaaccgggugugcaccaacuacaugccguacuucuucacccugcuccugcagcugugcaccuucacccgcuccacgaacagccggaucaaggccuccaugcccaccaccaucgccaagaacaccgucaagagcgugggcaaguucugccucgaggccagcuucaacuaccugaagucccccaacuucagcaagcugaucaacaucaucaucugguuccuccugcuguccgugugccucggcagccugaucuacuccacggccgcgcuggggguccucaugagcaaccugggcaugcccuccuacugcaccggguaccgcgagggcuaccugaacagcaccaacgugaccaucgccacguacugcaccggcuccaucccgugcagcgugugccucuccgggcuggacagccuggacaccuaccccucccucgagaccauccagaucacgaucagcuccuucaagugggaccugaccgccuucggccuggucgccgagugguuccucgccuacauccuguucacccgguucuucuacgugcuggggcucgcggccaucaugcagcuguucuucagcuacuucgccgugcacuucaucuccaacagcuggcugauguggcugaucaucaaccucguccagauggcccccaucuccgcgauggugcgcauguacaucuucuucgccagcuucuacuacguguggaagagcuacguccacgugguggacggcugcaacuccagcaccugcaugaugugcuacaagcggaaccgcgccacgcgggucgagugcaccaccaucgugaacgggguccgccgguccuucuacguguacgccaacggcggcaagggguucugcaagcugcacaacuggaacugcgugaacugcgacaccuucugcgccggcagcacguucaucuccgacgaggucgcgcgcgaccugagccuccaguucaagcggcccaucaacccgaccgaccaguccagcuacaucguggacuccgugaccgucaagaacgggagcauccaccuguacuucgacaaggccggccagaagaccuacgagcgccacucccugagccacuucgugaaccucgacaaccugcgggccaacaacacgaaggggucccugcccaucaacgugaucgucuucgacggcaagagcaagugcgaggaguccagcgccaaguccgccagcguguacuacucccagcucaugugccagcccauccugcugcucgaccaggcgcuggugagcgacgucggcgacagcgccgagguggccgugaagauguucgacgccuacgucaacaccuucuccagcaccuucaacgugcccauggagaagcugaagacccucguggccacggcggaggccgagcuggccaagaacgucucccuggacaacgugcucagcaccuucaucuccgccgcgcgccagggguucguggacagcgacgucgagaccaaggacgugguggagugccugaagcugucccaccagagcgacaucgaggucaccggcgacuccugcaacaacuacaugcucacguacaacaagguggagaacaugaccccgcgggaccugggggccugcaucgacugcagcgcccgccacaucaacgcccagguggccaagucccacaacaucgcgcugaucuggaacgucaaggacuucaugagccucuccgagcagcugcggaagcagauccgcagcgccgccaagaagaacaaccugcccuucaagcucaccugcgccaccacgcgccagguggugaacgucgugaccaccaagaucgcccugaagggcgggugaggacuaguuauaagacugacuagcccgaugggccucccaacgggcccuccuccccuccuugcaccgagauuaauaaaaaaaaaaaaaaaaaaaaaaaaaaaaaaaaaaaaaaaaaaaaaaaaaaaaaaaaaaaaaaaaugcaucccccccccccccccccccccccccccccccaaaggcucuuuucagagccaccagaauu

SEQ ID NO: 21444 - RNA, 6058 nt, Artificial Sequence
  SARS-CoV-2__MT873051.1__non-structural protein 3 (NSP3) mRNA gc
aggagaaagcuuaccauggcccccaccaaggugaccuucggcgacgacacggucaucgaggugcagggguacaagagcgugaacaucaccuucgagcuggacgagcgcaucgacaagguccucaacgagaagugcuccgccuacaccguggagcugggcaccgaggugaacgaguucgcgugcgucguggccgacgccgugaucaagacgcugcagccggucagcgagcuccugaccccccuggggaucgaccucgacgagugguccauggccaccuacuaccuguucgacgagagcggcgaguucaagcuggccucccacauguacugcagcuucuacccccccgacgaggacgaggaggagggggacugcgaggaggaggaguucgagccguccacccaguacgaguacggcacggaggacgacuaccagggcaagccccucgaguucggggcgaccagcgccgcccugcagcccgaggaggagcaggaggaggacuggcuggacgacgacucccagcagaccgugggccagcaggacgggagcgaggacaaccagaccacgaccauccagaccaucguggagguccagccccagcucgagauggagcugaccccgguggugcagacgaucgaggucaacuccuucagcggcuaccugaagcucaccgacaacguguacaucaagaacgccgacaucguggaggaggcgaagaaggucaagcccaccgugguggucaacgccgccaacguguaccugaagcacgggggcggcguggccggggcccugaacaaggcgaccaacaacgccaugcaggucgaguccgacgacuacaucgccacgaacggcccccucaagguggggggcagcugcguccuguccggccacaaccuggccaagcacugccuccacgugguggggcccaacgucaacaagggcgaggacauccagcugcugaagagcgccuacgagaacuucaaccagcacgaggugcuccuggcgccgcugcucuccgccgggaucuucggcgccgaccccauccacagccugcgggugugcgucgacaccgugcgcaccaacguguaccuggccgucuucgacaagaaccucuacgacaagcugguguccagcuuccuggagaugaagagcgagaagcagguggagcagaagaucgccgagauccccaaggaggaggucaagcccuucaucaccgaguccaagccgagcguggagcagcggaagcaggacgacaagaagaucaaggcgugcguggaggaggucacgaccacccucgaggagaccaaguuccugacggagaaccugcuccuguacaucgacaucaacgggaaccugcaccccgacuccgccacccucgugagcgacaucgacaucaccuuccugaagaaggacgcccccuacaucgugggcgacgucgugcaggagggcgugcugaccgccgucgugauccccacgaagaaggccgggggcaccaccgagaugcucgcgaaggcccugcgcaaggugccgaccgacaacuacaucacgaccuaccccgggcagggccugaacggguacaccgucgaggaggccaagaccgugcucaagaagugcaaguccgccuucuacauccugcccagcaucaucuccaacgagaagcaggagauccugggcaccgugagcuggaaccuccgggagaugcuggcgcacgccgaggagacgcgcaagcugaugcccgucugcguggagaccaaggccaucguguccaccauccagcggaaguacaagggcaucaagauccaggagggggucguggacuacggcgcccgcuucuacuucuacaccagcaagacgaccguggccucccugaucaacacccucaacgaccugaacgagacccuggucacgaugccgcucggguacgugacccacggccugaaccuggaggaggcggcccgguacaugcgcagccucaaggugcccgccaccgucuccgugagcucccccgacgccgugaccgccuacaacggguaccugacgagcuccagcaagacccccgaggagcacuucaucgagaccaucucccuggcgggcagcuacaaggacuggagcuacuccggccagagcacccagcucgggaucgaguuccugaagcggggcgacaaguccgucuacuacacgagcaacccgaccaccuuccaccuggacggggaggugaucaccuucgacaaccucaagacgcugcugucccuccgcgaggugcggaccaucaaggucuucaccaccguggacaacaucaaccugcacacgcagguggucgacaugagcaugaccuacggccagcaguucggccccaccuaccuggacggggccgacgugaccaagaucaagccccacaacucccacgagggcaagacguucuacgugcucccgaacgacgacacccugcgcgucgaggccuucgaguacuaccacaccaccgaccccagcuuccuggggcgguacauguccgcccucaaccacacgaagaaguggaaguacccccaggugaacggccugaccagcaucaagugggccgacaacaacugcuaccuggcgaccgcccuccugacccugcagcagaucgagcucaaguucaaccccccggcccugcaggacgccuacuaccgcgcgcgggccggggaggccgccaacuucugcgcccugauccucgcguacugcaacaagacggugggcgagcugggcgacguccgcgagaccauguccuaccuguuccagcacgccaaccucgacagcugcaagcgggugcugaacgucgugugcaagaccugcgggcagcagcagaccacccugaagggcguggaggccgucauguacauggggacgcucuccuacgagcaguucaagaagggcgugcagauccccugcaccugcgggaagcaggccaccaaguaccuggugcagcaggagagccccuucgucaugauguccgcccccccggcgcaguacgagcugaagcacggcaccuucacgugcgccagcgaguacaccggcaacuaccagugcgggcacuacaagcacaucaccuccaaggagacccucuacugcaucgacggcgcccugcugacgaagagcagcgaguacaaggggcccaucaccgacguguucuacaaggagaacuccuacaccaccacgaucaagcccgugaccuacaagcucgacggcgucgugugcaccgagaucgaccccaagcuggacaacuacuacaagaaggacaacagcuacuucaccgagcagccgaucgaccuggugcccaaccagcccuaccccaacgccuccuucgacaacuucaaguucgucugcgacaacaucaaguucgccgacgaccucaaccagcugacgggguacaagaagccggcgagccgcgagcugaaggugaccuucuuccccgaccucaacggcgacguggucgccaucgacuacaagcacuacacccccuccuucaagaagggcgccaagcugcugcacaagcccaucguguggcacgugaacaacgccaccaacaaggcgacguacaagccgaacaccuggugcauccggugccucuggagcaccaagcccgucgagaccuccaacagcuucgacgugcugaaguccgaggacgcccaggggauggacaaccuggccugcgaggaccucaagcccgugagcgaggaggucguggagaaccccacgauccagaaggacgugcuggagugcaacgucaagaccaccgagguggugggcgacaucauccugaagccggccaacaacucccucaagaucaccgaggaggucgggcacacggaccugauggccgcguacguggacaacagcucccugaccaucaagaagcccaacgagcucagccgcgugcugggccugaagacccucgccacccacgggcuggccgccgucaacuccgugcccugggacacgaucgccaacuacgcgaagccguuccugaacaagguggucagcaccaccaccaacaucgugacgcgcugccucaaccgggugugcaccaacuacaugcccuacuucuucacccugcugcuccagcugugcaccuucacccgcuccacgaacagccggaucaaggccuccaugcccaccaccaucgccaagaacaccgucaagagcgugggcaaguucugccuggaggccagcuucaacuaccucaagucccccaacuucagcaagcugaucaacaucaucaucugguuccugcuccuguccgugugccugggcagccucaucuacuccacggccgcgcuggggguccugaugagcaaccucggcaugccguccuacugcaccggguaccgcgagggcuaccugaacagcaccaacgugaccaucgccacguacugcaccggcuccauccccugcagcgugugccuguccgggcucgacagccuggacaccuaccccucccuggagaccauccagaucacgaucagcuccuucaagugggaccucaccgccuucggccuggucgccgagugguuccuggccuacauccucuucacccgguucuucuacgugcuggggcuggcggccaucaugcagcucuucuucagcuacuucgccgugcacuucaucuccaacagcuggcugauguggcugaucaucaaccugguccagauggcccccaucuccgcgauggugcgcauguacaucuucuucgccagcuucuacuacguguggaagagcuacguccacgugguggacggcugcaacuccagcaccugcaugaugugcuacaagcggaaccgcgccacgcgggucgagugcaccaccaucgugaacgggguccgccgguccuucuacguguacgccaacggcggcaagggguucugcaagcuccacaacuggaacugcgugaacugcgacaccuucugcgccggcagcacguucaucuccgacgaggucgcgcgcgaccugagccugcaguucaagcggccgaucaaccccaccgaccaguccagcuacaucguggacuccgugaccgucaagaacgggagcauccaccucuacuucgacaaggccggccagaagaccuacgagcgccacucccugagccacuucgugaaccuggacaaccuccgggccaacaacacgaaggggucccugcccaucaacgugaucgucuucgacggcaagagcaagugcgaggaguccagcgccaaguccgccagcguguacuacucccagcugaugugccagcccauccuccugcuggaccaggcgcucgugagcgacgucggcgacagcgccgagguggccgugaagauguucgacgccuacgucaacaccuucuccagcaccuucaacgugccgauggagaagcugaagacccugguggccacggcggaggccgagcucgccaagaacgucucccuggacaacgugcugagcaccuucaucuccgccgcgcgccagggguucguggacagcgacgucgagaccaaggacgugguggagugccucaagcugucccaccagagcgacaucgaggucaccggcgacuccugcaacaacuacaugcugacguacaacaagguggagaacaugaccacccgggaccucggggccugcaucgacugcagcgcccgccacaucaacgcccagguggccaagucccacaacaucgcgcugaucuggaacgucaaggacuucaugagccuguccgagcagcuccggaagcagauccgcagcgccgccaagaagaacaaccugcccuucaagcugaccugcgccacgacccgccagguggugaacgucgugaccaccaagaucgcccucaagggcgggugaggacuaguuauaagacugacuagcccgaugggccucccaacgggcccuccuccccuccuugcaccgagauuaauaaaaaaaaaaaaaaaaaaaaaaaaaaaaaaaaaaaaaaaaaaaaaaaaaaaaaaaaaaaaaaaaugcaucccccccccccccccccccccccccccccccaaaggcucuuuucagagccaccagaauu

SEQ ID NO: 21445 - RNA, 6058 nt, Artificial Sequence
  SARS-CoV-2__MT873064.1__non-structural protein 3 (NSP3) mRNA gc
aggagaaagcuuaccauggcccccaccaaggugaccuucggcgacgacacggucaucgaggugcagggguacaagagcgugaacaucaccuucgagcuggacgagcgcaucgacaagguccucaacgagaagugcuccgccuacaccguggagcugggcaccgaggugaacgaguucgcgugcgucguggccgacgccgugaucaagacgcugcagccggucagcgagcuccugaccccccuggggaucgaccucgacgagugguccauggccaccuacuaccuguucgacgagagcggcgaguucaagcuggccucccacauguacugcagcuucuacccccccgacgaggacgaggaggagggggacugcgaggaggaggaguucgagccguccacccaguacgaguacggcacggaggacgacuaccagggcaagccccucgaguucggggcgaccagcgccgcccugcagcccgaggaggagcaggaggaggacuggcuggacgacgacucccagcagaccgugggccagcaggacgggagcgaggacaaccagaccacgaccauccagaccaucguggagguccagccccagcucgagauggagcugaccccgguggugcagacgaucgaggucaacuccuucagcggcuaccugaagcucaccgacaacguguacaucaagaacgccgacaucguggaggaggcgaagaaggucaagcccaccgugguggucaacgccgccaacguguaccugaagcacgggggcggcguggccggggcccugaacaaggcgaccaacaacgccaugcaggucgaguccgacgacuacaucgccacgaacggcccccucaagguggggggcagcugcguccuguccggccacaaccuggccaagcacugccuccacgugguggggcccaacgucaacaagggcgaggacauccagcugcugaagagcgccuacgagaacuucaaccagcacgaggugcuccuggcgccgcugcucuccgccgggaucuucggcgccgaccccauccacagccugcgggugugcgucgacaccgugcgcaccaacguguaccuggccgucuucgacaagaaccucuacgacaagcugguguccagcuuccuggagaugaagagcgagaagcagguggagcagaagaucgccgagauccccaaggaggaggucaagcccuucaucaccgaguccaagccgagcguggagcagcggaagcaggacgacaagaagaucaaggcgugcguggaggaggucacgaccacccucgaggagaccaaguuccugacggagaaccugcuccuguacaucgacaucaacgggaaccugcaccccgacuccgccacccucgugagcgacaucgacaucaccuuccugaagaaggacgcccccuacaucgugggcgacgucgugcaggagggcgugcugaccgccgucgugauccccacgaagaaggccgggggcaccaccgagaugcucgcgaaggcccugcgcaaggugccgaccgacaacuacaucacgaccuaccccgggcagggccugaacggguacaccgucgaggaggccaagaccgugcucaagaagugcaaguccgccuucuacauccugcccagcaucaucuccaacgagaagcaggagauccugggcaccgugagcuggaaccuccgggagaugcuggcgcacgccgaggagacgcgcaagcugaugcccgucugcguggagaccaaggccaucguguccaccauccagcggaaguacaagggcaucaagauccaggagggggucguggacuacggcgcccgcuucuacuucuacaccagcaagacgaccguggccucccugaucaacacccucaacgaccugaacgagacccuggucacgaugccgcucggguacgugacccacggccugaaccuggaggaggcggcccgguacaugcgcagccucaaggugcccgccaccgucuccgugagcucccccgacgccgugaccgccuacaacggguaccugacgagcuccagcaagacccccgaggagcacuucaucgagaccaucucccuggcgggcagcuacaaggacuggagcuacuccggccagagcacccagcucgggaucgaguuccugaagcggggcgacaaguccgucuacuacacgagcaacccgaccaccuuccaccuggacggggaggugaucaccuucgacaaccucaagacgcugcugucccuccgcgaggugcggaccaucaaggucuucaccaccguggacaacaucaaccugcacacgcagguggucgacaugagcaugaccuacggccagcaguucggccccaccuaccuggacggggccgacgugaccaagaucaagccccacaacucccacgagggcaagacguucuacgugcucccgaacgacgacacccugcgcgucgaggccuucgaguacuaccacaccaccgaccccagcuuccuggggcgguacauguccgcccucaaccacacgaagaaguggaaguacccccaggugaacggccugaccagcaucaagugggccgacaacaacugcuaccuggcgaccgcccuccugacccugcagcagaucgagcucaaguucaaccccccggcccugcaggacgccuacuaccgcgcgcgggccggggaggccgccaacuucugcgcccugauccucgcguacugcaacaagacggugggcgagcugggcgacguccgcgagaccauguccuaccuguuccagcacgccaaccucgacagcugcaagcgggugcugaacgucgugugcaagaccugcgggcagcagcagaccacccugaagggcguggaggccgucauguacauggggacgcucuccuacgagcaguucaagaagggcgugcagauccccugcaccugcgggaagcaggccaccaaguaccuggugcagcaggagagccccuucgucaugauguccgcccccccggcgcaguacgagcugaagcacggcaccuucacgugcgccagcgaguacaccggcaacuaccagugcgggcacuacaagcacaucaccuccaaggagacccucuacugcaucgacggcgcccugcugacgaagagcagcgaguacaaggggcccaucaccgacguguucuacaaggagaacuccuacaccaccacgaucaagcccgugaccuacaagcucgacggcgucgugugcaccgagaucgaccccaagcuggacaacuacuacaagaaggacaacagcuacuucaccgagcagccgaucgaccuggugcccaaccagcccuaccccaacgccuccuucgacaacuucaaguucgucugcgacaacaucaaguucgccgacgaccucaaccagcugacgggguacaagaagccggcgagccgcgagcugaaggugaccuucuuccccgaccucaacggcgacguggucgccaucgacuacaagcacuacacccccuccuucaagaagggcgccaagcugcugcacaagcccaucguguggcacgugaacaacgccaccaacaaggcgacguacaagccgaacaccuggugcauccggugccucuggagcaccaagcccuucgagaccuccaacagcuucgacguccugaaguccgaggacgcccaggggauggacaaccuggccugcgaggaccucaagcccgugagcgaggagguggucgagaaccccacgauccagaaggacgugcuggagugcaacgugaagaccaccgaggucgugggcgacaucauccugaagccggccaacaacucccucaagaucaccgaggagguggggcacacggaccugauggccgcguacgucgacaacagcucccugaccaucaagaagcccaacgagcucagccgcgugcugggccugaagacccucgccacccacgggcuggccgccgugaacuccguccccugggacacgaucgccaacuacgcgaagccguuccugaacaagguggugagcaccaccaccaacaucgucacgcgcugccucaaccgggugugcaccaacuacaugcccuacuucuucacccugcugcuccagcugugcaccuucacccgcuccacgaacagccggaucaaggccuccaugcccaccaccaucgccaagaacaccgugaagagcgucggcaaguucugccuggaggccagcuucaacuaccucaagucccccaacuucagcaagcugaucaacaucaucaucugguuccugcuccuguccgugugccugggcagccucaucuacuccacggccgcgcugggggugcugaugagcaaccucggcaugccguccuacugcaccggguaccgcgagggcuaccugaacagcaccaacgucaccaucgccacguacugcaccggcuccauccccugcagcgugugccuguccgggcucgacagccuggacaccuaccccucccuggagaccauccagaucacgaucagcuccuucaagugggaccucaccgccuucggccugguggccgagugguuccuggccuacauccucuucacccgguucuucuacguccuggggcuggcggccaucaugcagcucuucuucagcuacuucgccgugcacuucaucuccaacagcuggcugauguggcugaucaucaaccuggugcagauggcccccaucuccgcgaugguccgcauguacaucuucuucgccagcuucuacuacguguggaagagcuacgugcacgucguggacggcugcaacuccagcaccugcaugaugugcuacaagcggaaccgcgccacgcggguggagugcaccaccaucgucaacggggugcgccgguccuucuacgucuacgccaacggcggcaagggguucugcaagcuccacaacuggaacugcgugaacugcgacaccuucugcgccggcagcacguucaucuccgacgagguggcgcgcgaccugagccugcaguucaagcggccgaucaaccccaccgaccaguccagcuacaucgucgacuccgugaccgugaagaacgggagcauccaccucuacuucgacaaggccggccagaagaccuacgagcgccacucccugagccacuucgucaaccuggacaaccuccgggccaacaacacgaaggggucccugcccaucaacgugaucguguucgacggcaagagcaagugcgaggaguccagcgccaaguccgccagcgucuacuacucccagcugaugugccagcccauccuccugcuggaccaggcgcucgugagcgacgugggcgacagcgccgaggucgccgugaagauguucgacgccuacgugaacaccuucuccagcaccuucaacgucccgauggagaagcugaagacccugguggccacggcggaggccgagcucgccaagaacgugucccuggacaacguccugagcaccuucaucuccgccgcgcgccagggguucguggacagcgacguggagaccaaggacgucguggagugccucaagcugucccaccagagcgacaucgaggugaccggcgacuccugcaacaacuacaugcugacguacaacaaggucgagaacaugaccccccgggaccucggggccugcaucgacugcagcgcccgccacaucaacgcccagguggccaagucccacaacaucgcgcugaucuggaacgugaaggacuucaugagccuguccgagcagcuccggaagcagauccgcagcgccgccaagaagaacaaccugcccuucaagcugaccugcgccaccacgcgccaggucgugaacguggucaccaccaagaucgcccucaagggcgggugaggacuaguuauaagacugacuagcccgaugggccucccaacgggcccuccuccccuccuugcaccgagauuaauaaaaaaaaaaaaaaaaaaaaaaaaaaaaaaaaaaaaaaaaaaaaaaaaaaaaaaaaaaaaaaaaugcaucccccccccccccccccccccccccccccccaaaggcucuuuucagagccaccagaauu

SEQ ID NO: 21446 - RNA, 6058 nt, Artificial Sequence
  SARS-CoV-2__MT873083.1__non-structural protein 3 (NSP3) mRNA gc
aggagaaagcuuaccauggcccccaccaaggugaccuucggcgacgacacggucaucgaggugcagggguacaagagcgugaacaucaccuucgagcuggacgagcgcaucgacaagguccucaacgagaagugcuccgccuacaccguggagcugggcaccgaggugaacgaguucgcgugcgucguggccgacgccgugaucaagacgcugcagccggucagcgagcuccugaccccccuggggaucgaccucgacgagugguccauggccaccuacuaccuguucgacgagagcggcgaguucaagcuggccucccacauguacugcagcuucuacccccccgacgaggacgaggaggagggggacugcgaggaggaggaguucgagccguccacccaguacgaguacggcacggaggacgacuaccagggcaagccccucgaguucggggcgaccagcgccgcccugcagcccgaggaggagcaggaggaggacuggcuggacgacgacucccagcagaccgugggccagcaggacgggagcgaggacaaccagaccacgaccauccagaccaucguggagguccagccccagcucgagauggagcugaccccgguggugcagacgaucgaggucaacuccuucagcggcuaccugaagcucaccgacaacguguacaucaagaacgccgacaucguggaggaggcgaagaaggucaagcccaccgugguggucaacgccgccaacguguaccugaagcacgggggcggcguggccggggcccugaacaaggcgaccaacaacgccaugcaggucgaguccgacgacuacaucgccacgaacggcccccucaagguggggggcagcugcguccuguccggccacaaccuggccaagcacugccuccacgugguggggcccaacgucaacaagggcgaggacauccagcugcugaagagcgccuacgagaacuucaaccagcacgaggugcuccuggcgccgcugcucuccgccgggaucuucggcgccgaccccauccacagccugcgggugugcgucgacaccgugcgcaccaacguguaccuggccgucuucgacaagaaccucuacgacaagcugguguccagcuuccuggagaugaagagcgagaagcagguggagcagaagaucgccgagauccccaaggaggaggucaagcccuucaucaccgaguccaagccgagcguggagcagcggaagcaggacgacaagaagaucaaggcgugcguggaggaggucacgaccacccucgaggagaccaaguuccugacggagaaccugcuccuguacaucgacaucaacgggaaccugcaccccgacuccgccacccucgugagcgacaucgacaucaccuuccugaagaaggacgcccccuacaucgugggcgacgucgugcaggagggcgugcugaccgccgucgugauccccacgaagaaggccgggggcaccaccgagaugcucgcgaaggcccugcgcaaggugccgaccgacaacuacaucacgaccuaccccgggcagggccugaacggguacaccgucgaggaggccaagaccaugcucaagaagugcaaguccgccuucuacauccugcccagcaucaucuccaacgagaagcaggagauccugggcaccgugagcuggaaccuccgggagaugcuggcgcacgccgaggagacgcgcaagcugaugcccgugugcgucgagaccaaggccaucguguccaccauccagcggaaguacaagggcaucaagauccaggaggggguggucgacuacggcgcccgcuucuacuucuacaccagcaagacgaccguggccucccugaucaacacccucaacgaccugaacgagacccuggugacgaugccgcucggguacgucacccacggccugaaccuggaggaggcggcccgguacaugcgcagccucaaggugcccgccaccguguccgucagcucccccgacgccgugaccgccuacaacggguaccugacgagcuccagcaagacccccgaggagcacuucaucgagaccaucucccuggcgggcagcuacaaggacuggagcuacuccggccagagcacccagcucgggaucgaguuccugaagcggggcgacaaguccguguacuacacgagcaacccgaccaccuuccaccuggacggggaggucaucaccuucgacaaccucaagacgcugcugucccuccgcgaggugcggaccaucaagguguucaccaccgucgacaacaucaaccugcacacgcaggugguggacaugagcaugaccuacggccagcaguucggccccaccuaccuggacggggccgacgucaccaagaucaagccccacaacucccacgagggcaagacguucuacgugcucccgaacgacgacacccugcgcguggaggccuucgaguacuaccacaccaccgaccccagcuuccuggggcgguacauguccgcccucaaccacacgaagaaguggaaguacccccaggucaacggccugaccagcaucaagugggccgacaacaacugcuaccuggcgaccgcccuccugacccugcagcagaucgagcucaaguucaaccccccggcccugcaggacgccuacuaccgcgcgcgggccggggaggccgccaacuucugcgcccugauccucgcguacugcaacaagacggugggcgagcugggcgacgugcgcgagaccauguccuaccuguuccagcacgccaaccucgacagcugcaagcggguccugaacguggucugcaagaccugcgggcagcagcagaccacccugaagggcguggaggccgugauguacauggggacgcucuccuacgagcaguucaagaagggcguccagauccccugcaccugcgggaagcaggccaccaaguaccuggugcagcaggagagccccuucgugaugauguccgcccccccggcgcaguacgagcugaagcacggcaccuucacgugcgccagcgaguacaccggcaacuaccagugcgggcacuacaagcacaucaccuccaaggagacccucuacugcaucgacggcgcccugcugacgaagagcagcgaguacaaggggcccaucaccgacgucuucuacaaggagaacuccuacaccaccacgaucaagcccgugaccuacaagcucgacggcguggucugcaccgagaucgaccccaagcuggacaacuacuacaagaaggacaacagcuacuucaccgagcagccgaucgaccuggugcccaaccagcccuaccccaacgccuccuucgacaacuucaaguucgugugcgacaacaucaaguucgccgacgaccucaaccagcugacgggguacaagaagccggcgagccgcgagcugaaggucaccuucuuccccgaccucaacggcgacgugguggccaucgacuacaagcacuacacccccuccuucaagaagggcgccaagcugcugcacaagcccaucgucuggcacgugaacaacgccaccaacaaggcgacguacaagccgaacaccuggugcauccggugccucuggagcaccaagcccguggagaccuccaacagcuucgacguccugaaguccgaggacgcccaggggauggacaaccuggccugcgaggaccucaagcccgugagcgaggagguggucgagaaccccacgauccagaaggacgugcuggagugcaacgugaagaccaccgaggucgugggcgacaucauccugaagccggccaacaacucccucaagaucaccgaggagguggggcacacggaccugauggccgcguacgucgacaacagcucccugaccaucaagaagcccaacgagcucagccgcgugcugggccugaagacccucgccacccacgggcuggccgccgugaacuccguccccugggacacgaucgccaacuacgcgaagccguuccugaacaagguggugagcaccaccaccaacaucgucacgcgcugccucaaccgggugugcaccaacuacaugcccuacuucuucacccugcugcuccagcugugcaccuucacccgcuccacgaacagccggaucaaggccuccaugcccaccaccaucgccaagaacaccgugaagagcgucggcaaguucugccuggaggccagcuucaacuaccucaagucccccaacuucagcaagcugaucaacaucaucaucugguuccugcuccuguccgugugccugggcagccucaucuacuccacggccgcgcugggggugcugaugagcaaccucggcaugccguccuacugcaccggguaccgcgagggcuaccugaacagcaccaacgucaccaucgccacguacugcaccggcuccauccccugcagcgugugccuguccgggcucgacagccuggacaccuaccccucccuggagaccauccagaucacgaucagcuccuucaagugggaccucaccgccuucggccugguggccgagugguuccuggccuacauccucuucacccgguucuucuacguccuggggcuggcggccaucaugcagcucuucuucagcuacuucgccgugcacuucaucuccaacagcuggcugauguggcugaucaucaaccuggugcagauggcccccaucuccgcgaugguccgcauguacaucuucuucgccagcuucuacuacguguggaagagcuacgugcacgucguggacggcugcaacuccagcaccugcaugaugugcuacaagcggaaccgcgccacgcggguggagugcaccaccaucgucaacggggugcgccgguccuucuacgucuacgccaacggcggcaagggguucugcaagcuccacaacuggaacugcgugaacugcgacaccuucugcgccggcagcacguucaucuccgacgagguggcgcgcgaccugagccugcaguucaagcggccgaucaaccccaccgaccaguccagcuacaucgucgacuccgugaccgugaagaacgggagcauccaccucuacuucgacaaggccggccagaagaccuacgagcgccacucccugagccacuucgucaaccuggacaaccuccgggccaacaacacgaaggggucccugcccaucaacgugaucguguucgacggcaagagcaagugcgaggaguccagcgccaaguccgccagcgucuacuacucccagcugaugugccagcccauccuccugcuggaccaggcgcucgugagcgacgugggcgacagcgccgaggucgccgugaagauguucgacgccuacgugaacaccuucuccagcaccuucaacgucccgauggagaagcugaagacccugguggccacggcggaggccgagcucgccaagaacgugucccuggacaacguccugagcaccuucaucuccgccgcgcgccagggguucguggacagcgacguggagaccaaggacgucguggagugccucaagcugucccaccagagcgacaucgaggugaccggcgacuccugcaacaacuacaugcugacguacaacaaggucgagaacaugaccccccgggaccucggggccugcaucgacugcagcgcccgccacaucaacgcccagguggccaagucccacaacaucgcgcugaucuggaacgugaaggacuucaugagccuguccgagcagcuccggaagcagauccgcagcgccgccaagaagaacaaccugcccuucaagcugaccugcgccaccacgcgccaggucgugaacguggucaccaccaagaucgcccucaagggcgggugaggacuaguuauaagacugacuagcccgaugggccucccaacgggcccuccuccccuccuugcaccgagauuaauaaaaaaaaaaaaaaaaaaaaaaaaaaaaaaaaaaaaaaaaaaaaaaaaaaaaaaaaaaaaaaaaugcaucccccccccccccccccccccccccccccccaaaggcucuuuucagagccaccagaauu

SEQ ID NO: 21447 - RNA, 6058 nt, Artificial Sequence
  SARS-CoV-2__MT873098.1__non-structural protein 3 (NSP3) mRNA gc
aggagaaagcuuaccauggcccccaccaaggugaccuucggcgacgacacggucaucgaggugcagggguacaagagcgugaacaucaccuucgagcuggacgagcgcaucgacaagguccucaacgagaagugcuccgccuacaccguggagcugggcaccgaggugaacgaguucgcgugcgucguggccgacgccgugaucaagacgcugcagccggucagcgagcuccugaccccccuggggaucgaccucgacgagugguccauggccaccuacuaccuguucgacgagagcggcgaguucaagcuggccucccacauguacugcagcuucuacccccccgacgaggacgaggaggagggggacugcgaggaggaggaguucgagccguccacccaguacgaguacggcacggaggacgacuaccagggcaagccccucgaguucggggcgaccagcgccgcccugcagcccgaggaggagcaggaggaggacuggcuggacgacgacucccagcagaccgugggccagcaggacgggagcgaggacaaccagaccacgaccauccagaccaucguggagguccagccccagcucgagauggagcugaccccgguggugcagacgaucgaggucaacuccuucagcggcuaccugaagcucaccgacaacguguacaucaagaacgccgacaucguggaggaggcgaagaaggucaagcccaccgugguggucaacgccgccaacguguaccugaagcacgggggcggcguggccggggcccugaacaaggcgaccaacaacgccaugcaggucgaguccgacgacuacaucgccacgaacggcccccucaagguggggggcagcugcguccuguccggccacaaccuggccaagcacugccuccacgugguggggcccaacgucaacaagggcgaggacauccagcugcugaagagcgccuacgagaacuucaaccagcacgaggugcuccuggcgccgcugcucuccgccgggaucuucggcgccgaccccauccacagccugcgggugugcgucgacaccgugcgcaccaacguguaccuggccgucuucgacaagaaccucuacgacaagcugguguccagcuuccuggagaugaagagcgagaagcagguggagcagaagaucgccgagauccccaaggaggaggucaagcccuucaucaccgaguccaagccgagcguggagcagcggaagcaggacgacaagaagaucaaggcgugcguggaggaggucacgaccacccucgaggagaccaaguuccugacggagaaccugcuccuguacaucgacaucaacgggaaccugcaccccgacuccgccacccucgugagcgacaucgacaucaccuuccugaagaaggacgcccccuacaucgugggcgacgucgugcaggagggcgugcugaccgccgucgugauccccacgaagaaggccgggggcaccaccgagaugcucgcgaaggcccugcgcaaggugccgaccgacaacuacaucacgaccuaccccgggcagggccugaacggguacaccgucgaggaggccaagaccgugcucaagaagugcaaguccgccuucuacauccugcccagcaucaucuccaacgagaagcaggagauccugggcaccgugagcuggaaccuccgggagaugcuggcgcacgccgaggagacgcgcaagcugaugcccgucugcguggagaccaaggccaucguguccaccauccagcggaaguacaagggcaucaagauccaggagggggucguggacuacggcgcccgcuucuacuucuacaccagcaagacgaccguggccucccugaucaacacccucaacgaccugaacgagacccuggucacgaugccgcucggguacgugacccacggccugaaccuggaggaggcggcccgguacaugcgcagccucaaggugcccgccaccgucuccgugagcucccccgacgccgugaccgccuacaacggguaccugacgagcuccagcaagacccccgaggagcacuucaucgagaccaucucccuggcgggcagcuacaaggacuggagcuacuccggccagagcacccagcucgggaucgaguuccugaagcggggcgacaaguccgucuacuacacgagcaacccgaccaccuuccaccuggacggggaggugaucaccuucgacaaccucaagacgcugcugucccuccgcgaggugcggaccaucaaggucuucaccaccguggacaacaucaaccugcacacgcagguggucgacaugagcaugaccuacggccagcaguucggccccaccuaccuggacggggccgacgugaccaagaucaagccccacaacucccacgagggcaagacguucuacgugcucccgaacgacgacacccugcgcgucgaggccuucgaguacuaccacaccaccgaccccagcuuccuggggcgguacauguccgcccucaaccacacgaagaaguggaaguacccccaggugaacggccugaccagcaucaagugggccgacaacaacugcuaccuggcgaccgcccuccugacccugcagcagaucgagcucaaguucaaccccccggcccugcaggacgccuacuaccgcgcgcgggccggggaggccgccaacuucugcgcccugauccucgcguacugcaacaagacggugggcgagcugggcgacguccgcgagaccauguccuaccuguuccagcacgccaaccucgacagcugcaagcgggugcugaacgucgugugcaagaccugcgggcagcagcagaccacccugaagggcguggaggccgucauguacauggggacgcucuccuacgagcaguucaagaagggcgugcagauccccugcaccugcgggaagcaggccaccaaguaccuggugcagcaggagagccccuucgucaugauguccgcccccccggcgcaguacgagcugaagcacggcaccuucacgugcgccagcgaguacaccggcaacuaccagugcgggcacuacaagcacaucaccuccaaggagacccucuacugcaucgacggcgcccugcugacgaagagcagcgaguacaaggggcccaucaccgacguguucuacaaggagaacuccuacaccaccacgaucaagcccgugaccuacaagcucgacggcgucgugugcaccgagaucgaccccaagcuggacaacuacuacaagaaggacaacagcuacuucaccgagcagccgaucgaccuggugcccaaccagcccuaccccaacgccuccuucgacaacuucaaguucgucugcgacaacaucaaguucgccgacgaccucaaccagcugacgggguacaagaagccggcgagccgcgagcugaaggugaccuucuuccccgaccucaacggcgacguggucgccaucgacuacaagcacuacacccccuccuucaagaagggcgccaagcugcugcacaagcccaucguguggcacgugaacaacgccaccaacaaggcgacguacaagccgaacaccuggugcauccggugccucuggagcaccaagcccgucgagaccuccaacagcuucgacgugcugaaguccgaggacgcccaggggauggacaaccuggccugcgaggaccucaagcccgugagcgaggaggucguggagaaccccacgauccagaaggacgugcuggagugcaacgucaagaccaccgagguggugggcgacaucauccugaagccggccaacaacucccucaagaucaccgaggaggucgggcacacggaccugauggccgcguacguggacaacagcucccugaccaucaagaagcccaacgagcucagccgcgugcugggccugaagacccucgccacccacgggcuggccgccgucaacuccgugcccugggacacgaucgccaacuacgcgaagccguuccugaacaagguggucagcaccaccaccaacaucgugacgcgcugccucaaccgggugugcaccaacuacaugcccuacuucuucacccugcugcuccagcugugcaccuucacccgcuccacgaacagccggaucaaggccuccaugcccaccaccaucgccaagaacaccgucaagagcgugggcaaguucugccuggaggccagcuucaacuaccucaagucccccaacuucagcaagcugaucaacaucaucaucugguuccugcuccuguccgugugccugggcagccucaucuacuccacggccgcgcuggggguccugaugagcaaccucggcaugccguccuacugcaccggguaccgcgagggcuaccugaacagcaccaacgugaccaucgccacguacugcaccggcuccauccccugcagcgugugccuguccgggcucgacagccuggacaccuaccccucccuggagaccauccagaucacgaucagcuccuucaagugggaccucaccgccuucggccuggucgccgagugguuccuggccuacauccucuucacccgguucuucuacgugcuggggcuggcggccaucaugcagcucuucuucagcuacuucgccgugcacuucaucuccaacagcuggcugauguggcugaucaucaaccugguccagauggcccccaucuccgcgauggugcgcauguacaucuucuucgccagcuucuacuacguguggaagagcuacguccacgugguggacggcugcaacuccagcaccugcaugaugugcuacaagcggaaccgcgccacgcgggucgagugcaccaccaucgugaacgggguccgccgguccuucuacguguacgccaacggcggcaagggguucugcaagcuccacaacuggaacugcgugaacugcgacaccuucugcgccggcagcacguucaucuccgacgaggucgcgcgcgaccugagccugcaguucaagcggccgaucaaccccaccgaccaguccagcuacaucguggacuccgugaccgucaagaacgggagcauccaccucuacuucgacaaggccggccagaagaccuacgagcgccacucccugagccacuucgugaaccuggacaaccuccgggccaacaacacgaaggggucccugcccaucaacgugaucgucuucgacggcaagagcaagugcgaggaguccagcgccaaguccgccagcguguacuacucccagcugaugugccagcccauccuccugcuggaccaggcgcucgugagcgacgucggcgacagcgccgagguggccgugaagauguucgacgccuacgucaacaccuucuccagcaccuucaacgugccgauggagaagcugaagacccugguggccacggcggaggccgagcucgccaagaacgucucccuggacaacgugcugagcaccuucaucuccgccgcgcgccagggguucguggacagcgacgucgagaccaaggacgugguggagugccucaaguucucccaccagagcgacaucgaggucaccggcgacuccugcaacaacuacaugcugacguacaacaagguggagaacaugaccccccgggaccugggggccugcaucgacugcagcgcccgccacaucaacgcccagguggccaagucccacaacaucgcgcucaucuggaacgucaaggacuucaugagccuguccgagcagcugcggaagcagauccgcagcgccgccaagaagaacaaccuccccuucaagcugaccugcgccaccacgcgccagguggugaacgucgugaccaccaagaucgcccugaagggcgggugaggacuaguuauaagacugacuagcccgaugggccucccaacgggcccuccuccccuccuugcaccgagauuaauaaaaaaaaaaaaaaaaaaaaaaaaaaaaaaaaaaaaaaaaaaaaaaaaaaaaaaaaaaaaaaaaugcaucccccccccccccccccccccccccccccccaaaggcucuuuucagagccaccagaauu

SEQ ID NO: 21448 - RNA, 6058 nt, Artificial Sequence
  SARS-CoV-2__MT873131.1__non-structural protein 3 (NSP3) mRNA gc
aggagaaagcuuaccauggcccccaccaaggugaccuucggcgacgacacggucaucgaggugcagggguacaagagcgugaacaucaccuucgagcuggacgagcgcaucgacaagguccucaacgagaagugcuccgccuacaccguggagcugggcaccgaggugaacgaguucgcgugcgucguggccgacgccgugaucaagacgcugcagccggucagcgagcuccugaccccccuggggaucgaccucgacgagugguccauggccaccuacuaccuguucgacgagagcggcgaguucaagcuggccucccacauguacugcagcuucuacccccccgacgaggacgaggaggagggggacugcgaggaggaggaguucgagccguccacccaguacgaguacggcacggaggacgacuaccagggcaagccccucgaguucggggcgaccagcgccgcccugcagcccgaggaggagcaggaggaggacuggcuggacgacgacucccagcagaccgugggccagcaggacgggagcgaggacaaccagaccacgaccauccagaccaucguggagguccagccccagcucgagauggagcugaccccgguggugcagacgaucgaggucaacuccuucagcggcuaccugaagcucaccgacaacguguacaucaagaacgccgacaucguggaggaggcgaagaaggucaagcccaccgugguggucaacgccgccaacguguaccugaagcacgggggcggcguggccggggcccugaacaaggcgaccaacaacgccaugcaggucgaguccgacgacuacaucgccacgaacggcccccucaagguggggggcagcugcguccuguccggccacaaccuggccaagcacugccuccacgugguggggcccaacgucaacaagggcgaggacauccagcugcugaagaucgccuacgagaacuucaaccagcacgaggugcuccuggcgccgcugcucagcgccgggaucuucggcgccgaccccauccacucccugcgggugugcgucgacaccgugcgcaccaacguguaccuggccgucuucgacaagaaccucuacgacaagcuggugagcuccuuccuggagaugaagagcgagaagcagguggagcagaagaucgccgagauccccaaggaggaggucaagcccuucaucaccgagagcaagccguccguggagcagcggaagcaggacgacaagaagaucaaggcgugcguggaggaggucacgaccacccucgaggagaccaaguuccugacggagaaccugcuccuguacaucgacaucaacgggaaccugcaccccgacagcgccacccucguguccgacaucgacaucaccuuccugaagaaggacgcccccuacaucgugggcgacgucgugcaggagggcgugcugaccgccgucgugauccccacgaagaaggccgggggcaccaccgagaugcucgcgaaggcccugcgcaaggugccgaccgacaacuacaucacgaccuaccccgggcagggccugaacggguacaccgucgaggaggccaagaccgugcucaagaagugcaagagcgccuucuacauccugcccuccaucaucagcaacgagaagcaggagauccugggcaccguguccuggaaccuccgggagaugcuggcgcacgccgaggagacgcgcaagcugaugcccgucugcguggagaccaaggccaucgugagcaccauccagcggaaguacaagggcaucaagauccaggagggggucguggacuacggcgcccgcuucuacuucuacaccuccaagacgaccguggccagccugaucaacacccucaacgaccugaacgagacccuggucacgaugccgcucggguacgugacccacggccugaaccuggaggaggcggcccgguacaugcgcucccucaaggugcccgccaccgucagcguguccagccccgacgccgugaccgccuacaacggguaccugacguccagcuccaagacccccgaggagcacuucaucgagaccaucagccuggcgggcuccuacaaggacuggagcuacagcggccaguccacccagcucgggaucgaguuccugaagcggggcgacaagagcgucuacuacacguccaacccgaccaccuuccaccuggacggggaggugaucaccuucgacaaccucaagacgcugcugagccuccgcgaggugcggaccaucaaggucuucaccaccguggacaacaucaaccugcacacgcagguggucgacauguccaugaccuacggccagcaguucggccccaccuaccuggacggggccgacgugaccaagaucaagccccacaacagccacgagggcaagacguucuacgugcucccgaacgacgacacccugcgcgucgaggccuucgaguacuaccacaccaccgaccccuccuuccuggggcgguacaugagcgcccucaaccacacgaagaaguggaaguacccccaggugaacggccugaccuccaucaagugggccgacaacaacugcuaccuggcgaccgcccuccugacccugcagcagaucgagcucaaguucaaccccccggcccugcaggacgccuacuaccgcgcgcgggccggggaggccgccaacuucugcgcccugauccucgcguacugcaacaagacggugggcgagcugggcgacguccgcgagaccaugagcuaccuguuccagcacgccaaccucgacuccugcaagcgggugcugaacgucgugugcaagaccugcgggcagcagcagaccacccugaagggcguggaggccgucauguacauggggacgcucagcuacgagcaguucaagaagggcgugcagauccccugcaccugcgggaagcaggccaccaaguaccuggugcagcaggagucccccuucgucaugaugagcgcccccccggcgcaguacgagcugaagcacggcaccuucacgugcgccuccgaguacaccggcaacuaccagugcgggcacuacaagcacaucaccagcaaggagacccucuacugcaucgacggcgcccugcugacgaaguccagcgaguacaaggggcccaucaccgacguguucuacaaggagaacagcuacaccaccacgaucaagcccgugaccuacaagcucgacggcgucgugugcaccgagaucgaccccaagcuggacaacuacuacaagaaggacaacuccuacuucaccgagcagccgaucgaccuggugcccaaccagcccuaccccaacgccagcuucgacaacuucaaguucgucugcgacaacaucaaguucgccgacgaccucaaccagcugacgggguacaagaagccggcgucccgcgagcugaaggugaccuucuuccccgaccucaacggcgacguggucgccaucgacuacaagcacuacacccccagcuucaagaagggcgccaagcugcugcacaagcccaucguguggcacgugaacaacgccaccaacaaggcgacguacaagccgaacaccuggugcauccggugccucugguccaccaagcccgucgagaccagcaacuccuucgacgugcugaagagcgaggacgcccaggggauggacaaccuggccugcgaggaccucaagcccguguccgaggaggucguggagaaccccacgauccagaaggacgugcuggagugcaacgucaagaccaccgagguggugggcgacaucauccugaagccggccaacaacagccucaagaucaccgaggaggucgggcacacggaccugauggccgcguacguggacaacuccagccugaccaucaagaagcccaacgagcucucccgcgugcugggccugaagacccucgccacccacgggcuggccgccgucaacagcgugcccugggacacgaucgccaacuacgcgaagccguuccugaacaagguggucuccaccaccaccaacaucgugacgcgcugccucaaccgggugugcaccaacuacaugcccuacuucuucacccugcugcuccagcugugcaccuucacccgcagcacgaacucccggaucaaggccagcaugcccaccaccaucgccaagaacaccgucaaguccgugggcaaguucugccuggaggccagcuucaacuaccucaagagccccaacuucuccaagcugaucaacaucaucaucugguuccugcuccugagcgugugccugggcucccucaucuacagcacggccgcgcuggggguccugauguccaaccucggcaugccgagcuacugcaccggguaccgcgagggcuaccugaacuccaccaacgugaccaucgccacguacugcaccggcagcauccccugcuccgugugccugagcgggcucgacucccuggacaccuaccccagccuggagaccauccagaucacgaucuccagcuucaagugggaccucaccgccuucggccuggucgccgagugguuccuggccuacauccucuucacccgguucuucuacgugcuggggcuggcggccaucaugcagcucuucuucuccuacuucgccgugcacuucaucagcaacuccuggcugauguggcugaucaucaaccugguccagauggcccccaucagcgcgauggugcgcauguacaucuucuucgccuccuucuacuacguguggaagagcuacguccacgugguggacggcugcaacagcuccaccugcaugaugugcuacaagcggaaccgcgccacgcgggucgagugcaccaccaucgugaacgggguccgccggagcuucuacguguacgccaacggcggcaagggguucugcaagcuccacaacuggaacugcgugaacugcgacaccuucugcgccggcuccacguucaucagcgacgaggucgcgcgcgaccugucccugcaguucaagcggccgaucaaccccaccgaccagagcuccuacaucguggacagcgugaccgucaagaacggguccauccaccucuacuucgacaaggccggccagaagaccuacgagcgccacagccugucccacuucgugaaccuggacaaccuccgggccaacaacacgaaggggagccugcccaucaacgugaucgucuucgacggcaaguccaagugcgaggagagcuccgccaagagcgccuccguguacuacagccagcugaugugccagcccauccuccugcuggaccaggcgcucguguccgacgucggcgacagcgccgagguggccgugaagauguucgacgccuacgucaacaccuucagcuccaccuucaacgugccgauggagaagcugaagacccugguggccacggcggaggccgagcucgccaagaacgucagccuggacaacgugcuguccaccuucaucagcgccgcgcgccagggguucguggacuccgacgucgagaccaaggacgugguggagugccucaagcugagccaccaguccgacaucgaggucaccggcgacagcugcaacaacuacaugcugacguacaacaagguggagaacaugaccccccgggaccucggggccugcaucgacugcuccgcccgccacaucaacgcccagguggccaagagccacaacaucgcgcugaucuggaacgucaaggacuucaugucccugagcgagcagcuccggaagcagauccgcuccgccgccaagaagaacaaccugcccuucaagcugaccugcgccaccacgcgccagguggugaacgucgugaccaccaagaucgcccucaagggcgggugaggacuaguuauaagacugacuagcccgaugggccucccaacgggcccuccuccccuccuugcaccgagauuaauaaaaaaaaaaaaaaaaaaaaaaaaaaaaaaaaaaaaaaaaaaaaaaaaaaaaaaaaaaaaaaaaugcaucccccccccccccccccccccccccccccccaaaggcucuuuucagagccaccagaauu

SEQ ID NO: 21449 - RNA, 6058 nt, Artificial Sequence
  SARS-CoV-2__MT873132.1__non-structural protein 3 (NSP3) mRNA gc
aggagaaagcuuaccauggcccccaccaaggugaccuucggcgacgacacggucaucgaggugcagggguacaagagcgugaacaucaccuucgagcuggacgagcgcaucgacaagguccucaacgagaagugcuccgccuacaccguggagcugggcaccgaggugaacgaguucgcgugcgucguggccgacgccgugaucaagacgcugcagccggucagcgagcuccugaccccccuggggaucgaccucgacgagugguccauggccaccuacuaccuguucgacgagagcggcgaguucaagcuggccucccacauguacugcagcuucuacccccccgacgaggacgaggaggagggggacugcgaggaggaggaguucgagccguccacccaguacgaguacggcacggaggacgacuaccagggcaagccccucgaguucggggcgaccagcgccgcccugcagcccgaggaggagcaggaggaggacuggcuggacgacgacucccagcagaccgugggccagcaggacgggagcgaggacaaccagaccacgaccauccagaccaucguggagguccagccccagcucgagauggagcugaccccgguggugcagacgaucgaggucaacuccuucagcggcuaccugaagcucaccgacaacguguacaucaagaacgccgacaucguggaggaggcgaagaaggucaagcccaccgugguggucaacgccgccaacguguaccugaagcacgggggcggcguggccggggcccugaacaaggcgaccaacaacgccaugcaggucgaguccgacgacuacaucgccacgaacggcccccucaagguggggggcagcugcguccuguccggccacaaccuggccaagcacugccuccacgugguggggcccaacgucaacaagggcgaggacauccagcugcugaagagcgccuacgagaacuucaaccagcacgaggugcuccuggcgccgcugcucuccgccgggaucuucggcgccgaccccauccacagccugcgggugugcgucgacaccgugcgcaccaacguguaccuggccgucuucgacaagaaccucuacgacaagcugguguccagcuuccuggagaugaagagcgagaagcagguggagcagaagaucgccgagauccccaaggaggaggucaagcccuucaucaccgaguccaagccgagcguggagcagcggaagcaggacgacaagaagaucaaggcgugcguggaggaggucacgaccacccucgaggagaccaaguuccugacggagaaccugcuccuguacaucgacaucaacgggaaccugcaccccgacuccgccacccucgugagcgacaucgacaucaccuuccugaagaaggacucccccuacaucgugggcgacgucgugcaggagggcgugcugaccgccgucgugauccccacgaagaaggccgggggcaccaccgagaugcucgccaaggcgcugcgcaaggugccgaccgacaacuacaucacgaccuaccccgggcagggccugaacggguacaccgucgaggaggccaagaccgugcucaagaagugcaagagcgccuucuacauccugcccuccaucaucagcaacgagaagcaggagauccugggcaccguguccuggaaccuccgggagaugcuggcccacgcggaggagacgcgcaagcugaugcccgucugcguggagaccaaggccaucgugagcaccauccagcggaaguacaagggcaucaagauccaggagggggucguggacuacggcgcccgcuucuacuucuacaccuccaagacgaccguggccagccugaucaacacccucaacgaccugaacgagacccuggucacgaugccgcucggguacgugacccacggccugaaccuggaggaggccgcgcgguacaugcgcucccucaaggugcccgccaccgucagcguguccagccccgacgccgugaccgccuacaacggguaccugacguccagcuccaagacccccgaggagcacuucaucgagaccaucagccuggccggcagcuacaaggacugguccuacagcggccaguccacccagcucgggaucgaguuccugaagcggggcgacaagagcgucuacuacacguccaacccgaccaccuuccaccuggacggggaggugaucaccuucgacaaccucaagacgcugcugagccuccgcgaggugcggaccaucaaggucuucaccaccguggacaacaucaaccugcacacgcagguggucgacauguccaugaccuacggccagcaguucggccccaccuaccuggacggggcggacgugaccaagaucaagccccacaacagccacgagggcaagacguucuacgugcucccgaacgacgacacccugcgcgucgaggccuucgaguacuaccacaccaccgaccccuccuuccuggggcgguacaugagcgcccucaaccacacgaagaaguggaaguacccccaggugaacggccugaccuccaucaagugggccgacaacaacugcuaccuggccaccgcgcuccugacccugcagcagaucgagcucaaguucaaccccccggcccugcaggacgccuacuaccgcgcccgggcgggggaggccgccaacuucugcgcccugauccucgccuacugcaacaagacggugggcgagcugggcgacguccgcgagaccaugagcuaccuguuccagcacgcgaaccucgacuccugcaagcgggugcugaacgucgugugcaagaccugcgggcagcagcagaccacccugaagggcguggaggccgucauguacauggggacgcucagcuacgagcaguucaagaagggcgugcagauccccugcaccugcgggaagcaggccaccaaguaccuggugcagcaggagucccccuucgucaugaugagcgcccccccggcccaguacgagcugaagcacggcaccuucacgugcgcguccgaguacaccggcaacuaccagugcgggcacuacaagcacaucaccagcaaggagacccucuacugcaucgacggcgcccugcugacgaagagcuccgaguacaaggggcccaucaccgacguguucuacaaggagaacagcuacaccaccacgaucaagcccgugaccuacaagcucgacggcgucgugugcaccgagaucgaccccaagcuggacaacuacuacaagaaggacaacuccuacuucaccgagcagccgaucgaccuggugcccaaccagcccuaccccaacgccagcuucgacaacuucaaguucgucugcgacaacaucaaguucgccgacgaccucaaccagcugacgggguacaagaagccggccucccgcgagcugaaggugaccuucuuccccgaccucaacggcgacguggucgcgaucgacuacaagcacuacacccccagcuucaagaagggcgccaagcugcugcacaagcccaucguguggcacgugaacaacgccaccaacaaggccacguacaagccgaacaccuggugcauccggugccucugguccaccaagcccgucgagaccagcaacuccuucgacgugcugaagagcgaggacgcgcaggggauggacaaccuggccugcgaggaccucaagcccguguccgaggaggucguggagaaccccacgauccagaaggacgugcuggagugcaacgucaagaccaccgagguggugggcgacaucauccugaagccggccaacaacagccucaagaucaccgaggaggucgggcacacggaccugauggccgccuacguggacaacuccagccugaccaucaagaagcccaacgagcucucccgcgugcugggccugaagacccucgcgacccacgggcuggccgccgucaacagcgugcccugggacacgaucgccaacuacgccaagccguuccugaacaagguggucuccaccaccaccaacaucgugacgcgcugccucaaccgggugugcaccaacuacaugcccuacuucuucacccugcugcuccagcugugcaccuucacccgcagcacgaacucccggaucaaggcgagcaugcccaccaccaucgccaagaacaccgucaagagcgugggcaaguucugccuggaggccuccuucaacuaccucaagagccccaacuucuccaagcugaucaacaucaucaucugguuccugcuccugagcgugugccugggcucccucaucuacagcacggccgcccuggggguccugauguccaaccucggcaugccgagcuacugcaccggguaccgcgagggcuaccugaacuccaccaacgugaccaucgcgacguacugcaccggcagcauccccugcuccgugugccugagcgggcucgacucccuggacaccuaccccagccuggagaccauccagaucacgaucuccagcuucaagugggaccucaccgccuucggccugaucgccgagugguuccuggccuacauccucuucacccgguucuucuacguccuggggcuggccgcgaucaugcagcucuucuucuccuacuucgccgugcacuucaucagcaacuccuggcugauguggcugaucaucaaccuggugcagauggcccccaucagcgccaugguccgcauguacaucuucuucgcgagcuucuacuacguguggaaguccuacgugcacgucguggacggcugcaacagcuccaccugcaugaugugcuacaagcggaaccgcgccacgcggguggagugcaccaccaucgucaacggggugcgccggagcuucuacgucuacgccaacggcggcaagggguucugcaagcuccacaacuggaacugcgugaacugcgacaccuucugcgccggcuccacguucaucagcgacgagguggcccgcgaccugucccugcaguucaagcggccgaucaaccccaccgaccagagcuccuacaucgucgacagcgugaccgugaagaacggguccauccaccucuacuucgacaaggcgggccagaagaccuacgagcgccacagccugucccacuucgucaaccuggacaaccuccgggccaacaacacgaaggggagccugcccaucaacgugaucguguucgacggcaaguccaagugcgaggagagcuccgccaagagcgccuccgucuacuacagccagcugaugugccagcccauccuccugcuggaccaggcccucgugagcgacgugggcgacuccgcggaggucgccgugaagauguucgacgccuacgugaacaccuucagcuccaccuucaacgucccgauggagaagcugaagacccugguggccacggccgaggcggagcucgccaagaacgugagccuggacaacguccuguccaccuucaucagcgccgcccgccagggguucguggacuccgacguggagaccaaggacgucguggagugccucaagcugagccaccaguccgacaucgaggugaccggcgacagcugcaacaacuacaugcugacguacaacaaggucgagaacaugaccccccgggaccucggggcgugcaucgacugcuccgcccgccacaucaacgcccagguggccaagagccacaacaucgcccugaucuggaacgugaaggacuucaugucccugagcgagcagcuccggaagcagauccgcuccgcggccaagaagaacaaccugcccuucaagcugaccugcgccaccacgcgccaggucgugaacguggucaccaccaagaucgcccucaagggcgggugaggacuaguuauaagacugacuagcccgaugggccucccaacgggcccuccuccccuccuugcaccgagauuaauaaaaaaaaaaaaaaaaaaaaaaaaaaaaaaaaaaaaaaaaaaaaaaaaaaaaaaaaaaaaaaaaugcaucccccccccccccccccccccccccccccccaaaggcucuuuucagagccaccagaauu

SEQ ID NO: 21450 - RNA, 6058 nt, Artificial Sequence
  SARS-CoV-2__MT873148.1__non-structural protein 3 (NSP3) mRNA gc
aggagaaagcuuaccauggcccccaccaaggugaccuucggcgacgacacggucaucgaggugcagggguacaagagcgugaacaucaccuucgagcuggacgagcgcaucgacaagguccucaacgagaagugcuccgccuacaccguggagcugggcaccgaggugaacgaguucgcgugcgucguggccgacgccgugaucaagacgcugcagccggucagcgagcuccugaccccccuggggaucgaccucgacgagugguccauggccaccuacuaccuguucgacgagagcggcgaguucaagcuggccucccacauguacugcagcuucuacccccccgacgaggacgaggaggagggggacugcgaggaggaggaguucgagccguccacccaguacgaguacggcacggaggacgacuaccagggcaagccccucgaguucggggcgaccagcgccgcccugcagcccgaggaggagcaggaggaggacuggcuggacgacgacucccagcagaccgugggccagcaggacgggagcgaggacaaccagaccacgaccauccagaccaucguggagguccagccccagcucgagauggagcugaccccgguggugcagacgaucgaggucaacuccuucagcggcuaccugaagcucaccgacaacguguacaucaagaacgccgacaucguggaggaggcgaagaaggucaagcccaccgugguggucaacgccgccaacguguaccugaagcacgggggcggcguggccggggcccugaacaaggcgaccaacaacgccaugcaggucgaguccgacgacuacaucgccacgaacggcccccucaagguggggggcagcugcguccuguccggccacaaccuggccaagcacugccuccacgugguggggcccaacgucaacaagggcgaggacauccagcugcugaagagcgccuacgagaacuucaaccagcacgaggugcuccuggcgccgcugcucuccgccgggaucuucggcgccgaccccauccacagccugcgggugugcgucgacaccgugcgcaccaacguguaccuggccgucuucgacaagaaccucuacgacaagcugguguccagcuuccuggagaugaagagcgagaagcagguggagcagaagaucgccgagauccccaaggaggaggucaagcccuucaucaccgaguccaagccgagcguggagcagcggaagcaggacgacaagaagaucaaggcgugcguggaggaggucacgaccacccucgaggagaccaaguuccugacggagaaccugcuccuguacaucgacaucaacgggaaccugcaccccgacuccgccacccucgugagcgacaucgacaucaccuuccugaagaaggacgcccccuacaucgugggcgacgucgugcaggagggcgugcugaccgccgucgugauccccacgaagaaggccgggggcaccaccgagaugcucgcgaaggcccugcgcaaggugccgaccgacaacuacaucacgaccuaccccgggcagggccugaacggguacaccgucgaggaggccaagaccgugcucaagaagugcaaguccgccuucuacauccugcccagcaucaucuccaacgagaagcaggagauccugggcaccgugagcuggaaccuccgggagaugcuggcgcacgccgaggagacgcgcaagcugaugcccgucugcguggagaccaaggccaucguguccaccauccagcggaaguacaagggcaucaagauccaggagggggucguggacuacggcgcccgcuucuacuucuacaccagcaagacgaccguggccucccugaucaacacccucaacgaccugaacgagacccuggucacgaugccgcucggguacgugacccacggccugaaccuggaggaggcggcccgguacaugcgcagccucaaggugcccgccaccgucuccgugagcucccccgacgccgugaccgccuacaacggguaccugacgagcuccagcaagacccccgaggagcacuucaucgagaccaucucccuggcgggcagcuacaaggacuggagcuacuccggccagagcacccagcucgggaucgaguuccugaagcggggcgacaaguccgucuacuacacgagcaacccgaccaccuuccaccuggggggcgaggugaucaccuucgacaaccucaagacgcugcugucccuccgcgaggugcggaccaucaaggucuucaccaccguggacaacaucaaccugcacacgcagguggucgacaugagcaugaccuacggccagcaguucgggcccaccuaccuggacggcgccgacgugaccaagaucaagccccacaacucccacgaggggaagacguucuacgugcucccgaacgacgacacccugcgcgucgaggccuucgaguacuaccacaccaccgaccccagcuuccugggccgguacauguccgcccucaaccacacgaagaaguggaaguacccccaggugaacgggcugaccagcaucaagugggccgacaacaacugcuaccuggcgaccgcccuccugacccugcagcagaucgagcucaaguucaaccccccggcccugcaggacgccuacuaccgcgcgcgggccggcgaggccgccaacuucugcgcccugauccucgcguacugcaacaagacggugggcgagcugggggacguccgcgagaccauguccuaccuguuccagcacgccaaccucgacagcugcaagcgggugcugaacgucgugugcaagaccugcggccagcagcagaccacccugaaggggguggaggccgucauguacaugggcacgcucuccuacgagcaguucaagaagggggugcagauccccugcaccugcggcaagcaggccaccaaguaccuggugcagcaggagagccccuucgucaugauguccgcccccccggcgcaguacgagcugaagcacggcaccuucacgugcgccagcgaguacaccgggaacuaccagugcggccacuacaagcacaucaccuccaaggagacccucuacugcaucgacggggcccugcugacgaagagcagcgaguacaagggccccaucaccgacguguucuacaaggagaacuccuacaccaccacgaucaagcccgugaccuacaagcucgacggggucgugugcaccgagaucgaccccaagcuggacaacuacuacaagaaggacaacagcuacuucaccgagcagccgaucgaccuggugcccaaccagcccuaccccaacgccuccuucgacaacuucaaguucgucugcgacaacaucaaguucgccgacgaccucaaccagcugacgggcuacaagaagccggcgagccgcgagcugaaggugaccuucuuccccgaccucaacggcgacguggucgccaucgacuacaagcacuacacccccuccuucaagaagggggccaagcugcugcacaagcccaucguguggcacgugaacaacgccaccaacaaggcgacguacaagccgaacaccuggugcauccggugccucuggagcaccaagcccgucgagaccuccaacagcuucgacgugcugaaguccgaggacgcccagggcauggacaaccuggccugcgaggaccucaagcccgugagcgaggaggucguggagaaccccacgauccagaaggacgugcuggagugcaacgucaagaccaccgagguggugggggacaucauccugaagccggccaacaacucccucaagaucaccgaggaggucggccacacggaccugauggccgcguacguggacaacagcucccugaccaucaagaagcccaacgagcucagccgcgugcuggggcugaagacccucgccacccacggccuggccgccgucaacuccgugcccugggacacgaucgccaacuacgcgaagccguuccugaacaagguggucagcaccaccaccaacaucgugacgcgcugccucaaccgggugugcaccaacuacaugcccuacuucuucacccugcugcuccagcugugcaccuucacccgcuccacgaacagccggaucaaggccuccaugcccaccaccaucgccaagaacaccgucaagagcgugggcaaguucugccuggaggccagcuucaacuaccucaagucccccaacuucagcaagcugaucaacaucaucaucugguuccugcuccuguccgugugccuggggagccucaucuacuccacggccgcgcugggcguccugaugagcaaccucgggaugccguccuacugcaccggcuaccgcgagggcuaccugaacagcaccaacgugaccaucgccacguacugcaccggguccauccccugcagcgugugccuguccggccucgacagccuggacaccuaccccucccuggagaccauccagaucacgaucagcuccuucaagugggaccucaccgccuucgggcuggucgccgagugguuccuggccuacauccucuucacccgguucuucuacgugcugggccuggcggccaucaugcagcucuucuucagcuacuucgccgugcacuucaucuccaacagcuggcugauguggcugaucaucaaccugguccagauggcccccaucuccgcgauggugcgcauguacaucuucuucgccagcuucuacuacguguggaagagcuacguccacgugguggacgggugcaacuccagcaccugcaugaugugcuacaagcggaaccgcgccacgcgggucgagugcaccaccaucgugaacggcguccgccgguccuucuacguguacgccaacggcgggaagggcuucugcaagcuccacaacuggaacugcgugaacugcgacaccuucugcgccgggagcacguucaucuccgacgaggucgcgcgcgaccugagccugcaguucaagcggccgaucaaccccaccgaccaguccagcuacaucguggacuccgugaccgucaagaacggcagcauccaccucuacuucgacaaggccgggcagaagaccuacgagcgccacucccugagccacuucgugaaccuggacaaccuccgggccaacaacacgaagggcucccugcccaucaacgugaucgucuucgacggcaagagcaagugcgaggaguccagcgccaaguccgccagcguguacuacucccagcugaugugccagcccauccuccugcuggaccaggcgcucgugagcgacgucggggacagcgccgagguggccgugaagauguucgacgccuacgucaacaccuucuccagcaccuucaacgugccgauggagaagcugaagacccugguggccacggcggaggccgagcucgccaagaacgucucccuggacaacgugcugagcaccuucaucuccgccgcgcgccagggcuucguggacagcgacgucgagaccaaggacgugguggagugccucaagcugucccaccagagcgacaucgaggucaccggggacuccugcaacaacuacaugcugacguacaacaagguggagaacaugaccccccgggaccucggcgccugcaucgacugcagcgcccgccacaucaacgcccagguggccaagucccacaacaucgcgcugaucuggaacgucaaggacuucaugagccuguccgagcagcuccggaagcagauccgcagcgccgccaagaagaacaaccugcccuucaagcugaccugcgccaccacgcgccagguggugaacgucgugaccaccaagaucgcccucaaggggggcugaggacuaguuauaagacugacuagcccgaugggccucccaacgggcccuccuccccuccuugcaccgagauuaauaaaaaaaaaaaaaaaaaaaaaaaaaaaaaaaaaaaaaaaaaaaaaaaaaaaaaaaaaaaaaaaaugcaucccccccccccccccccccccccccccccccaaaggcucuuuucagagccaccagaauu

SEQ ID NO: 21451 - RNA, 6058 nt, Artificial Sequence
  SARS-CoV-2__MT873152.1__non-structural protein 3 (NSP3) mRNA gc
aggagaaagcuuaccauggcccccaccaaggugaccuucggcgacgacacggucaucgaggugcagggguacaagagcgugaacaucaccuucgagcuggacgagcgcaucgacaagguccucaacgagaagugcuccgccuacaccguggagcugggcaccgaggugaacgaguucgcgugcgucguggccgacgccgugaucaagacgcugcagccggucagcgagcuccugaccccccuggggaucgaccucgacgagugguccauggccaccuacuaccuguucgacgagagcggcgaguucaagcuggccucccacauguacugcagcuucuacccccccgacgaggacgaggaggagggggacugcgaggaggaggaguucgagccguccacccaguacgaguacggcacggaggacgacuaccagggcaagccccucgaguucggggcgaccagcgccgcccugcagcccgaggaggagcaggaggaggacuggcuggacgacgacucccagcagaccgugggccagcaggacgggagcgaggacaaccagaccacgaccauccagaccaucguggagguccagccccagcucgagauggagcugaccccgguggugcagacgaucgaggucaacuccuucagcggcuaccugaagcucaccgacaacguguacaucaagaacgccgacaucguggaggaggcgaagaaggucaagcccaccgugguggucaacgccgccaacguguaccugaagcacgggggcggcguggccggggcccugaacaaggcgaccaacaacgccaugcaggucgaguccgacgacuacaucgccacgaacggcccccucaagguggggggcagcugcguccuguccggccacaaccuggccaagcacugccuccacgugguggggcccaacgucaacaagggcgaggacauccagcugcugaagagcgccuacgagaacuucaaccagcacgaggugcuccuggcgccgcugcucuccgccgggaucuucggcgccgaccccauccacagccugcgggugugcgucgacaccgugcgcaccaacguguaccuggccgucuucgacaagaaccucuacgacaagcugguguccagcuuccuggagaugaagagcgagaagcagguggagcagaagaucgccgagauccucaaggaggaggucaagcccuucaucaccgaguccaagcccagcguggagcagcggaagcaggacgacaagaagaucaaggcgugcguggaggaggucacgaccacccuggaggagaccaaguuccugacggagaaccuccugcuguacaucgacaucaacgggaaccuccacccggacuccgccacccuggugagcgacaucgacaucaccuuccugaagaaggacgcccccuacaucgugggcgacgucgugcaggagggcgugcucaccgccgucgugauccccacgaagaaggccgggggcaccaccgagaugcuggcgaaggcccugcgcaaggugcccaccgacaacuacaucacgaccuacccggggcagggccucaacggguacaccgucgaggaggccaagaccgugcugaagaagugcaaguccgccuucuacauccugcccagcaucaucuccaacgagaagcaggagauccucggcaccgugagcuggaaccugcgggagaugcuggcgcacgccgaggagacgcgcaagcugaugcccgucugcguggagaccaaggccaucguguccaccauccagcggaaguacaagggcaucaagauccaggagggggucguggacuacggcgcccgcuucuacuucuacaccagcaagacgaccguggccucccucaucaacacccugaacgaccugaacgagacccucgucacgaugccccugggguacgugacccacggccugaaccucgaggaggcggcccgguacaugcgcagccugaaggugccggccaccgucuccgugagcucccccgacgccgugaccgccuacaacggguaccugacgagcuccagcaagacccccgaggagcacuucaucgagaccaucucccucgcgggcagcuacaaggacuggagcuacuccggccagagcacccagcuggggaucgaguuccugaagcggggcgacaaguccgucuacuacacgagcaaccccaccaccuuccaccucgacggggaggugaucaccuucgacaaccugaagacgcugcucucccugcgcgaggugcggaccaucaaggucuucaccaccguggacaacaucaaccugcacacgcagguggucgacaugagcaugaccuacggccagcaguucggcccgaccuaccucgacggggccgacgugaccaagaucaagccccacaacucccacgagggcaagacguucuacgugcugcccaacgacgacacccugcgcgucgaggccuucgaguacuaccacaccaccgacccgagcuuccucgggcgguacauguccgcccugaaccacacgaagaaguggaaguacccccaggugaacggccugaccagcaucaagugggccgacaacaacugcuaccucgcgaccgcccugcugacccuccagcagaucgagcugaaguucaacccccccgcccugcaggacgccuacuaccgcgcgcgggccggggaggccgccaacuucugcgcccucauccuggcguacugcaacaagacggugggcgagcugggcgacguccgcgagaccauguccuaccucuuccagcacgccaaccuggacagcugcaagcgggugcugaacgucgugugcaagaccugcgggcagcagcagaccacccucaagggcguggaggccgucauguacauggggacgcuguccuacgagcaguucaagaagggcgugcagaucccgugcaccugcgggaagcaggccaccaaguaccuggugcagcaggagagccccuucgucaugauguccgccccccccgcgcaguacgagcucaagcacggcaccuucacgugcgccagcgaguacaccggcaacuaccagugcgggcacuacaagcacaucaccuccaaggagacccuguacugcaucgacggcgcccugcucacgaagagcagcgaguacaaggggccgaucaccgacguguucuacaaggagaacuccuacaccaccacgaucaagcccgugaccuacaagcuggacggcgucgugugcaccgagaucgaccccaagcuggacaacuacuacaagaaggacaacagcuacuucaccgagcagcccaucgaccucgugccgaaccagcccuaccccaacgccuccuucgacaacuucaaguucgucugcgacaacaucaaguucgccgacgaccugaaccagcugacgggguacaagaagcccgcgagccgcgagcucaaggugaccuucuucccggaccugaacggcgacguggucgccaucgacuacaagcacuacacccccuccuucaagaagggcgccaagcugcuccacaagcccaucguguggcacgugaacaacgccaccaacaaggcgacguacaagcccaacaccuggugcauccggugccuguggagcaccaagccggucgagaccuccaacagcuucgacgugcugaaguccgaggacgcccaggggauggacaaccucgccugcgaggaccugaagcccgugagcgaggaggucguggagaaccccacgauccagaaggacgugcuggagugcaacgucaagaccaccgagguggugggcgacaucauccucaagcccgccaacaacucccugaagaucaccgaggaggucgggcacacggaccugauggccgcguacguggacaacagcucccucaccaucaagaagccgaacgagcugagccgcgugcugggccucaagacccuggccacccacgggcuggccgccgucaacuccgugcccugggacacgguggccaacuacgcgaagcccuuccucaacaaggucgugagcaccaccaccaacaucgugacgcgcugccugaaccgggucugcaccaacuacaugccguacuucuucacccugcuccugcagcugugcaccuucacccgcuccacgaacagccggaucaaggccuccaugcccaccaccaucgccaagaacaccgugaagagcgugggcaaguucugccucgaggccagcuucaacuaccugaagucccccaacuucagcaagcugaucaacaucaucaucugguuccuccugcuguccgucugccucggcagccugaucuacuccacggccgcgcugggggugcucaugagcaaccugggcaugcccuccuacugcaccggguaccgcgagggcuaccugaacagcaccaacgugaccaucgccacguacugcaccggcuccaucccgugcagcgucugccucuccgggcuggacagccuggacaccuaccccucccucgagaccauccagaucacgaucagcuccuucaagugggaccugaccgccuucggccugguggccgagugguuccucgccuacauccuguucacccgguucuucuacgugcuggggcucgcggccaucaugcagcuguucuucagcuacuucgccguccacuucaucuccaacagcuggcugauguggcugaucaucaaccucgugcagauggcccccaucuccgcgauggugcgcauguacaucuucuucgccagcuucuacuacgucuggaagagcuacgugcacguggucgacggcugcaacuccagcaccugcaugaugugcuacaagcggaaccgcgccacgcggguggagugcaccaccaucgucaacggggugcgccgguccuucuacguguacgccaacggcggcaagggguucugcaagcugcacaacuggaacugcgucaacugcgacaccuucugcgccggcagcacguucaucuccgacgagguggcgcgcgaccugagccuccaguucaagcggcccaucaacccgaccgaccaguccagcuacaucguggacuccgucaccgugaagaacgggagcauccaccuguacuucgacaaggccggccagaagaccuacgagcgccacucccugagccacuucgugaaccucgacaaccugcgggccaacaacacgaaggggucccugcccaucaacgucaucguguucgacggcaagagcaagugcgaggaguccagcgccaaguccgccagcguguacuacucccagcucaugugccagcccauccugcugcucgaccaggcgcuggucagcgacgugggcgacagcgccgagguggccgucaagauguucgacgccuacgugaacaccuucuccagcaccuucaacgugcccauggagaagcugaagacccucgucgccacggcggaggccgagcuggccaagaacgugucccuggacaacgugcucagcaccuucaucuccgccgcgcgccagggguucgucgacagcgacguggagaccaaggacguggucgagugccugaagcugucccaccagagcgacaucgaggugaccggcgacuccugcaacaacuacaugcucacguacaacaagguggagaacaugaccccgcgggaccugggggccugcaucgacugcagcgcccgccacaucaacgcccaggucgccaagucccacaacaucgcgcugaucuggaacgugaaggacuucaugagccucuccgagcagcugcggaagcagauccgcagcgccgccaagaagaacaaccugcccuucaagcucaccugcgccaccacgcgccagguggucaacguggugaccaccaagaucgcccugaagggcgggugaggacuaguuauaagacugacuagcccgaugggccucccaacgggcccuccuccccuccuugcaccgagauuaauaaaaaaaaaaaaaaaaaaaaaaaaaaaaaaaaaaaaaaaaaaaaaaaaaaaaaaaaaaaaaaaaugcaucccccccccccccccccccccccccccccccaaaggcucuuuucagagccaccagaauu

SEQ ID NO: 21452 - RNA, 6058 nt, Artificial Sequence
  SARS-CoV-2__MT873163.1__non-structural protein 3 (NSP3) mRNA gc
aggagaaagcuuaccauggcccccaccaaggugaccuucggcgacgacacggucaucgaggugcagggguacaagagcgugaacaucaccuucgagcuggacgagcgcaucgacaagguccucaacgagaagugcuccgccuacaccguggagcugggcaccgaggugaacgaguucgcgugcgucguggccgacgccgugaucaagacgcugcagccggucagcgagcuccugaccccccuggggaucgaccucgacgagugguccauggccaccuacuaccuguucgacgagagcggcgaguucaagcuggccucccacauguacugcagcuucuacccccccgacgaggacgaggaggagggggacugcgaggaggaggaguucgagccguccacccaguacgaguacggcacggaggacgacuaccagggcaagccccucgaguucggggcgaccagcgccgcccugcagcccgaggaggagcaggaggaggacuggcuggacgacgacucccagcagaccgugggccagcaggacgggagcgaggacaaccagaccacgaccauccagaccaucguggagguccagccccagcucgagauggagcugaccccgguggugcagacgaucgaggucaacuccuucagcggcuaccugaagcucaccgacaacguguacaucaagaacgccgacaucguggaggaggcgaagaaggucaagcccaccgugguggucaacgccgccaacguguaccugaagcacgggggcggcguggccggggcccugaacaaggcgaccaacaacgccaugcaggucgaguccgacgacuacaucgccacgaacggcccccucaagguggggggcagcugcguccuguccggccacaaccuggccaagcacugccuccacgugguggggcccaacgucaacaagggcgaggacauccagcugcugaagagcgccuacgagaacuucaaccagcacgaggugcuccuggcgccgcugcucuccgccgggaucuucggcgccgaccccauccacagccugcgggugugcgucgacaccgugcgcaccaacguguaccuggccgucuucgacaagaaccucuacgacaagcugguguccagcuuccuggagaugaagagcgagaagcagguggagcagaagaucgccgagauccccaaggaggaggucaagcccuucaucaccgaguccaagccgagcguggagcagcggaagcaggacgacaagaagaucaaggcgugcguggaggaggucacgaccacccucgaggagaccaaguuccugacggagaaccugcuccuguacaucgacaucaacgggaaccugcaccccgacuccgccacccucgugagcgacaucgacaucaccuuccugaagaaggacgcccccuacaucgugggcgacgucgugcaggagggcgugcugaccgccgucgugauccccacgaagaaggccgggggcaccaccgagaugcucgcgaaggcccugcgcaaggugccgaccgacaacuacaucacgaccuaccccgggcagggccugaacggguacaccgucgaggaggccaagaccgugcucaagaagugcaaguccgccuucuacauccugcccagcaucaucuccaacgagaagcaggagauccugggcaccgugagcuggaaccuccgggagaugcuggcgcacgccgaggagacgcgcaagcugaugcccgucugcguggagaccaaggccaucguguccaccauccagcggaaguacaagggcaucaagauccaggagggggucguggacuacggcgcccgcuucuacuucuacaccagcaagacgaccguggccucccugaucaacacccucaacgaccugaacgagacccuggucacgaugccgcucggguacgugacccacggccugaaccuggaggaggcggcccgguacaugcgcagccucaaggugcccgccaccgucuccgugagcucccccgacgccgugaccgccuacaacggguaccugacgagcuccagcaagacccccgaggagcacuucaucgagaccaucucccuggcgggcagcuacaaggacuggagcuacuccggccagagcacccagcucgggaucgaguuccugaagcggggcgacaaguccgucuacuacacgagcaacccgaccaccuuccaccuggacggggaggugaucaccuucgacaaccucaagacgcugcugucccuccgcgaggugcggaccaucaaggucuucaccaccguggacaacaucaaccugcacacgcagguggucgacaugagcaugaccuacggccagcaguucggccccaccuaccuggacggggccgacgugaccaagaucaagccccacaacucccacgagggcaagacguucuacgugcucccgaacgacgacacccugcgcgucgaggccuucgaguacuaccacaccaccgaccccagcuuccuggggcgguacauguccgcccucaaccacacgaagaaguggaaguacccccaggugaacggccugaccagcaucaagugggccgacaacaacugcuaccuggcgaccgcccuccugacccugcagcagaucgagcucaaguucaaccccccggcccugcaggacgccuacuaccgcgcgcgggccggggaggccgccaacuucugcgcccugauccucgcguacugcaacaagacggugggcgagcugggcgacguccgcgagaccauguccuaccuguuccagcacgccaaccucgacagcugcaagcgggugcugaacgucgugugcaagaccugcgggcagcagcagaccacccugaagggcguggaggccgucauguacauggggacgcucuccuacgagcaguucaagaagggcgugcagauccccugcaccugcgggaagcaggccaccaaguaccuggugcagcaggagagccccuucgucaugauguccgcccccccggcgcaguacgagcugaagcacggcaccuucacgugcgccagcgaguacaccggcaacuaccagugcgggcacuacaagcacaucaccuccaaggagacccucuacugcaucgacggcgcccugcugacgaagagcagcgaguacaaggggcccaucaccgacguguucuacaaggagaacuccuacaccaccacgaucaagcccgugaccuacaagcucgacggcgucgugugcaccgagaucgaccccaagcuggacaacuacuacaagaaggacaacagcuacuucaccgagcagccgaucgaccuggugcccaaccagcccuaccccaacgccuccuucgacaacuucaaguucgucugcgacaacaucaaguucgccgacgaccucaaccagcugacgggguacaagaagccggcgagccgcgagcugaaggugaccuucuuccccgaccucaacggcgacguggucgccaucgacuacaagcacuacacccccuccuucaagaagggcgccaagcugcugcacaagcccaucguguggcacgugaacaacgccaccaacaaggcgacguacaagccgaacaccuggugcauccggugccucuggagcaccaagcccgucgagaccuccaacagcuucgacgugcugaaguccgaggacgcccaggggauggacaaccuggccugcgaggagcucaagcccgugagcgaggaggucguggagaaccccacgauccagaaggacgugcuggagugcaacgucaagaccaccgagguggugggcgacaucauccugaagccggccaacaacucccucaagaucaccgaggaggucgggcacacggaccugauggccgcguacguggacaacagcucccugaccaucaagaagcccaacgagcucagccgcgugcugggccugaagacccucgccacccacgggcuggccgccgucaacuccgugcccugggacacgaucgccaacuacgcgaagccguuccugaacaagguggucagcaccaccaccaacaucgugacgcgcugccucaaccgggugugcaccaacuacaugcccuacuucuucacccugcugcuccagcugugcaccuucacccgcuccacgaacagccggaucaaggccuccaugcccaccaccaucgccaagaacaccgucaagagcgugggcaaguucugccuggaggccagcuucaacuaccucaagucccccaacuucagcaagcugaucaacaucaucaucugguuccugcuccuguccgugugccugggcagccucaucuacuccacggccgcgcuggggguccugaugagcaaccucggcaugccguccuacugcaccggguaccgcgagggcuaccugaacagcaccaacgugaccaucgccacguacugcaccggcuccauccccugcagcgugugccuguccgggcucgacagccuggacaccuaccccucccuggagaccauccagaucacgaucagcuccuucaagugggaccucaccgccuucggccuggucgccgagugguuccuggccuacauccucuucacccgguucuucuacgugcuggggcuggcggccaucaugcagcucuucuucagcuacuucgccgugcacuucaucuccaacagcuggcugauguggcugaucaucaaccugguccagauggcccccaucuccgcgauggugcgcauguacaucuucuucgccagcuucuacuacguguggaagagcuacguccacgugguggacggcugcaacuccagcaccugcaugaugugcuacaagcggaaccgcgccacgcgggucgagugcaccaccaucgugaacgggguccgccgguccuucuacguguacgccaacggcggcaagggguucugcaagcuccacaacuggaacugcgugaacugcgacaccuucugcgccggcagcacguucaucuccgacgaggucgcgcgcgaccugagccugcaguucaagcggccgaucaaccccaccgaccaguccagcuacaucguggacuccgugaccgucaagaacgggagcauccaccucuacuucgacaaggccggccagaagaccuacgagcgccacucccugagccacuucgugaaccuggacaaccuccgggccaacaacacgaaggggucccugcccaucaacgugaucgucuucgacggcaagagcaagugcgaggaguccagcgccaaguccgccagcguguacuacucccagcugaugugccagcccauccuccugcuggaccaggcgcucgugagcgacgucggcgacagcgccgagguggccgugaagauguucgacgccuacgucaacaccuucuccagcaccuucaacgugccgauggagaagcugaagacccugguggccacggcggaggccgagcucgccaagaacgucucccuggacaacgugcugagcaccuucaucuccgccgcgcgccagggguucguggacagcgacgucgagaccaaggacgugguggagugccucaagcugucccaccagagcgacaucgaggucaccggcgacuccugcaacaacuacaugcugacguacaacaagguggagaacaugaccccccgggaccucggggccugcaucgacugcagcgcccgccacaucaacgcccagguggccaagucccacaacaucgcgcugaucuggaacgucaaggacuucaugagccuguccgagcagcuccggaagcagauccgcagcgccgccaagaagaacaaccugcccuucaagcugaccugcgccaccacgcgccagguggugaacgucgugaccaccaagaucgcccucaagggcgggugaggacuaguuauaagacugacuagcccgaugggccucccaacgggcccuccuccccuccuugcaccgagauuaauaaaaaaaaaaaaaaaaaaaaaaaaaaaaaaaaaaaaaaaaaaaaaaaaaaaaaaaaaaaaaaaaugcaucccccccccccccccccccccccccccccccaaaggcucuuuucagagccaccagaauu

SEQ ID NO: 21453 - RNA, 6058 nt, Artificial Sequence
  SARS-CoV-2__MT873201.1__non-structural protein 3 (NSP3) mRNA gc
aggagaaagcuuaccauggcccccaccaaggugaccuucggcgacgacacggucaucgaggugcagggguacaagagcgugaacaucaccuucgagcuggacgagcgcaucgacaagguccucaacgagaagugcuccgccuacaccguggagcugggcaccgaggugaacgaguucgcgugcgucguggccgacgccgugaucaagacgcugcagccggucagcgagcuccugaccccccuggggaucgaccucgacgagugguccauggccaccuacuaccuguucgacgagagcggcgaguucaagcuggccucccacauguacugcagcuucuacccccccgacgaggacgaggaggagggggacugcgaggaggaggaguucgagccguccacccaguacgaguacggcacggaggacgacuaccagggcaagccccucgaguucggggcgaccagcgccgcccugcagcccgaggaggagcaggaggaggacuggcuggacgacgacucccagcagaccgugggccagcaggacgggagcgaggacaaccagaccacgaccauccagaccaucguggagguccagccccagcucgagauggagcugaccccgguggugcagacgaucgaggucaacuccuucagcggcuaccugaagcucaccgacaacguguacaucaagaacgccgacaucguggaggaggcgaagaaggucaagcccaccgugguggucaacgccgccaacguguaccugaagcacgggggcggcguggccggggcccugaacaaggcgaccaacaacgccaugcaggucgaguccgacgacuacaucgccacgaacggcccccucaagguggggggcagcugcguccuguccggccacaaccuggccaagcacugccuccacgugguggggcccaacgucaacaagggcgaggacauccagcugcugaagagcgccuacgagaacuucaaccagcacgaggugcuccuggcgccgcugcucuccgccgggaucuucggcgccgaccccauccacagccugcgggugugcgucgacaccgugcgcaccaacguguaccuggccgucuucgacaagaaccucuacgacaagcugguguccagcuuccuggagaugaagagcgagaagcagguggagcagaagaucgccgagauccccaaggaggaggucaagcccuucaucaccgaguccaagccgagcguggagcagcggaagcaggacgacaagaagaucaaggcgugcguggaggaggucacgaccacccucgaggagaccaaguuccugacggagaaccugcuccuguacaucgacaucaacgggaaccugcaccccgacuccgccacccucgugagcgacaucgacaucaccuuccugaagaaggacgcccccuacaucgugggcgacgucgugcaggagggcgugcugaccgccgucgugauccccacgaagaaggccgggggcaccaccgagaugcucgcgaaggcccugcgcaaggugccgaccgacaacuacaucacgaccuaccccgggcagggccugaacggguacaccgucgaggaggccaagaccgugcucaagaagugcaaguccgccuucuacauccugcccagcaucaucuccaacgagaagcaggagauccugggcaccgugagcuggaaccuccgggagaugcuggcgcacgccgaggagacgcgcaagcugaugcccgucugcguggagaccaaggccaucguguccaccauccagcggaaguacaagggcaucaagauccaggagggggucguggacuacggcgcccgcuucuacuucuacaccagcaagacgaccguggccucccugaucaacacccucaacgaccugaacgagacccuggucacgaugccgcucggguacgugacccacggccugaaccuggaggaggcggcccgguacaugcgcagccucaaggugcccgccaccgucuccgugagcucccccgacgccgugaccgccuacaacggguaccugacgagcuccagcaagacccccgaggagcacuucaucgagaccaucucccuggcgggcagcuacaaggacuggagcuacuccggccagagcacccagcucgggaucgaguuccugaagcggggcgacaaguccgucuacuacacgagcaacccgaccaccuuccaccuggacggggaggugaucaccuucgacaaccucaagacgcugcugucccuccgcgaggugcggaccaucaaggucuucaccaccguggacaacaucaaccugcacacgcagguggucgacaugagcaugaccuacggccagcaguucggccccaccuaccuggacggggccgacgugaccaagaucaagccccacaacucccacgagggcaagacguucuacgugcucccgaacgacgacacccugcgcgucgaggccuucgaguacuaccacaccaccgaccccagcuuccuggggcgguacauguccgcccucaaccacacgaagaaguggaaguacccccaggugaacggccugaccagcaucaagugggccgacaacaacugcuaccuggcgaccgcccuccugacccugcagcagaucgagcucaaguucaaccccccggcccugcaggacgccuacuaccgcgcgcgggccggggaggccgccaacuucugcgcccugauccucgcguacugcaacaagacggugggcgagcugggcgacguccgcgagaccauguccuaccuguuccagcacgccaaccucgacagcugcaagcgggugcugaacgucgugugcaagaccugcgggcagcagcagaccacccugaagggcguggaggccgucauguacauggggacgcucuccuacgagcaguucaagaagggcgugcagauccccugcaccugcgggaagcaggccaccaaguaccuggugcagcaggagagccccuucgucaugauguccgcccccccggcgcaguacgagcugaagcacggcaccuucacgugcgccagcgaguacaccggcaacuaccagugcgggcacuacaagcacaucaccuccaaggagacccucuacugcaucgacggcgcccugcugacgaagagcagcgaguacaagggguccaucaccgacguguucuacaaggagaacagcuacaccaccacgaucaagcccgugaccuacaagcucgacggcgucgugugcaccgagaucgaccccaagcuggacaacuacuacaagaaggacaacuccuacuucaccgagcagcccaucgaccuggugccgaaccagcccuaccccaacgccagcuucgacaacuucaaguucgucugcgacaacaucaaguucgccgacgaccucaaccagcugacgggguacaagaagcccgcgucccgcgagcugaaggugaccuucuucccggaccucaacggcgacguggucgccaucgacuacaagcacuacacccccagcuucaagaagggcgccaagcugcugcacaagcccaucguguggcacgugaacaacgccaccaacaaggcgacguacaagcccaacaccuggugcauccggugccucugguccaccaagccggucgagaccagcaacuccuucgacgugcugaagagcgaggacgcccaggggauggacaaccuggccugcgaggaccucaagcccguguccgaggaggucguggagaaccccacgauccagaaggacgugcuggagugcaacgucaagaccaccgagguggugggcgacaucauccugaagcccgccaacaacagccucaagaucaccgaggaggucgggcacacggaccugauggccgcguacguggacaacuccagccugaccaucaagaagccgaacgagcucucccgcgugcugggccugaagacccucgccacccacgggcuggccgccgucaacagcgugcccugggacacgaucgccaacuacgcgaagcccuuccugaacaagguggucuccaccaccaccaacaucgugacgcgcugccucaaccgggugugcaccaacuacaugccguacuucuucacccugcugcuccagcugugcaccuucacccgcagcacgaacucccggaucaaggccagcaugcccaccaccaucgccaagaacaccgucaagagcgugggcaaguucugccuggaggccuccuucaacuaccucaagagccccaacuucuccaagcugaucaacaucaucaucugguuccugcuccugagcgugugccugggcucccucaucuacagcacggccgcgcuggggguccugauguccaaccucggcaugcccagcuacugcaccggguaccgcgagggcuaccugaacuccaccaacgugaccaucgccacguacugcaccggcagcaucccgugcuccgugugccugagcgggcucgacucccuggacaccuaccccagccuggagaccauccagaucacgaucuccagcuucaagugggaccucaccgccuucggccuggucgccgagugguuccuggccuacauccucuucacccgguucuucuacgugcuggggcuggcggccaucaugcagcucuucuucuccuacuucgccgugcacuucaucagcaacuccuggcugauguggcugaucaucaaccugguccagauggcccccaucagcgcgauggugcgcauguacaucuucuucgccagcuucuacuacguguggaaguccuacguccacgugguggacggcugcaacagcuccaccugcaugaugugcuacaagcggaaccgcgccacgcgggucgagugcaccaccaucgugaacgggguccgccggagcuucuacguguacgccaacggcggcaagggguucugcaagcuccacaacuggaacugcgugaacugcgacaccuucugcgccggcuccacguucaucagcgacgaggucgcgcgcgaccugucccugcaguucaagcggcccaucaacccgaccgaccagagcuccuacaucguggacagcgugaccgucaagaacggguccauccaccucuacuucgacaaggccggccagaagaccuacgagcgccacagccugucccacuucgugaaccuggacaaccuccgggccaacaacacgaaggggagccugcccaucaacgugaucgucuucgacggcaaguccaagugcgaggagagcuccgccaagagcgccuccguguacuacagccagcugaugugccagcccauccuccugcuggaccaggcgcucgugagcgacgucggcgacuccgccgagguggccgugaagauguucgacgccuacgucaacaccuucagcuccaccuucaacgugcccauggagaagcugaagacccugguggccacggcggaggccgagcucgccaagaacgucagccuggacaacgugcuguccaccuucaucagcgccgcgcgccagggguucguggacuccgacgucgagaccaaggacgugguggagugccucaagcugagccaccaguccgacaucgaggucaccggcgacagcugcaacaacuacaugcugacguacaacaagguggagaacaugaccccgcgggaccucggggccugcaucgacugcuccgcccgccacaucaacgcccagguggccaagagccacaacaucgcgcugaucuggaacgucaaggacuucaugucccugagcgagcagcuccggaagcagauccgcuccgccgccaagaagaacaaccugcccuucaagcugaccugcgccaccacgcgccagguggugaacgucgugaccaccaagaucgcccucaagggcgggugaggacuaguuauaagacugacuagcccgaugggccucccaacgggcccuccuccccuccuugcaccgagauuaauaaaaaaaaaaaaaaaaaaaaaaaaaaaaaaaaaaaaaaaaaaaaaaaaaaaaaaaaaaaaaaaaugcaucccccccccccccccccccccccccccccccaaaggcucuuuucagagccaccagaauu

SEQ ID NO: 21454 - RNA, 6058 nt, Artificial Sequence
  SARS-CoV-2__MT873208.1__non-structural protein 3 (NSP3) mRNA gc
aggagaaagcuuaccauggcccccaccaaggugaccuucggcgacgacacggucaucgaggugcagggguacaagagcgugaacaucaccuucgagcuggacgagcgcaucgacaagguccucaacgagaagugcuccgccuacaccguggagcugggcaccgaggugaacgaguucgcgugcgucguggccgacgccgugaucaagacgcugcagccggucagcgagcuccugaccccccuggggaucgaccucgacgagugguccauggccaccuacuaccuguucgacgagagcggcgaguucaagcuggccucccacauguacugcagcuucuacccccccgacgaggacgaggaggagggggacugcgaggaggaggaguucgagccguccacccaguacgaguacggcacggaggacgacuaccagggcaagccccucgaguucggggcgaccagcgccgcccugcagcccgaggaggagcaggaggaggacuggcuggacgacgacucccagcagaccgugggccagcaggacgggagcgaggacaaccagaccacgaccauccagaccaucgccgaggugcagccccagcucgagauggagcugaccccggucgugcagacgaucgaggugaacuccuucagcggcuaccugaagcucaccgacaacgucuacaucaagaacgcggacaucguggaggaggccaagaaggugaagcccaccgucguggugaacgccgccaacgucuaccugaagcacgggggcggcguggccggggcgcugaacaaggccaccaacaacgccaugcagguggaguccgacgacuacaucgccacgaacggcccccucaaggucgggggcagcugcgugcuguccggccacaaccuggccaagcacugccuccacgucguggggcccaacgugaacaagggcgaggacauccagcugcugaagagcgcguacgagaacuucaaccagcacgagguccuccuggccccgcugcucuccgccgggaucuucggcgccgaccccauccacagccugcgggugugcguggacaccguccgcaccaacguguaccuggccguguucgacaagaaccucuacgacaagcuggucuccagcuuccuggagaugaagagcgagaagcagguggagcagaagaucgcggagauccccaaggaggaggugaagcccuucaucaccgaguccaagccgagcgucgagcagcggaagcaggacgacaagaagaucaaggccugcguggaggaggugacgaccacccucgaggagaccaaguuccugacggagaaccugcuccuguacaucgacaucaacgggaaccugcaccccgacuccgccacccucgucagcgacaucgacaucaccuuccugaagaaggacgcccccuacaucgugggcgacgugguccaggagggcgugcugaccgccguggucauccccacgaagaaggcggggggcaccaccgagaugcucgccaaggcccugcgcaaggugccgaccgacaacuacaucacgaccuaccccgggcagggccugaacggguacaccguggaggaggccaagaccguccucaagaagugcaaguccgcguucuacauccugcccagcaucaucuccaacgagaagcaggagauccugggcaccgugagcuggaaccuccgggagaugcuggcccacgccgaggagacgcgcaagcugaugcccgugugcgucgagaccaaggccaucguguccaccauccagcggaaguacaagggcaucaagauccaggaggggguggucgacuacggcgcccgcuucuacuucuacaccagcaagacgaccguggcgucccugaucaacacccucaacgaccugaacgagacccuggugacgaugccgcucggguacgucacccacggccugaaccuggaggaggccgcccgguacaugcgcagccucaaggugcccgccaccguguccgucagcucccccgacgccgugaccgcguacaacggguaccugacgagcuccagcaagacccccgaggagcacuucaucgagaccaucucccuggccggcagcuacaaggacuggagcuacuccggccagagcacccagcucgggaucgaguuccugaagcggggcgacaaguccguguacuacacgagcaacccgaccaccuuccaccuggacggggaggucaucaccuucgacaaccucaagacgcugcugucccuccgcgaggugcggaccaucaagguguucaccaccgucgacaacaucaaccugcacacgcaggugguggacaugagcaugaccuacggccagcaguucggccccaccuaccuggacggggccgacgucaccaagaucaagccccacaacucccacgagggcaagacguucuacgugcucccgaacgacgacacccugcgcguggaggccuucgaguacuaccacaccaccgaccccagcuuccuggggcgguacauguccgcccucaaccacacgaagaaguggaaguacccccaggucaacggccugaccagcaucaagugggcggacaacaacugcuaccuggccaccgcccuccugacccugcagcagaucgagcucaaguucaaccccccggcccugcaggacgcguacuaccgcgcccgggccggggaggccgccaacuucugcgcgcugauccucgccuacugcaacaagacggugggcgagcugggcgacgugcgcgagaccauguccuaccuguuccagcacgccaaccucgacagcugcaagcggguccugaacguggucugcaagaccugcgggcagcagcagaccacccugaagggcguggaggccgugauguacauggggacgcucuccuacgagcaguucaagaagggcguccagauccccugcaccugcgggaagcaggccaccaaguaccuggugcagcaggagagccccuucgugaugauguccgcgcccccggcccaguacgagcugaagcacggcaccuucacgugcgccagcgaguacaccggcaacuaccagugcgggcacuacaagcacaucaccuccaaggagacccucuacugcaucgacggcgcccugcugacgaagagcagcgaguacaaggggcccaucaccgacgucuucuacaaggagaacuccuacaccaccacgaucaagcccgugaccuacaagcucgacggcguggucugcaccgagaucgaccccaagcuggacaacuacuacaagaaggacaacagcuacuucaccgagcagccgaucgaccuggugcccaaccagcccuaccccaacgccuccuucgacaacuucaaguucgugugcgacaacaucaaguucgcggacgaccucaaccagcugacgggguacaagaagccggccagccgcgagcugaaggucaccuucuuccccgaccucaacggcgacgugguggccaucgacuacaagcacuacacccccuccuucaagaagggcgccaagcugcugcacaagcccaucgucuggcacgugaacaacgcgaccaacaaggccacguacaagccgaacaccuggugcauccggugccucuggagcaccaagcccguggagaccuccaacagcuucgacguccugaaguccgaggacgcccaggggauggacaaccuggccugcgaggaccucaagcccgugagcgaggagguggucgagaaccccacgauccagaaggacgugcuggagugcaacgugaagaccaccgaggucgugggcgacaucauccugaagccggccaacaacucccucaagaucaccgaggagguggggcacacggaccugauggcggccuacgucgacaacagcucccugaccaucaagaagcccaacgagcucagccgcgugcugggccugaagacccucgccacccacgggcuggccgccgugaacuccguccccugggacacgaucgcgaacuacgccaagccguuccugaacaagguggugagcaccaccaccaacaucgucacgcgcugccucaaccgggugugcaccaacuacaugcccuacuucuucacccugcugcuccagcugugcaccuucacccgcuccacgaacagccggaucaaggccuccaugcccaccaccaucgccaagaacaccgugaagagcgucggcaaguucugccuggaggccagcuucaacuaccucaagucccccaacuucagcaagcugaucaacaucaucaucugguuccugcuccuguccgugugccugggcagccucaucuacuccacggcggcccugggggugcugaugagcaaccucggcaugccguccuacugcaccggguaccgcgagggcuaccugaacagcaccaacgucaccaucgccacguacugcaccggcuccauccccugcagcgugugccuguccgggcucgacagccuggacaccuaccccucccuggagaccauccagaucacgaucagcuccuucaagugggaccucaccgccuucggccugguggccgagugguuccuggcguacauccucuucacccgguucuucuacguccuggggcuggccgccaucaugcagcucuucuucagcuacuucgccgugcacuucaucuccaacagcuggcugauguggcugaucaucaaccuggugcagauggcgcccaucuccgccaugguccgcauguacaucuucuucgccagcuucuacuacguguggaagagcuacgugcacgucguggacggcugcaacuccagcaccugcaugaugugcuacaagcggaaccgcgccacgcggguggagugcaccaccaucgucaacggggugcgccgguccuucuacgucuacgccaacggcggcaagggguucugcaagcuccacaacuggaacugcgugaacugcgacaccuucugcgcgggcagcacguucaucuccgacgagguggcccgcgaccugagccugcaguucaagcggccgaucaaccccaccgaccaguccagcuacaucgucgacuccgugaccgugaagaacgggagcauccaccucuacuucgacaaggccggccagaagaccuacgagcgccacucccugagccacuucgucaaccuggacaaccuccgggccaacaacacgaaggggucccugcccaucaacgugaucguguucgacggcaagagcaagugcgaggaguccagcgccaaguccgcgagcgucuacuacucccagcugaugugccagcccauccuccugcuggaccaggcccucgugagcgacgugggcgacagcgccgaggucgccgugaagauguucgacgccuacgugaacaccuucuccagcaccuucaacgucccgauggagaagcugaagacccugguggcgacggccgaggccgagcucgccaagaacgugucccuggacaacguccugagcaccuucaucuccgcggcccgccagggguucguggacagcgacguggagaccaaggacgucguggagugccucaagcugucccaccagagcgacaucgaggugaccggcgacuccugcaacaacuacaugcugacguacaacaaggucgagaacaugaccccccgggaccucggggccugcaucgacugcagcgcccgccacaucaacgcccagguggcgaagucccacaacaucgcccugaucuggaacgugaaggacuucaugagccuguccgagcagcuccggaagcagauccgcagcgccgccaagaagaacaaccugcccuucaagcugaccugcgccaccacgcgccaggucgugaacguggucaccaccaagaucgcgcucaagggcgggugaggacuaguuauaagacugacuagcccgaugggccucccaacgggcccuccuccccuccuugcaccgagauuaauaaaaaaaaaaaaaaaaaaaaaaaaaaaaaaaaaaaaaaaaaaaaaaaaaaaaaaaaaaaaaaaaugcaucccccccccccccccccccccccccccccccaaaggcucuuuucagagccaccagaauu

SEQ ID NO: 21455 - RNA, 6058 nt, Artificial Sequence
  SARS-CoV-2__MT873210.1__non-structural protein 3 (NSP3) mRNA gc
aggagaaagcuuaccauggcccccaccaaggugaccuucggcgacgacacggucaucgaggugcagggguacaagagcgugaacaucaccuucgagcuggacgagcgcaucgacaagguccucaacgagaagugcuccgccuacaccguggagcugggcaccgaggugaacgaguucgcgugcgucguggccgacgccgugaucaagacgcugcagccggucagcgagcuccugaccccccuggggaucgaccucgacgagugguccauggccaccuacuaccuguucgacgagagcggcgaguucaagcuggccucccacauguacugcagcuucuacccccccgacgaggacgaggaggagggggacugcgaggaggaggaguucgagccguccacccaguacgaguacggcacggaggacgacuaccagggcaagccccucgaguucggggcgaccagcgccgcccugcagcccgaggaggagcaggaggaggacuggcuggacgacgacucccagcagaccgugggccagcaggacgggagcgaggacaaccagaccacgaccauccagaccaucguggagguccagccccagcucgagauggagcugaccccgguggugcagacgaucgaggucaacuccuucagcggcuaccugaagcucaccgacaacguguacaucaagaacgccgacaucguggaggaggcgaagaaggucaagcccaccgugguggucaacgccgccaacguguaccugaagcacgggggcggcguggccggggcccugaacaaggcgaccaacaacgccaugcaggucgaguccgacgacuacaucgccacgaacggcccccucaagguggggggcagcugcguccuguccggccacaaccuggccaagcacugccuccacgugguggggcccaacgucaacaagggcgaggacauccagcugcugaagagcgccuacgagaacuucaaccagcacgaggugcuccuggcgccgcugcucuccgccgggaucuucggcgccgaccccauccacagccugcgggugugcgucgacaccgugcgcaccaacguguaccuggccgucuucgacaagaaccucuacgacaagcugguguccagcuuccuggagaugaagagcgagaagcagguggagcagaagaucgccgagauccccaaggacgaggucaagcccuucaucaccgaguccaagccgagcguggagcagcggaagcaggacgacaagaagaucaaggcgugcguggaggaggucacgaccacccucgaggagaccaaguuccugacggagaaccugcuccuguacaucgacaucaacgggaaccugcaccccgacuccgccacccucgugagcgacaucgacaucaccuuccugaagaaggacgcccccuacaucgugggcgacgucgugcaggagggcgugcugaccgccgucgugauccccacgaagaaggccgggggcaccaccgagaugcucgcgaaggcccugcgcaaggugccgaccgacaacuacaucacgaccuaccccgggcagggccugaacggguacaccgucgaggaggccaagaccgugcucaagaagugcaaguccgccuucuacauccugcccagcaucaucuccaacgagaagcaggagauccugggcaccgugagcuggaaccuccgggagaugcuggcgcacgccgaggagacgcgcaagcugaugcccgucugcguggagaccaaggccaucguguccaccauccagcggaaguacaagggcaucaagauccaggagggggucguggacuacggcgcccgcuucuacuucuacaccagcaagacgaccguggccucccugaucaacacccucaacgaccugaacgagacccuggucacgaugccgcucggguacgugacccacggccugaaccuggaggaggcggcccgguacaugcgcagccucaaggugcccgccaccgucuccgugagcucccccgacgccgugaccgccuacaacggguaccugacgagcuccagcaagacccccgaggagcacuucaucgagaccaucucccuggcgggcagcuacaaggacuggagcuacuccggccagagcacccagcucgggaucgaguuccugaagcggggcgacaaguccgucuacuacacgagcaacccgaccaccuuccaccuggacggggaggugaucaccuucgacaaccucaagacgcugcugucccuccgcgaggugcggaccaucaaggucuucaccaccguggacaacaucaaccugcacacgcagguggucgacaugagcaugaccuacggccagcaguucggccccaccuaccuggacggggccgacgugaccaagaucaagccccacaacucccacgagggcaagacguucuacgugcucccgaacgacgacacccugcgcgucgaggccuucgaguacuaccacaccaccgaccccagcuuccuggggcgguacauguccgcccucaaccacacgaagaaguggaaguacccccaggugaacggccugaccagcaucaagugggccgacaacaacugcuaccuggcgaccgcccuccugacccugcagcagaucgagcucaaguucaaccccccggcccugcaggacgccuacuaccgcgcgcgggccggggaggccgccaacuucugcgcccugauccucgcguacugcaacaagacggugggcgagcugggcgacguccgcgagaccauguccuaccuguuccagcacgccaaccucgacagcugcaagcgggugcugaacgucgugugcaagaccugcgggcagcagcagaccacccugaagggcguggaggccgucauguacauggggacgcucuccuacgagcaguucaagaagggcgugcagauccccugcaccugcgggaagcaggccaccaaguaccuggugcagcaggagagccccuucgucaugauguccgcccccccggcgcaguacgagcugaagcacggcaccuucacgugcgccagcgaguacaccggcaacuaccagugcgggcacuacaagcacaucaccuccaaggagacccucuacugcaucgacggcgcccugcugacgaagagcagcgaguacaaggggcccaucaccgacguguucuacaaggagaacuccuacaccaccacgaucaagcccgugaccuacaagcucgacggcgucgugugcaccgagaucgaccccaagcuggacaacuacuacaagaaggacaacagcuacuucaccgagcagccgaucgaccuggugcccaaccagcccuaccccaacgccuccuucgacaacuucaaguucgucugcgacaacaucaaguucgccgacgaccucaaccagcugacgggguacaagaagccggcgagccgcgagcugaaggugaccuucuuccccgaccucaacggcgacguggucgccaucgacuacaagcacuacacccccuccuucaagaagggcgccaagcugcugcacaagcccaucguguggcacgugaacaacgccaccaacaaggcgacguacaagccgaacaccuggugcauccggugccucuggagcaccaagcccgucgagaccuccaacagcuucgacgugcugaaguccgaggacgcccaggggauggacaaccuggccugcgaggaccucaagcccgugagcgaggaggucguggagaaccccacgauccagaaggacgugcuggagugcaacgucaagaccaccgagguggugggcgacaucauccugaagccggccaacaacucccucaagaucaccgaggaggucgggcacacggaccugauggccgcguacguggacaacagcucccugaccaucaagaagcccaacgagcucagccgcgugcugggccugaagacccucgccacccacgggcuggccgccgucaacuccgugcccugggacacgaucgccaacuacgcgaagccguuccugaacaagguggucagcaccaccaccaacaucgugacgcgcugccucaaccgggugugcaccaacuacaugcccuacuucuucacccugcugcuccagcugugcaccuucacccgcuccacgaacagccggaucaaggccuccaugcccaccaccaucgccaagaacaccgucaagagcgugggcaaguucugccuggaggccagcuucaacuaccucaagucccccaacuucagcaagcugaucaacaucaucaucugguuccugcuccuguccgugugccugggcagccucaucuacuccacggccgcgcuggggguccugaugagcaaccucggcaugccguccuacugcaccggguaccgcgagggcuaccugaacagcaccaacgugaccaucgccacguacugcaccggcuccauccccugcagcgugugccuguccgggcucgacagccuggacaccuaccccucccuggagaccauccagaucacgaucagcuccuucaagugggaccucaccgccuucggccuggucgccgagugguuccuggccuacauccucuucacccgguucuucuacgugcuggggcuggcggccaucaugcagcucuucuucagcuacuucgccgugcacuucaucuccaacagcuggcugauguggcugaucaucaaccugguccagauggcccccaucuccgcgauggugcgcauguacaucuucuucgccagcuucuacuacguguggaagagcuacguccacgugguggacggcugcaacuccagcaccugcaugaugugcuacaagcggaaccgcgccacgcgggucgagugcaccaccaucgugaacgggguccgccgguccuucuacguguacgccaacggcggcaagggguucugcaagcuccacaacuggaacugcgugaacugcgacaccuucugcgccggcagcacguucaucuccgacgaggucgcgcgcgaccugagccugcaguucaagcggccgaucaaccccaccgaccaguccagcuacaucguggacuccgugaccgucaagaacgggagcauccaccucuacuucgacaaggccggccagaagaccuacgagcgccacucccugagccacuucgugaaccuggacaaccuccgggccaacaacacgaaggggucccugcccaucaacgugaucgucuucgacggcaagagcaagugcgaggaguccagcgccaaguccgccagcguguacuacucccagcugaugugccagcccauccuccugcuggaccaggcgcucgugagcgacgucggcgacagcgccgagguggccgugaagauguucgacgccuacgucaacaccuucuccagcaccuucaacgugccgauggagaagcugaagacccugguggccacggcggaggccgagcucgccaagaacgucucccuggacaacgugcugagcaccuucaucuccgccgcgcgccagggguucguggacagcgacgucgagaccaaggacgugguggagugccucaagcugucccaccagagcgacaucgaggucaccggcgacuccugcaacaacuacaugcugacguacaacaagguggagaacaugaccccccgggaccucggggccugcaucgacugcagcgcccgccacaucaacgcccagguggccaagucccacaacaucgcgcugaucuggaacgucaaggacuucaugagccuguccgagcagcuccggaagcagauccgcagcgccgccaagaagaacaaccugcccuucaagcugaccugcgccaccacgcgccagguggugaacgucgugaccaccaagaucgcccucaagggcgggugaggacuaguuauaagacugacuagcccgaugggccucccaacgggcccuccuccccuccuugcaccgagauuaauaaaaaaaaaaaaaaaaaaaaaaaaaaaaaaaaaaaaaaaaaaaaaaaaaaaaaaaaaaaaaaaaugcaucccccccccccccccccccccccccccccccaaaggcucuuuucagagccaccagaauu

SEQ ID NO: 21456 - RNA, 6058 nt, Artificial Sequence
  SARS-CoV-2__MT873211.1__non-structural protein 3 (NSP3) mRNA gc
aggagaaagcuuaccauggcccccaccaaggugaccuucggcgacgacacggucaucgaggugcagggguacaagagcgugaacaucaccuucgagcuggacgagcgcaucgacaagguccucaacgagaagugcuccgccuacaccguggagcugggcaccgaggugaacgaguucgcgugcgucguggccgacgccgugaucaagacgcugcagccggucagcgagcuccugaccccccuggggaucgaccucgacgagugguccauggccaccuacuaccuguucgacgagagcggcgaguucaagcuggccucccacauguacugcagcuucuacccccccgacgaggacgaggaggagggggacugcgaggaggaggaguucgagccguccacccaguacgaguacggcacggaggacgacuaccagggcaagccccucgaguucggggcgaccagcgccgcccugcagcccgaggaggagcaggaggaggacuggcuggacgacgacucccagcagaccgugggccagcaggacgggagcgaggacaaccagaccaucacgauccagaccaucguggagguccagccccagcucgagauggagcugaccccgguggugcagaccaucgaggucaacuccuucagcggcuaccugaagcucacggacaacguguacaucaagaacgccgacaucguggaggaggcgaagaaggucaagcccaccgugguggucaacgccgccaacguguaccugaagcacgggggcggcguggccggggcccugaacaaggcgaccaacaacgccaugcaggucgaguccgacgacuacaucgccaccaacggcccccucaagguggggggcagcugcguccuguccggccacaaccuggccaagcacugccuccacgugguggggcccaacgucaacaagggcgaggacauccagcugcugaagagcgccuacgagaacuucaaccagcacgaggugcuccuggcgccgcugcucuccgccgggaucuucggcgccgaccccauccacagccugcgggugugcgucgacacggugcgcaccaacguguaccuggccgucuucgacaagaaccucuacgacaagcugguguccagcuuccuggagaugaagagcgagaagcagguggagcagaagaucgccgagauccccaaggaggaggucaagcccuucaucaccgaguccaagccgagcguggagcagcggaagcaggacgacaagaagaucaaggcgugcguggaggaggucaccacgacccucgaggagaccaaguuccugaccgagaaccugcuccuguacaucgacaucaacgggaaccugcaccccgacuccgccacgcucgugagcgacaucgacaucaccuuccugaagaaggacgcccccuacaucgugggcgacgucgugcaggagggcgugcugaccgccgucgugauccccaccaagaaggccgggggcacgaccgagaugcucgcgaaggcccugcgcaaggugccgaccgacaacuacaucaccacguaccccgggcagggccugaacggguacaccgucgaggaggccaagaccgugcucaagaagugcaaguccgccuucuacauccugcccagcaucaucuccaacgagaagcaggagauccugggcaccgugagcuggaaccuccgggagaugcuggcgcacgccgaggagacccgcaagcugaugcccgucugcguggagacgaaggccaucguguccaccauccagcggaaguacaagggcaucaagauccaggagggggucguggacuacggcgcccgcuucuacuucuacaccagcaagaccacgguggccucccugaucaacacccucaacgaccugaacgagacccuggucaccaugccgcucggguacgugacgcacggccugaaccuggaggaggcggcccgguacaugcgcagccucaaggugcccgccaccgucuccgugagcucccccgacgccgugaccgccuacaacggguaccugaccagcuccagcaagacgcccgaggagcacuucaucgagaccaucucccuggcgggcagcuacaaggacuggagcuacuccggccagagcacccagcucgggaucgaguuccugaagcggggcgacaaguccgucuacuacaccagcaacccgacgaccuuccaccuggacggggaggugaucaccuucgacaaccucaagacccugcugucccuccgcgaggugcggacgaucaaggucuucaccaccguggacaacaucaaccugcacacccagguggucgacaugagcaugacguacggccagcaguucggccccaccuaccuggacggggccgacgugaccaagaucaagccccacaacucccacgagggcaagaccuucuacgugcucccgaacgacgacacgcugcgcgucgaggccuucgaguacuaccacaccaccgaccccagcuuccuggggcgguacauguccgcccucaaccacaccaagaaguggaaguacccccaggugaacggccugacgagcaucaagugggccgacaacaacugcuaccuggcgaccgcccuccugacccugcagcagaucgagcucaaguucaaccccccggcccugcaggacgccuacuaccgcgcgcgggccggggaggccgccaacuucugcgcccugauccucgcguacugcaacaagaccgugggcgagcugggcgacguccgcgagacgauguccuaccuguuccagcacgccaaccucgacagcugcaagcgggugcugaacgucgugugcaagaccugcgggcagcagcagaccacccugaagggcguggaggccgucauguacauggggacccucuccuacgagcaguucaagaagggcgugcagauccccugcacgugcgggaagcaggccaccaaguaccuggugcagcaggagagccccuucgucaugauguccgcccccccggcgcaguacgagcugaagcacggcaccuucaccugcgccagcgaguacacgggcaacuaccagugcgggcacuacaagcacaucaccuccaaggagacccucuacugcaucgacggcgcccugcugaccaagagcagcgaguacaaggggcccaucacggacguguucuacaaggagaacuccuacaccaccaccaucaagcccgugacguacaagcucgacggcgucgugugcaccgagaucgaccccaagcuggacaacuacuacaagaaggacaacagcuacuucaccgagcagccgaucgaccuggugcccaaccagcccuaccccaacgccuccuucgacaacuucaaguucgucugcgacaacaucaaguucgccgacgaccucaaccagcugaccggguacaagaagccggcgagccgcgagcugaaggugacguucuuccccgaccucaacggcgacguggucgccaucgacuacaagcacuacacccccuccuucaagaagggcgccaagcugcugcacaagcccaucguguggcacgugaacaacgccaccaacaaggcgaccuacaagccgaacacguggugcauccggugccucuggagcaccaagcccgucgagaccuccaacagcuucgacgugcugaaguccgaggacgcccaggggauggacaaccuggccugcgaggaccucaagcccgugagcgaggaggucguggagaaccccaccauccagaaggacgugcuggagugcaacgucaagacgaccgagguggugggcgacaucauccugaagccggccaacaacucccucaagaucaccgaggaggucgggcacaccgaccugauggccgcguacguggacaacagcucccugacgaucaagaagcccaacgagcucagccgcgugcugggccugaagacccucgccacccacgggcuggccgccgucaacuccgugcccugggacaccaucgccaacuacgcgaagccguuccugaacaagguggucagcacgaccaccaacaucgugacccgcugccucaaccgggugugcacgaacuacaugcccuacuucuucacccugcugcuccagcugugcaccuucacccgcuccaccaacagccggaucaaggccuccaugcccacgaccaucgccaagaacaccgucaagagcgugggcaaguucugccuggaggccagcuucaacuaccucaagucccccaacuucagcaagcugaucaacaucaucaucugguuccugcuccuguccgugugccugggcagccucaucuacuccaccgccgcgcuggggguccugaugagcaaccucggcaugccguccuacugcacgggguaccgcgagggcuaccugaacagcaccaacgugaccaucgccaccuacugcacgggcuccauccccugcagcgugugccuguccgggcucgacagccuggacaccuaccccucccuggagaccauccagaucaccaucagcuccuucaagugggaccucacggccuucggccuggucgccgagugguuccuggccuacauccucuucacccgguucuucuacgugcuggggcuggcggccaucaugcagcucuucuucagcuacuucgccgugcacuucaucuccaacagcuggcugauguggcugaucaucaaccugguccagauggcccccaucuccgcgauggugcgcauguacaucuucuucgccagcuucuacuacguguggaagagcuacguccacgugguggacggcugcaacuccagcaccugcaugaugugcuacaagcggaaccgcgccacccgggucgagugcacgaccaucgugaacgggguccgccgguccuucuacguguacgccaacggcggcaagggguucugcaagcuccacaacuggaacugcgugaacugcgacaccuucugcgccggcagcaccuucaucuccgacgaggucgcgcgcgaccugagccugcaguucaagcggccgaucaaccccacggaccaguccagcuacaucguggacuccgugaccgucaagaacgggagcauccaccucuacuucgacaaggccggccagaagaccuacgagcgccacucccugagccacuucgugaaccuggacaaccuccgggccaacaacaccaaggggucccugcccaucaacgugaucgucuucgacggcaagagcaagugcgaggaguccagcgccaaguccgccagcguguacuacucccagcugaugugccagcccauccuccugcuggaccaggcgcucgugagcgacgucggcgacagcgccgagguggccgugaagauguucgacgccuacgucaacacguucuccagcaccuucaacgugccgauggagaagcugaagacccugguggccaccgcggaggccgagcucgccaagaacgucucccuggacaacgugcugagcacguucaucuccgccgcgcgccagggguucguggacagcgacgucgagaccaaggacgugguggagugccucaagcugucccaccagagcgacaucgaggucaccggcgacuccugcaacaacuacaugcugaccuacaacaagguggagaacaugacgccccgggaccucggggccugcaucgacugcagcgcccgccacaucaacgcccagguggccaagucccacaacaucgcgcugaucuggaacgucaaggacuucaugagccuguccgagcagcuccggaagcagauccgcagcgccgccaagaagaacaaccugcccuucaagcugaccugcgccaccacccgccagguggugaacgucgugacgaccaagaucgcccucaagggcgggugaggacuaguuauaagacugacuagcccgaugggccucccaacgggcccuccuccccuccuugcaccgagauuaauaaaaaaaaaaaaaaaaaaaaaaaaaaaaaaaaaaaaaaaaaaaaaaaaaaaaaaaaaaaaaaaaugcaucccccccccccccccccccccccccccccccaaaggcucuuuucagagccaccagaauu

SEQ ID NO: 21457 - RNA, 6058 nt, Artificial Sequence
  SARS-CoV-2__MT873238.1__non-structural protein 3 (NSP3) mRNA gc
aggagaaagcuuaccauggcccccaccaaggugaccuucggcgacgacacggucaucgaggugcagggguacaagagcgugaacaucaccuucgagcuggacgagcgcaucgacaagguccucaacgagaagugcuccgccuacaccguggagcugggcaccgaggugaacgaguucgcgugcgucguggccgacgccgugaucaagacgcugcagccggucagcgagcuccugaccccccuggggaucgaccucgacgagugguccauggccaccuacuaccuguucgacgagagcggcgaguucaagcuggccucccacauguacugcagcuucuacccccccgacgaggacgaggaggagggggacugcgaggaggaggaguucgagccguccacccaguacgaguacggcacggaggacgacuaccagggcaagccccucgaguucggggcgaccagcgccgcccugcagcccgaggaggagcaggaggaggacuggcuggacgacgacucccagcagaccgugggccagcaggacgggagcgaggacaaccagaccacgaccauccagaccaucguggagguccagccccagcucgagauggagcugaccccgguggugcagacgaucgaggucaacuccuucagcggcuaccugaagcucaccgacaacguguacaucaagaacguggacaucgucgaggaggccaagaaggugaagcccaccguggucgugaacgcggccaacguguaccugaagcacgggggcggcgucgccggggcccugaacaaggccaccaacaacgcgaugcagguggaguccgacgacuacaucgccacgaacggcccccucaaggucgggggcagcugcgugcuguccggccacaaccuggccaagcacugccuccacguggucgggcccaacgugaacaagggcgaggacauccagcugcugaagagcgccuacgagaacuucaaccagcacgaggugcuccuggccccgcugcucuccgcggggaucuucggcgccgaccccauccacagccugcgggucugcguggacaccgugcgcaccaacgucuaccuggccguguucgacaagaaccucuacgacaagcugguguccagcuuccuggagaugaagagcgagaagcaggucgagcagaagaucgccgagauccccaaggaggaggugaagcccuucaucaccgaguccaagccgagcguggagcagcggaagcaggacgacaagaagaucaaggccugcgucgaggaggugacgaccacccucgaggagaccaaguuccugacggagaaccugcuccuguacaucgacaucaacgggaaccugcaccccgacuccgcgacccucgugagcgacaucgacaucaccuuccugaagaaggacgcccccuacaucgucggcgacguggugcaggagggcguccugaccgccguggugauccccacgaagaaggccgggggcaccaccgagaugcucgccaaggcgcugcgcaaggucccgaccgacaacuacaucacgaccuaccccgggcagggccugaacggguacaccguggaggaggccaagaccgugcucaagaagugcaaguccgccuucuacauccugcccagcaucaucuccaacgagaagcaggagauccugggcaccgucagcuggaaccuccgggagaugcuggcccacgcggaggagacgcgcaagcugaugcccgugugcguggagaccaaggccaucgucuccaccauccagcggaaguacaagggcaucaagauccaggagggggugguggacuacggcgcccgcuucuacuucuacaccagcaagacgaccgucgccucccugaucaacacccucaacgaccugaacgagacccuggugacgaugccgcucggguacgugacccacggccugaaccuggaggaggccgcgcgguacaugcgcagccucaagguccccgccaccguguccgugagcucccccgacgccgucaccgccuacaacggguaccugacgagcuccagcaagacccccgaggagcacuucaucgagaccaucucccuggccggcagcuacaaggacuggagcuacuccggccagagcacccagcucgggaucgaguuccugaagcggggcgacaaguccguguacuacacgagcaacccgaccaccuuccaccuggacggggaggugaucaccuucgacaaccucaagacgcugcugucccuccgcgagguccggaccaucaagguguucaccaccguggacaacaucaaccugcacacgcaggucguggacaugagcaugaccuacggccagcaguucggccccaccuaccuggacggggcggacgugaccaagaucaagccccacaacucccacgagggcaagacguucuacguccucccgaacgacgacacccugcgcguggaggccuucgaguacuaccacaccaccgaccccagcuuccuggggcgguacauguccgcccucaaccacacgaagaaguggaaguacccccaggugaacggccugaccagcaucaagugggccgacaacaacugcuaccuggccaccgcgcuccugacccugcagcagaucgagcucaaguucaaccccccggcccugcaggacgccuacuaccgcgcccgggcgggggaggccgccaacuucugcgcccugauccucgccuacugcaacaagacggucggcgagcugggcgacgugcgcgagaccauguccuaccuguuccagcacgcgaaccucgacagcugcaagcggguccugaacguggugugcaagaccugcgggcagcagcagaccacccugaagggcgucgaggccgugauguacauggggacgcucuccuacgagcaguucaagaagggcgugcagauccccugcaccugcgggaagcaggccaccaaguaccugguccagcaggagagccccuucgugaugauguccgcccccccggcccaguacgagcugaagcacggcaccuucacgugcgcgagcgaguacaccggcaacuaccagugcgggcacuacaagcacaucaccuccaaggagacccucuacugcaucgacggcgcccugcugacgaagagcagcgaguacaaggggcccaucaccgacguguucuacaaggagaacuccuacaccaccacgaucaagcccgucaccuacaagcucgacggcguggugugcaccgagaucgaccccaagcuggacaacuacuacaagaaggacaacagcuacuucaccgagcagccgaucgaccugguccccaaccagcccuaccccaacgccuccuucgacaacuucaaguucgugugcgacaacaucaaguucgccgacgaccucaaccagcugacgggguacaagaagccggccagccgcgagcugaaggugaccuucuuccccgaccucaacggcgacgucguggcgaucgacuacaagcacuacacccccuccuucaagaagggcgccaagcugcugcacaagcccaucguguggcacgucaacaacgccaccaacaaggccacguacaagccgaacaccuggugcauccggugccucuggagcaccaagcccguggagaccuccaacagcuucgacgugcugaaguccgaggacgcgcaggggauggacaaccuggccugcgaggaccucaagcccgucagcgaggaggugguggagaaccccacgauccagaaggacguccuggagugcaacgugaagaccaccgagguggucggcgacaucauccugaagccggccaacaacucccucaagaucaccgaggagguggggcacacggaccugauggccgccuacguggacaacagcucccugaccaucaagaagcccaacgagcucagccgcguccugggccugaagacccucgcgacccacgggcuggccgccgugaacuccgugcccugggacacgaucgccaacuacgccaagccguuccugaacaaggucgugagcaccaccaccaacaucgugacgcgcugccucaaccgggucugcaccaacuacaugcccuacuucuucacccugcugcuccagcugugcaccuucacccgcuccacgaacagccggaucaaggcguccaugcccaccaccaucgccaagaacaccgugaagagcgugggcaaguucugccuggaggccagcuucaacuaccucaagucccccaacuucagcaagcugaucaacaucaucaucugguuccugcuccuguccgucugccugggcagccucaucuacuccacggccgcccugggggugcugaugagcaaccucggcaugccguccuacugcaccggguaccgcgagggcuaccugaacagcaccaacgugaccaucgcgacguacugcaccggcuccauccccugcagcgucugccuguccgggcucgacagccuggacaccuaccccucccuggagaccauccagaucacgaucagcuccuucaagugggaccucaccgccuucggccugguggccgagugguuccuggccuacauccucuucacccgguucuucuacgugcuggggcuggccgcgaucaugcagcucuucuucagcuacuucgccguccacuucaucuccaacagcuggcugauguggcugaucaucaaccuggugcagauggcccccaucuccgccauggugcgcauguacaucuucuucgcgagcuucuacuacgucuggaagagcuacgugcacguggucgacggcugcaacuccagcaccugcaugaugugcuacaagcggaaccgcgccacgcggguggagugcaccaccaucgucaacggggugcgccgguccuucuacguguacgccaacggcggcaagggguucugcaagcuccacaacuggaacugcgucaacugcgacaccuucugcgccggcagcacguucaucuccgacgagguggcccgcgaccugagccugcaguucaagcggccgaucaaccccaccgaccaguccagcuacaucguggacuccgucaccgugaagaacgggagcauccaccucuacuucgacaaggcgggccagaagaccuacgagcgccacucccugagccacuucgugaaccuggacaaccuccgggccaacaacacgaaggggucccugcccaucaacgucaucguguucgacggcaagagcaagugcgaggaguccagcgccaaguccgccagcguguacuacucccagcugaugugccagcccauccuccugcuggaccaggcccucgucagcgacgugggcgacagcgcggagguggccgucaagauguucgacgccuacgugaacaccuucuccagcaccuucaacgugccgauggagaagcugaagacccuggucgccacggccgaggcggagcucgccaagaacgugucccuggacaacgugcugagcaccuucaucuccgccgcccgccagggguucgucgacagcgacguggagaccaaggacguggucgagugccucaagcugucccaccagagcgacaucgaggugaccggcgacuccugcaacaacuacaugcugacguacaacaagguggagaacaugaccccccgggaccucggggcgugcaucgacugcagcgcccgccacaucaacgcccaggucgccaagucccacaacaucgcccugaucuggaacgugaaggacuucaugagccuguccgagcagcuccggaagcagauccgcagcgcggccaagaagaacaaccugcccuucaagcugaccugcgccaccacgcgccagguggucaacguggugaccaccaagaucgcccucaagggcgggugaggacuaguuauaagacugacuagcccgaugggccucccaacgggcccuccuccccuccuugcaccgagauuaauaaaaaaaaaaaaaaaaaaaaaaaaaaaaaaaaaaaaaaaaaaaaaaaaaaaaaaaaaaaaaaaaugcaucccccccccccccccccccccccccccccccaaaggcucuuuucagagccaccagaauu

SEQ ID NO: 21458 - RNA, 6058 nt, Artificial Sequence
  SARS-CoV-2__MT873239.1__non-structural protein 3 (NSP3) mRNA gc
aggagaaagcuuaccauggcccccaccaaggugaccuucggcgacgacacggucaucgaggugcagggguacaagagcgugaacaucaccuucgagcuggacgagcgcaucgacaagguccucaacgagaagugcuccgccuacaccguggagcugggcaccgaggugaacgaguucgcgugcgucguggccgacgccgugaucaagacgcugcagccggucagcgagcuccugaccccccuggggaucgaccucgacgagugguccauggccaccuacuaccuguucgacgagagcggcgaguucaagcuggccucccacauguacugcagcuucuacccccccgacgaggacgaggaggagggggacugcgaggaggaggaguucgagccguccacccaguacgaguacggcacggaggacgacuaccagggcaagccccucgaguucggggcgaccagcgccgcccugcagcccgaggaggagcaggaggaggacuggcuggacgacgacucccagcagaccgugggccagcaggacgggagcgaggacaaccagaccacgaccauccagaccaucguggagguccagccccagcucgagauggagcugaccccgguggugcagacgaucgaggucaacuccuucagcggcuaccugaagcucaccgacaacguguacaucaagaacgccgacaucguggaggaggcgaagaaggucaagcccaccgugguggucaacgccgccaacguguaccugaagcacgggggcggcguggccggggcccugaacaaggcgaccaacaacgccaugcaggucgaguccgacgacuacaucgccacgaacggcccccucaagguggggggcagcugcguccuguccggccacaaccuggccaagcacugccuccacgugguggggcccaacgucaacaagggcgaggacauccagcugcugaagagcgccuacgagaacuucaaccagcacgaggugcuccuggcgccgcugcucuccgccgggaucuucggcgccgaccccauccacagccugcgggugugcgucgacaccgugcgcaccaacguguaccuggccgucuucgacaagaaccucuacgacaagcugguguccagcuuccuggagaugaagagcgagaagcagguggagcagaagaucgccgagauccccaaggaggaggucaagcccuucaucaccgaguccaagccgagcguggagcagcggaagcaggacgacaagaagaucaaggcgugcguggaggaggucacgaccacccucgaggagaccaaguuccugacggagaaccugcuccuguacaucgacaucaacgggaaccugcaccccgacuccgccacccucgugagcgacaucgacaucaccuuccugaagaaggacgcccccuacaucgugggcgacgucgugcaggagggcgugcugaccgccgucgugauccccacgaagaaggccgggggcaccaccgagaugcucgcgaaggcccugcgcaaggugccgaccgacaacuacaucacgaccuaccccgggcagggccugaacggguacaccgucgaggaggccaagaccgugcucaagaagugcaaguccgccuucuacauccugcccagcaucaucuccaacgagaagcaggagauccugggcaccgugagcuggaaccuccgggagaugcuggcgcacgccgaggagacgcgcaagcugaugcccgucugcguggagaccaaggccaucguguccaccauccagcggaaguacaagggcaucaagauccaggagggggucguggacuacggcgcccgcuucuacuucuacaccagcaagacgaccguggccucccugaucaacacccucaacgaccugaacgagacccuggucacgaugccgcucggguacgugacccacggccugaaccuggaggaggcggcccgguacaugcgcagccucaaggugcccgccaccgucuccgugagcucccccgacgccgugaccgccuacaacggguaccugacgagcuccagcaagacccccgaggagcacuucaucgagaccaucucccuggcgggcagcuacaaggacuggagcuacuccggccagagcacccagcucgggaucgaguuccugaagcggggcgacaaguccgucuacuacacgagcaacccgaccaccuuccaccuggacggggaggugaucaccuucgacaaccucaagacgcugcugucccuccgcgaggugcggaccaucaaggucuucaccaccguggacaacaucaaccugcacacgcagguggucgacaugagcaugaccuacggccagcaguucggccccaccuaccuggacggggccgacgugaccaagaucaagccccacaacucccacgagggcaagacguucuacgugcucccgaacgacgacacccugcgcgucgaggccuucgaguacuaccacaccaccgaccccagcuuccuggggcgguacauguccgcccucaaccacacgaagaaguggaaguacccccaggugaacggccugaccagcaucaagugggccgacaacaacugcuaccuggcgaccgcccuccugacccugcagcagaucgagcucaaguucaaccccccggcccugcaggacgccuacuaccgcgcgcgggccggggaggccgccaacuucugcgcccugauccucgcguacugcaacaagacggugggcgagcugggcgacguccgcgagaccauguccuaccuguuccagcacgccaaccucgacagcugcaagcgggugcugaacgucgugugcaagaccugcgggcagcagcagaccacccugaagggcguggaggccgucauguacauggggacgcucuccuacgagcaguucaagaagggcgugcagauccccugcaccugcgggaagcaggccaccaaguaccuggugcagcaggagagccccuucgucaugauguccgcccccccggcgcaguacgagcugaagcacggcaccuucacgugcgccagcgaguacaccggcaacuaccagugcgggcacuacaagcacaucaccuccaaggagacccucuacugcaucgacggcgcccugcugacgaagagcagcgaguacaaggggcccaucaccgacguguucuacaaggagaacuccuacaccaccacgaucaagcccgugaccuacaagcucgacggcgucgugugcaccgagaucgaccccaagcuggacaacuacuacaagaaggacaacagcuacuucaccgagcagccgaucgaccuggugcccaaccagcccuaccccaacgccuccuucgacaacuucaaguucgucugcgacaacaucaaguucgccgacgaccucaaccagcugacgggguacaagaagccggcgagccgcgagcugaaggugaccuucuuccccgaccucaacggcgacguggucgccaucgacuacaagcacuacacccccuccuucaagaagggcgccaagcugcugcacaagcccaucguguggcacgugaacaacgccaccaacaaggcgacguacaagccgaacaccuggugcauccggugccucuggagcaccaagcccgucgagaccuccaacagcuucgacgugcugaaguccgaggacgcccaggggauggacaaccuggccugcgaggaccucaagcccgugagcgaggaggucguggagaaccccacgauccagaaggacgugcuggagugcaacgucaagaccaccgagguggugggcgacaucauccugaagccggccaacaacucccucaagaucaccgaggaggucgggcacacggaccugauggccgcguacguggacaacagcucccugaccaucaagaagcccaacgagcucagccgcgugcugggccugaagacccucgccacccacgggcuggccgccgucaacuccgugcccugggacacgaucgccaacuacgcgaagccguuccugaacaagguggucagcaccaccaccaacaucgugacgcgcugccucaaccgggugugcaccaacuacaugcccuacuucuucacccugcugcuccagcugugcaccuucacccgcuccacgaacagccggaucaaggccuccaugcccaccaccaucgccaagaacaccgucaagagcgugggcaaguucugccuggaggccagcuucaacuaccucaagucccccaacuucagcaagcugaucaacaucaucaucugguuccugcuccuguccgugugccugggcagccucaucuacuccacggccgcgcuggggguccugaugagcaaccucggcaugccguccuacugcaccggguaccgcgagggcuaccugaacagcaccaacgugaccaucgccacguacugcaccggcuccauccccugcagcgugugccuguccgggcucgacagccuggacaccuaccccucccuggagaccauccagaucacgaucagcuccuucaagugggaccucaccgccuucggccuggucgccgagugguuccuggccuacauccucuucacccgguucuucuacgugcuggggcuggcggccaucaugcagcucuucuucagcuacuucgccgugcacuucaucuccaacagcuggcugauguggcugaucaucaaccugguccagauggcccccaucuccgcgauggugcgcauguacaucuucuucgccagcuucuacuacguguggaagagcuacguccacgugguggacggcugcaacuccagcaccugcaugaugugcuacaagcggaaccgcgccacgcgggucgagugcaccaccaucgugaacgggguccgccgguccuucuacguguacgccaacggcggcaagggguucugcaagcuccacaacuggaacugcgugaacugcgacaccuucugcgccggcagcacguucaucuccgacgaggucgcgcgcgaccugagccugcaguucaagcggccgaucaaccccaccgaccaguccagcuacaucguggacuccgugaccgucaagaacgggagcauccaccucuacuucgacaaggccggccagaagaccuacgagcgccacucccugagccacuucgugaaccuggacaaccuccgggccaacaacacgaaggggucccugcccaucaacgugaucgucuucgacggcaagagcaagugcgaggaguccagcgccaaguccgccagcguguacuacucccagcugaugugccagcccauccuccugcuggaccaggcgcucgugagcgacgucggcgacagcgccgagguggccgugaagauguucgacgccuacgucaacaccuucuccagcaccuucaacgugccgauggagaagcugaagacccugguggccacggcggaggccgagcucgccaagaacgucucccuggacaacgugcugagcaccuucaucuccgccgcgcgccagggguucguggacagcgacgucgagaccaaggacgugguggagugccucaagcugucccaccagagcgacaucgaggucaccggcgacuccugcaacaacuacaugcugacguacaacaagguggagaacaugaccccccgggaccucggggccugcaucgacugcagcgcccgccacaucaacgcccagguggccaagucccacaacaucguccugaucuggaacgugaaggacuucaugagccuguccgagcagcuccggaagcagauccgcagcgcggccaagaagaacaaccugcccuucaagcugaccugcgccaccacgcgccagguggucaacguggugaccaccaagaucgcccucaagggcgggugaggacuaguuauaagacugacuagcccgaugggccucccaacgggcccuccuccccuccuugcaccgagauuaauaaaaaaaaaaaaaaaaaaaaaaaaaaaaaaaaaaaaaaaaaaaaaaaaaaaaaaaaaaaaaaaaugcaucccccccccccccccccccccccccccccccaaaggcucuuuucagagccaccagaauu

SEQ ID NO: 21459 - RNA, 6058 nt, Artificial Sequence
  SARS-CoV-2__MT873278.1__non-structural protein 3 (NSP3) mRNA gc
aggagaaagcuuaccauggcccccaccaaggugaccuucggcgacgacacggucaucgaggugcagggguacaagagcgugaacaucaccuucgagcuggacgagcgcaucgacaagguccucaacgagaagugcuccgccuacaccguggagcugggcaccgaggugaacgaguucgcgugcgucguggccgacgccgugaucaagacgcugcagccggucagcgagcuccugaccccccuggggaucgaccucgacgagugguccauggccaccuacuaccuguucgacgagagcggcgaguucaagcuggccucccacauguacugcagcuucuacccccccgacgaggacgaggaggagggggacugcgaggaggaggaguucgagccguccacccaguacgaguacggcacggaggacgacuaccagggcaagccccucgaguucggggcgaccagcgccgcccugcagcccgaggaggagcaggaggaggacuggcuggacgacgacucccagcagaccgugggccagcaggacgggagcgaggacaaccagaccacgaccauccagaccaucguggagguccagccccagcucgagauggagcugaccccgguggugcagacgaucgaggucaacuccuucagcggcuaccugaagcucaccgacaacguguacaucaagaacgccgacaucguggaggaggcgaagaaggucaagcccaccgugguggucaacgccgccaacguguaccugaagcacgggggcggcguggccggggcccugaacaaggcgaccaacaacgccaugcaggucgaguccgacgacuacaucgccacgaacggcccccucaagguggggggcagcugcguccuguccggccacaaccuggccaagcacugccuccacgugguggggcccaacgucaacaagggcgaggacauccagcugcugaagagcgccuacgagaacuucaaccagcacgaggugcuccuggcgccgcugcucuccgccgggaucuucggcgccgaccccauccacagccugcgggugugcgucgacaccgugcgcaccaacguguaccuggccgucuucgacaagaaccucuacgacaagcugguguccagcuuccuggagaugaagagcgagaagcagguggagcagaagaucgccgagauccccaaggaggaggucaagcccuucaucaccgaguccaagccgagcguggagcagcggaagcaggacgacaagaagaucaaggcgugcguggaggaggucacgaccacccucgaggagaccaaguuccugacggagaaccugcuccuguacaucgacaucaacgggaaccugcaccccgacuccgccacccucgugagcgacaucgacaucaccuuccugaagaaggacgcccccuacaucgugggcgacgucgugcaggagggcgugcugaccgccgucgugauccccacgaagaaggccgggggcaccaccgagaugcucgcgaaggcccugcgcaaggugccgaccgacaacuacaucacgaccuaccccgggcagggccugaacggguacaccgucgaggaggccaagaccgugcucaagaagugcaaguccgccuucuacauccugcccagcaucaucuccaacgagaagcaggagauccugggcaccgugagcuggaaccuccgggagaugcuggcgcacgccgaggagacgcgcaagcugaugcccgucugcguggagaccaaggccaucguguccaccauccagcggaaguacaagggcaucaagauccaggagggggucguggacuacggcgcccgcuucuacuucuacaccagcaagacgaccguggccucccugaucaacacccucaacgaccugaacgagacccuggucacgaugccgcucggguacgugacccacggccugaaccuggaggaggcggcccgguacaugcgcagccucaaggugcccgccaccgucuccgugagcucccccgacgccgugaccgccuacaacggguaccugacgagcuccagcaagacccccgaggagcacuucaucgagaccaucucccuggcgggcagcuacaaggacuggagcuacuccggccagagcacccagcucgggaucgaguuccugaagcggggcgacaaguccgucuacuacacgagcaacccgaccaccuuccaccuggacggggaggugaucaccuucgacaaccucaagacgcugcugucccuccgcgaggugcggaccaucaaggucuucaccaccguggacaacaucaaccugcacacgcagguggucgacaugagcaugaccuacggccagcaguucggccccaccuaccuggacggggccgacgugaccaagaucaagccccacaacucccacgagggcaagacguucuacgugcucccgaacgacgacacccugcgcgucgaggccuucgaguacuaccacaccaccgaccccagcuuccuggggcgguacauguccgcccucaaccacacgaagaaguggaaguacccccaggugaacggccugaccagcaucaagugggccgacaacaacugcuaccuggcgaccgcccuccugacccugcagcagaucgagcucaaguucaaccccccggcccugcaggacgccuacuaccgcgcgcgggccggggaggccgccaacuucugcgcccugauccucgcguacugcaacaagacggugggcgagcugggcgacguccgcgagaccauguccuaccuguuccagcacgccaaccucgacagcugcaagcgggugcugaacgucgugugcaagaccugcgggcagcagcagaccacccugaagggcguggaggccgucauguacauggggacgcucuccuacgagcaguucaagaagggcgugcagauccccugcaccugcgggaagcaggccaccaaguaccuggugcagcaggagagccccuucgucaugauguccgcccccccggcgcaguacgagcugaagcacggcaccuucacgugcgccagcgaguacaccggcaacuaccagugcgggcacuacaagcacaucaccuccaaggagacccucuacugcaucgacggcgcccugcugacgaagagcagcgaguacaaggggcccaucaccgacguguucuacaaggagaacuccuacaccaccacgaucaagcccgugaccuacaagcucgacggcgucgugugcaccgagaucgaccccaagcuggacaacuacuacaagaaggacaacagcuacuucaccgagcagccgaucgaccuggugcccaaccagcccuaccccaacgccuccuucgacaacuucaaguucgucugcgacaacaucaaguucgccgacgaccucaaccagcugacgggguacaagaagccggcgagccgcgagcugaaggugaccuucuuccccgaccucaacggcgacguggucgccaucgacuacaagcacuacacccccuccuucaagaagggcgccaagcugcugcacaagcccaucguguggcacgugaacaacgccaccaacaaggcgacguacaagccgaacaccuggugcauccggugccucuggagcaccaagcccgucgagaccuccaacagcuucgacgugcugaaguccgaggacgcccaggggauggacaaccuggccugcgaggaccucaagcccgugagcgaggaggucguggagaaccccacgauccagaaggacgugcuggagugcaacgucaagaccaccgagguggugggcgacaucauccugaagccggccaacaacucccucaagaucaccgaggaggucgggcacacggaccugauggccgcguacguggacaacagcucccugaccaucaagaagcccaacgagcucagccgcgugcugggccugaagacccucgccacccacgggcuggccgccgucaacuccgugcccugggacacgaucgccaacuacgcgaagccguuccugaacaagguggucagcaccaccaccaacaucgugacgcgcugccucaaccgggugugcaccaacuacaugcccuacuucuucacccugcugcuccagcugugcaccuucacccgcuccacgaacagccggaucaaggccuccaugcccaccaccaucgccaagaacaccgucaagagcgugggcaaguucugccuggaggccagcuucaacuaccucaagucccccaacuucagcaagcugaucaacaucaucaucugguuccugcuccuguccgugugccugggcagccucaucuacuccacggccgcgcuggggguccugaugagcaaccucggcaugccguccuacugcaccggguaccgcgagggcuaccugaacagcaccaacgugaccaucgccacguacugcaccggcuccauccccugcagcgugugccuguccgggcucgacagccuggacaccuaccccucccuggagaccauccagaucacgaucagcuccuucaagugggaccucaccgccuucggccuggucgccgagugguuccuggccuacauccucuucacccgguucuucuacgugcuggggcuggcggugaucaugcagcucuucuucagcuacuucgccguccacuucaucuccaacagcuggcugauguggcugaucaucaaccuggugcagauggcccccaucuccgccauggugcgcauguacaucuucuucgcgagcuucuacuacgucuggaagagcuacgugcacguggucgacggcugcaacuccagcaccugcaugaugugcuacaagcggaaccgcgccacgcggguggagugcaccaccaucgucaacggggugcgccgguccuucuacguguacgccaacggcggcaagggguucugcaagcuccacaacuggaacugcgucaacugcgacaccuucugcgccggcagcacguucaucuccgacgagguggcccgcgaccugagccugcaguucaagcggccgaucaaccccaccgaccaguccagcuacaucguggacuccgucaccgugaagaacgggagcauccaccucuacuucgacaaggcgggccagaagaccuacgagcgccacucccugagccacuucgugaaccuggacaaccuccgggccaacaacacgaaggggucccugcccaucaacgucaucguguucgacggcaagagcaagugcgaggaguccagcgccaaguccgccagcguguacuacucccagcugaugugccagcccauccuccugcuggaccaggcccucgucagcgacgugggcgacagcgcggagguggccgucaagauguucgacgccuacgugaacaccuucuccagcaccuucaacgugccgauggagaagcugaagacccuggucgccacggccgaggcggagcucgccaagaacgugucccuggacaacgugcugagcaccuucaucuccgccgcccgccagggguucgucgacagcgacguggagaccaaggacguggucgagugccucaagcugucccaccagagcgacaucgaggugaccggcgacuccugcaacaacuacaugcugacguacaacaagguggagaacaugaccccccgggaccucggggcgugcaucgacugcagcgcccgccacaucaacgcccaggucgccaagucccacaacaucgcccugaucuggaacgugaaggacuucaugagccuguccgagcagcuccggaagcagauccgcagcgcggccaagaagaacaaccugcccuucaagcugaccugcgccaccacgcgccagguggucaacguggugaccaccaagaucgcccucaagggcgggugaggacuaguuauaagacugacuagcccgaugggccucccaacgggcccuccuccccuccuugcaccgagauuaauaaaaaaaaaaaaaaaaaaaaaaaaaaaaaaaaaaaaaaaaaaaaaaaaaaaaaaaaaaaaaaaaugcaucccccccccccccccccccccccccccccccaaaggcucuuuucagagccaccagaauu

SEQ ID NO: 21460 - RNA, 6058 nt, Artificial Sequence
  SARS-CoV-2__MT873350.1__non-structural protein 3 (NSP3) mRNA gc
aggagaaagcuuaccauggcccccaccaaggugaccuucggcgacgacacggucaucgaggugcagggguacaagagcgugaacaucaccuucgagcuggacgagcgcaucgacaagguccucaacgagaagugcuccgccuacaccguggagcugggcaccgaggugaacgaguucgcgugcgucguggccgacgccgugaucaagacgcugcagccggucagcgagcuccugaccccccuggggaucgaccucgacgagugguccauggccaccuacuaccuguucgacgagagcggcgaguucaagcuggccucccacauguacugcagcuucuacccccccgacgaggacgaggaggagggggacugcgaggaggaggaguucgagccguccacccaguacgaguacggcaucgaggacgacuaccagggcaagccccucgaguucggggcgacgagcgccgcccugcagcccgaggaggagcaggaggaggacuggcuggacgacgacucccagcagaccgugggccagcaggacgggagcgaggacaaccagaccaccacgauccagaccaucguggagguccagccccagcucgagauggagcugaccccgguggugcagaccaucgaggucaacuccuucagcggcuaccugaagcucacggacaacguguacaucaagaacgccgacaucguggaggaggcgaagaaggucaagcccaccgugguggucaacgccgccaacguguaccugaagcacgggggcggcguggccggggcccugaacaaggcgaccaacaacgccaugcaggucgaguccgacgacuacaucgccaccaacggcccccucaagguggggggcagcugcguccuguccggccacaaccuggccaagcacugccuccacgugguggggcccaacgucaacaagggcgaggacauccagcugcugaagagcgccuacgagaacuucaaccagcacgaggugcuccuggcgccgcugcucuccgccgggaucuucggcgccgaccccauccacagccugcgggugugcgucgacacggugcgcaccaacguguaccuggccgucuucgacaagaaccucuacgacaagcugguguccagcuuccuggagaugaagagcgagaagcagguggagcagaagaucgccgagauccccaaggaggaggucaagcccuucaucaccgaguccaagccgagcguggagcagcggaagcaggacgacaagaagaucaaggcgugcguggaggaggucaccacgacccucgaggagaccaaguuccugaccgagaaccugcuccuguacaucgacaucaacgggaaccugcaccccgacuccgccacgcucgugagcgacaucgacaucaccuuccugaagaaggacgcccccuacaucgugggcgacgucgugcaggagggcgugcugaccgccgucgugauccccaccaagaaggccgggggcacgaccgagaugcucgcgaaggcccugcgcaaggugccgaccgacaacuacaucaccacguaccccgggcagggccugaacggguacaccgucgaggaggccaagaccgugcucaagaagugcaaguccgccuucuacauccugcccagcaucaucuccaacgagaagcaggagauccugggcaccgugagcuggaaccuccgggagaugcuggcgcacgccgaggagacccgcaagcugaugcccgucugcguggagacgaaggccaucguguccaccauccagcggaaguacaagggcaucaagauccaggagggggucguggacuacggcgcccgcuucuacuucuacaccagcaagaccacgguggccucccugaucaacacccucaacgaccugaacgagacccuggucaccaugccgcucggguacgugacgcacggccugaaccuggaggaggcggcccgguacaugcgcagccucaaggugcccgccaccgucuccgugagcucccccgacgccgugaccgccuacaacggguaccugaccagcuccagcaagacgcccgaggagcacuucaucgagaccaucucccuggcgggcagcuacaaggacuggagcuacuccggccagagcacccagcucgggaucgaguuccugaagcggggcgacaaguccgucuacuacaccagcaacccgacgaccuuccaccuggacggggaggugaucaccuucgacaaccucaagacccugcugucccuccgcgaggugcggacgaucaaggucuucaccaccguggacaacaucaaccugcacacccagguggucgacaugagcaugacguacggccagcaguucggccccaccuaccuggacggggccgacgugaccaagaucaagccccacaacucccacgagggcaagaccuucuacgugcucccgaacgacgacacgcugcgcgucgaggccuucgaguacuaccacaccaccgaccccagcuuccuggggcgguacauguccgcccucaaccacaccaagaaguggaaguacccccaggugaacggccugacgagcaucaagugggccgacaacaacugcuaccuggcgaccgcccuccugacccugcagcagaucgagcucaaguucaaccccccggcccugcaggacgccuacuaccgcgcgcgggccggggaggccgccaacuucugcgcccugauccucgcguacugcaacaagaccgugggcgagcugggcgacguccgcgagacgauguccuaccuguuccagcacgccaaccucgacagcugcaagcgggugcugaacgucgugugcaagaccugcgggcagcagcagaccacccugaagggcguggaggccgucauguacauggggacccucuccuacgagcaguucaagaagggcgugcagauccccugcacgugcgggaagcaggccaccaaguaccuggugcagcaggagagccccuucgucaugauguccgcccccccggcgcaguacgagcugaagcacggcaccuucaccugcgccagcgaguacacgggcaacuaccagugcgggcacuacaagcacaucaccuccaaggagacccucuacugcaucgacggcgcccugcugaccaagagcagcgaguacaaggggcccaucacggacguguucuacaaggagaacuccuacaccaccaccaucaagcccgugacguacaagcucgacggcgucgugugcaccgagaucgaccccaagcuggacaacuacuacaagaaggacaacagcuacuucaccgagcagccgaucgaccuggugcccaaccagcccuaccccaacgccuccuucgacaacuucaaguucgucugcgacaacaucaaguucgccgacgaccucaaccagcugaccggguacaagaagccggcgagccgcgagcugaaggugacguucuuccccgaccucaacggcgacguggucgccaucgacuacaagcacuacacccccuccuucaagaagggcgccaagcugcugcacaagcccaucguguggcacgugaacaacgccaccaacaaggcgaccuacaagccgaacacguggugcauccggugccucuggagcaccaagcccgucgagaccuccaacagcuucgacgugcugaaguccgaggacgcccaggggauggacaaccuggccugcgaggaccucaagcccgugagcgaggaggucguggagaaccccaccauccagaaggacgugcuggagugcaacgucaagacgaccgagguggugggcgacaucauccugaagccggccaacaacucccucaagaucaccgaggaggucgggcacaccgaccugauggccgcguacguggacaacagcucccugacgaucaagaagcccaacgagcucagccgcgugcugggccugaagacccucgccacccacgggcuggccgccgucaacuccgugcccugggacaccaucgccaacuacgcgaagccguuccugaacaagguggucagcacgaccaccaacaucgugacccgcugccucaaccgggugugcacgaacuacaugcccuacuucuucacccugcugcuccagcugugcaccuucacccgcuccaccaacagccggaucaaggccuccaugcccacgaccaucgccaagaacaccgucaagagcgugggcaaguucugccuggaggccagcuucaacuaccucaagucccccaacuucagcaagcugaucaacaucaucaucugguuccugcuccuguccgugugccugggcagccucaucuacuccaccgccgcgcuggggguccugaugagcaaccucggcaugccguccuacugcacgggguaccgcgagggcuaccugaacagcaccaacgugaccaucgccaccuacugcacgggcuccauccccugcagcgugugccuguccgggcucgacagccuggacaccuaccccucccuggagaccauccagaucaccaucagcuccuucaagugggaccucacggccuucggccuggucgccgagugguuccuggccuacauccucuucacccgguucuucuacgugcuggggcuggcggccaucaugcagcucuucuucagcuacuucgccgugcacuucaucuccaacagcuggcugauguggcugaucaucaaccugguccagauggcccccaucuccgcgauggugcgcauguacaucuucuucgccagcuucuacuacguguggaagagcuacguccacgugguggacggcugcaacuccagcaccugcaugaugugcuacaagcggaaccgcgccacccgggucgagugcacgaccaucgugaacgggguccgccgguccuucuacguguacgccaacggcggcaagggguucugcaagcuccacaacuggaacugcgugaacugcgacaccuucugcgccggcagcaccuucaucuccgacgaggucgcgcgcgaccugagccugcaguucaagcggccgaucaaccccacggaccaguccagcuacaucguggacuccgugaccgucaagaacgggagcauccaccucuacuucgacaaggccggccagaagaccuacgagcgccacucccugagccacuucgugaaccuggacaaccuccgggccaacaacaccaaggggucccugcccaucaacgugaucgucuucgacggcaagagcaagugcgaggaguccagcgccaaguccgccagcguguacuacucccagcugaugugccagcccauccuccugcuggaccaggcgcucgugagcgacgucggcgacagcgccgagguggccgugaagauguucgacgccuacgucaacacguucuccagcaccuucaacgugccgauggagaagcugaagacccugguggccaccgcggaggccgagcucgccaagaacgucucccuggacaacgugcugagcacguucaucuccgccgcgcgccagggguucguggacagcgacgucgagaccaaggacgugguggagugccucaagcugucccaccagagcgacaucgaggucaccggcgacuccugcaacaacuacaugcugaccuacaacaagguggagaacaugacgccccgggaccucggggccugcaucgacugcagcgcccgccacaucaacgcccagguggccaagucccacaacaucgcgcugaucuggaacgucaaggacuucaugagccuguccgagcagcuccggaagcagauccgcagcgccgccaagaagaacaaccugcccuucaagcugaccugcgccaccacccgccagguggugaacgucgugacgaccaagaucgcccucaagggcgggugaggacuaguuauaagacugacuagcccgaugggccucccaacgggcccuccuccccuccuugcaccgagauuaauaaaaaaaaaaaaaaaaaaaaaaaaaaaaaaaaaaaaaaaaaaaaaaaaaaaaaaaaaaaaaaaaugcaucccccccccccccccccccccccccccccccaaaggcucuuuucagagccaccagaauu

SEQ ID NO: 21461 - RNA, 6058 nt, Artificial Sequence
  SARS-CoV-2__MT873444.1__non-structural protein 3 (NSP3) mRNA gc
aggagaaagcuuaccauggcccccaccaaggugaccuucggcgacgacacggucaucgaggugcagggguacaagagcgugaacaucaccuucgagcuggacgagcgcaucgacaagguccucaacgagaagugcuccgccuacaccguggagcugggcaccgaggugaacgaguucgcgugcgucguggccgacgccgugaucaagacgcugcagccggucagcgagcuccugaccccccuggggaucgaccucgacgagugguccauggccaccuacuaccuguucgacgagagcggcgaguucaagcuggccucccacauguacugcagcuucuacccccccgacgaggacgaggaggagggggacugcgaggaggaggaguucgagccguccacccaguacgaguacggcacggaggacgacuaccagggcaagccccucgaguucggggcgaccagcgccgcccugcagcccgaggaggagcaggaggaggacuggcuggacgacgacucccagcagaccgugggccagcaggacgggagcgaggacaaccagaccacgaccauccagaccaucguggagguccagccccagcucgagauggagcugaccccgguggugcagacgaucgaggucaacuccuucagcggcuaccugaagcucaccgacaacguguacaucaagaacgccgacaucguggaggaggcgaagaaggucaagcccaccgugguggucaacgccgccaacguguaccugaagcacgggggcggcguggccggggcccugaacaaggcgaccaacaacgccaugcaggucgaguccgacgacuacaucgccacgaacggcccccucaagguggggggcagcugcguccuguccggccacaaccuggccaagcacugccuccacgugguggggcccaacgucaacaagggcgaggacauccagcugcugaagagcgccuacgagaacuucaaccagcacgaggugcuccuggcgccgcugcucuccgccgggaucuucggcgccgaccccauccacagccugcgggugugcgucgacaccgugcgcaccaacguguaccuggccgucuucgacaagaaccucuacgacaagcugguguccagcuuccuggagaugaagagcgagaagcagguggagcagaagaucgccgagauccccaaggaggaggucaagcccuucaucaccgaguccaagccgagcguggagcagcggaagcaggacgacaagaagaucaaggcgugcguggaggaggucacgaccacccucgaggagaccaaguuccugacggagaaccugcuccuguacaucgacaucaacgggaaccugcaccccgacuccgccacccucgugagcgacaucgacaucaccuuccugaagaaggacgcccccuacaucgugggcgacgucgugcaggagggcgugcugaccgccgucgugauccccacgaagaaggccgggggcaccaccgagaugcucgcgaaggcccugcgcaaggugccgaccgacaacuacaucacgaccuaccccgggcagggccugaacggguacaccgucgaggaggccaagaccgugcucaagaagugcaaguccgccuucuacauccugcccagcaucaucuccaacgagaagcaggagauccugggcaccgugagcuggaaccuccgggagaugcuggcgcacgccgaggagacgcgcaagcugaugcccgucugcguggagaccaaggccaucguguccaccauccagcggaaguacaagggcaucaagauccaggagggggucguggacuacggcgcccgcuucuacuucuacaccagcaagacgaccguggccucccugaucaacacccucaacgaccugaacgagacccuggucacgaugccgcucggguacgugacccacggccugaaccuggaggaggcggcccgguacaugcgcagccucaaggugcccgccaccgucuccgugagcucccccgacgccgugaccgccuacaacggguaccugacgagcuccagcaagacccccgaggagcacuucaucgagaccaucucccuggcgggcagcuacaaggacuggagcuacuccggccagagcacccagcucgggaucgaguuccugaagcggggcgacaaguccgucuacuacacgagcaacccgaccaccuuccaccuggacggggaggugaucaccuucgacaaccucaagacgcugcugucccuccgcgaggugcggaccaucaaggucuucaccaccguggacaacaucaaccugcacacgcagguggucgacaugagcaugaccuacggccagcaguucggccccaccuaccuggacggggccgacgugaccaagaucaagccccacaacucccacgagggcaagacguucuacgugcucccgaacgacgacacccugcgcgucgaggccuucgaguacuaccacaccaccgaccccagcuuccuggggcgguacauguccgcccucaaccacacgaagaaguggaaguacccccaggugaacggccugaccagcaucaagugggccgacaacaacugcuaccuggcgaccgcccuccugacccugcagcagaucgagcucaaguucaaccccccggcccugcaggacgccuacuaccgcgcgcgggccggggaggccgccaacuucugcgcccugauccucgcguacugcaacaagacggugggcgagcugggcgacguccgcgagaccauguccuaccuguuccagcacgccaaccucgacagcugcaagcgggugcugaacgucgugugcaagaccugcgggcagcagcagaccacccugaagggcguggaggccgucauguacauggggacgcucuccuacgagcaguucaagaagggcgugcagauccccugcaccugcgggaagcaggccaccaaguaccuggugcagcaggagagccccuucgucaugauguccgcccccccggcgcaguacgagcugaagcacggcaccuucacgugcgccagcgaguacaccggcaacuaccagugcgggcacuacaagcacaucaccuccaaggagacccucuacugcaucgacggcgcccugcugacgaagagcagcgaguacaaggggcccaucaccgacguguucuacaaggagaacuccuacaccaccacgaucaagcccgugaccuacaagcucgacggcgucgugugcaccgagaucgaccccaagcuggacaacuacuacaagaaggacaacagcuacuucaccgagcagccgaucgaccuggugcccaaccagcccuaccccaacgccuccuucgacaacuucaaguucgucugcgacaacaucaaguucgccgacgaccucaaccagcugacgggguacaagaagccggcgagccgcgagcugaaggugaccuucuuccccgaccucaacggcgacguggucgccaucgacuacaagcacuacacccccuccuucaagaagggcgccaagcugcugcacaagcccaucguguggcacgugaacaacgccaccaacaaggcgacguacaagccgaacaccuggugcauccggugccucuggagcaccaagcccgucgagaccuccaacagcuucgacgugcugaaguccgaggacgcccaggggauggacaaccuggccugcgaggaccucaagcccgugagcgaggaggucguggagaaccccacgauccagaaggacgugcuggagugcaacgucaagaccaccgagguggugggcgacaucauccugaagccggccaacaacucccucaagaucaccgaggaggucgggcacacggaccugauggccgcguacguggacaacagcucccugaccaucaagaagcccaacgagcucagccgcgugcugggccugaagacccucgccacccacgggcuggccgccgucaacuccgugcccugggacacgaucgccaacuacgcgaagccguuccugaacaagguggucagcaccaccaccaacaucgugacgcgcugccucaaccgggugugcaccaacuacaugcccuacuucuucacccugcugcuccagcugugcaccuucacccgcuccacgaacagccggaucaaggccuccaugcccaccaccaucgccaagaacaccgucaagagcgugggcaaguucugccuggaggccagcuucaacuaccucaagucccccaacuucagcaagcugaucaacaucaucaucugguuccugcuccuguccgugugccugggcagccucaucuacuccacggccgcgcuggggguccugaugagcaaccucggcaugccguccuacugcaccggguaccgcgagggcuaccugaacagcaccaacgugaccaucgccacguacugcaccggcuccauccccugcagcgugugccuguccgggcucgacagccuggacaccuaccccucccuggagaccauccagaucacgaucagcuccuucaagugggaccucaccgccuucggccuggucgccgagugguuccuggccuacauccucuucacccgguucuucuacgugcuggggcuggcggccaucaugcagcucuucuucagcuacuucgccgugcacuucaucuccaacagcuggcugauguggcugaucaucaaccugguccagauggcccccaucuccgcgauggugcgcauguacaucuucuucgccagcuucuacuacguguggaagagcuacguccacgugguggacggcugcaacuccagcaccugcaugaugugcuacaagcggaaccgcgccacgcgggucgagugcaccaccaucgugaacgggguccgccgguccuucuacguguacgccaacggcggcaagggguucugcaagcuccacaacuggaacugcgugaacugcgacaccuucugcgccggcagcacguucaucuccgacgaggucgcgcgcgaccugagccugcaguucaagcggccgaucaaccccaccgaccaguccagcuacaucguggacaucgugaccgucaagaacggguccauccaccucuacuucgacaaggccggccagaagaccuacgagcgccacagccugucccacuucgugaaccuggacaaccuccgggccaacaacacgaaggggagccugcccaucaacgugaucgucuucgacggcaaguccaagugcgaggagagcuccgccaagagcgccuccguguacuacagccagcugaugugccagcccauccuccugcuggaccaggcgcucguguccgacgucggcgacagcgccgagguggccgugaagauguucgacgccuacgucaacaccuucagcuccaccuucaacgugccgauggagaagcugaagacccugguggccacggcggaggccgagcucgccaagaacgucagccuggacaacgugcuguccaccuucaucagcgccgcgcgccagggguucguggacuccgacgucgagaccaaggacgugguggagugccucaagcugagccaccaguccgacaucgaggucaccggcgacagcugcaacaacuacaugcugacguacaacaagguggagaacaugaccccccgggaccucggggccugcaucgacugcuccgcccgccacaucaacgcccagguggccaagagccacaacaucgcgcugaucuggaacgucaaggacuucaugucccugagcgagcagcuccggaagcagauccgcuccgccgccaagaagaacaaccugcccuucaagcugaccugcgccaccacgcgccagguggugaacgucgugaccaccaagaucgcccucaagggcgggugaggacuaguuauaagacugacuagcccgaugggccucccaacgggcccuccuccccuccuugcaccgagauuaauaaaaaaaaaaaaaaaaaaaaaaaaaaaaaaaaaaaaaaaaaaaaaaaaaaaaaaaaaaaaaaaaugcaucccccccccccccccccccccccccccccccaaaggcucuuuucagagccaccagaauu

SEQ ID NO: 21462 - RNA, 6058 nt, Artificial Sequence
  SARS-CoV-2__MT873462.1__non-structural protein 3 (NSP3) mRNA gc
aggagaaagcuuaccauggcccccaccaaggugaccuucggcgacgacacggucaucgaggugcagggguacaagagcgugaacaucaccuucgagcuggacgagcgcaucgacaagguccucaacgagaagugcuccgccuacaccguggagcugggcaccgaggugaacgaguucgcgugcgucguggccgacgccgugaucaagacgcugcagccggucagcgagcuccugaccccccuggggaucgaccucgacgagugguccauggccaccuacuaccuguucgacgagagcggcgaguucaagcuggccucccacauguacugcagcuucuacccccccgacgaggacgaggaggagggggacugcgaggaggaggaguucgagccguccacccaguacgaguacggcacggaggacgacuaccagggcaagccccucgaguucggggcgaccagcgccgcccugcagcccgaggaggagcaggaggaggacuggcuggacgacgacucccagcagaccgugggccagcaggacgggagcgaggacaaccagaccacgaccauccagaccaucguggagguccagccccagcucgagauggagcugaccccgguggugcagacgaucgaggucaacuccuucagcggcuaccugaagcucaccgacaacguguacaucaagaacgccgacaucguggaggaggcgaagaaggucaagcccaccgugguggucaacgccgccaacguguaccugaagcacgggggcggcguggccggggcccugaacaaggcgaccaacaacgccaugcaggucgaguccgacgacuacaucgccacgaacggcccccucaagguggggggcagcugcguccuguccggccacaaccuggccaagcacugccuccacgugguggggcccaacgucaacaagggcgaggacauccagcugcugaagagcgccuacgagaacuucaaccagcacgaggugcuccuggcgccgcugcucuccgccgggaucuucggcgccgaccccauccacagccugcgggugugcgucgacaccgugcgcaccaacguguaccuggccgucuucgacaagaaccucuacgacaagcugguguccagcuuccuggagaugaagagcgagaagcagguggagcagaagaucgccgagauccccaaggaggaggucaagcccuucaucaccgaguccaagccgagcguggagcagcggaagcaggacgacaagaagaucaaggcgugcguggaggaggucacgaccacccucgaggagaccaaguuccugacggagaaccugcuccuguacaucgacaucaacgggaaccugcaccccgacuccgccacccucgugagcgacaucgacaucaccuuccugaagaaggacgcccccuacaucgugggcgacgucgugcaggagggcgugcugaccgccgucgugauccccacgaagaaggccgggggcaccaccgagaugcucgcgaaggcccugcgcaaggugccgaccgacaacuacaucacgaccuaccccgggcagggccugaacggguacaccgucgaggaggccaagaccgugcucaagaagugcaaguccgccuucuacauccugcccagcaucaucuccaacgagaagcaggagauccugggcaccgugagcuggaaccuccgggagaugcuggcgcacgccgaggagacgcgcaagcugaugcccgucugcguggagaccaaggccaucguguccaccauccagcggaaguacaagggcaucaagauccaggagggggucguggacuacggcgcccgcuucuacuucuacaccagcaagacgaccguggccucccugaucaacacccucaacgaccugaacgagacccuggucacgaugccgcucggguacgugacccacggccugaaccuggaggaggcggcccgguacaugcgcagccucaaggugcccgccaccgucuccgugagcucccccgacgccgugaccgccuacaacggguaccugacgagcuccagcaagacccccgaggagcacuucaucgagaccaucucccuggcgggcagcuacaaggacuggagcuacuccggccagagcacccagcucgggaucgaguuccugaagcggggcgacaaguccgucuacuacacgagcaacccgaccaccuuccaccuggacggggaggugaucaccuucgacaaccucaagacgcugcugucccuccgcgaggugcggaccaucaaggucuucaccaccguggacaacaucaaccugcacacgcagguggucgacaugagcaugaccuacggccagcaguucugccccaccuaccuggacggcgccgacgugaccaagaucaagccccacaacucccacgaggggaagacguucuacgugcucccgaacgacgacacccugcgcgucgaggccuucgaguacuaccacaccaccgaccccagcuuccugggccgguacauguccgcccucaaccacacgaagaaguggaaguacccccaggugaacgggcugaccagcaucaagugggccgacaacaacugcuaccuggcgaccgcccuccugacccugcagcagaucgagcucaaguucaaccccccggcccugcaggacgccuacuaccgcgcgcgggccggcgaggccgccaacuucugcgcccugauccucgcguacugcaacaagacggugggggagcugggcgacguccgcgagaccauguccuaccuguuccagcacgccaaccucgacagcugcaagcgggugcugaacgucgugugcaagaccugcggccagcagcagaccacccugaaggggguggaggccgucauguacaugggcacgcucuccuacgagcaguucaagaagggggugcagauccccugcaccugcggcaagcaggccaccaaguaccuggugcagcaggagagccccuucgucaugauguccgcccccccggcgcaguacgagcugaagcacgggaccuucacgugcgccagcgaguacaccggcaacuaccagugcggccacuacaagcacaucaccuccaaggagacccucuacugcaucgacggggcccugcugacgaagagcagcgaguacaagggccccaucaccgacguguucuacaaggagaacuccuacaccaccacgaucaagcccgugaccuacaagcucgacggggucgugugcaccgagaucgaccccaagcuggacaacuacuacaagaaggacaacagcuacuucaccgagcagccgaucgaccuggugcccaaccagcccuaccccaacgccuccuucgacaacuucaaguucgucugcgacaacaucaaguucgccgacgaccucaaccagcugacgggcuacaagaagccggcgagccgcgagcugaaggugaccuucuuccccgaccucaacggggacguggucgccaucgacuacaagcacuacacccccuccuucaagaagggcgccaagcugcugcacaagcccaucguguggcacgugaacaacgccaccaacaaggcgacguacaagccgaacaccuggugcauccggugccucuggagcaccaagcccgucgagaccuccaacagcuucgacgugcugaaguccgaggacgcccagggcauggacaaccuggccugcgaggaccucaagcccgugagcgaggaggucguggagaaccccacgauccagaaggacgugcuggagugcaacgucaagaccaccgagguggugggggacaucauccugaagccggccaacaacucccucaagaucaccgaggaggucggccacacggaccugauggccgcguacguggacaacagcucccugaccaucaagaagcccaacgagcucagccgcgugcuggggcugaagacccucgccacccacggccuggccgccgucaacuccgugcccugggacacgaucgccaacuacgcgaagccguuccugaacaagguggucagcaccaccaccaacaucgugacgcgcugccucaaccgggugugcaccaacuacaugcccuacuucuucacccugcugcuccagcugugcaccuucacccgcuccacgaacagccggaucaaggccuccaugcccaccaccaucgccaagaacaccgucaagagcguggggaaguucugccuggaggccagcuucaacuaccucaagucccccaacuucagcaagcugaucaacaucaucaucugguuccugcuccuguccgugugccugggcagccucaucuacuccacggccgcgcugggcguccugaugagcaaccucgggaugccguccuacugcaccggcuaccgcgagggguaccugaacagcaccaacgugaccaucgccacguacugcaccggcuccauccccugcagcgugugccuguccggccucgacagccuggacaccuaccccucccuggagaccauccagaucacgaucagcuccuucaagugggaccucaccgccuucgggcuggucgccgagugguuccuggccuacauccucuucacccgguucuucuacgugcugggccuggcggccaucaugcagcucuucuucagcuacuucgccgugcacuucaucuccaacagcuggcugauguggcugaucaucaaccugguccagauggcccccaucuccgcgauggugcgcauguacaucuucuucgccagcuucuacuacguguggaagagcuacguccacgugguggacgggugcaacuccagcaccugcaugaugugcuacaagcggaaccgcgccacgcgggucgagugcaccaccaucgugaacggcguccgccgguccuucuacguguacgccaacgggggcaagggcuucugcaagcuccacaacuggaacugcgugaacugcgacaccuucugcgccgggagcacguucaucuccgacgaggucgcgcgcgaccugagccugcaguucaagcggccgaucaaccccaccgaccaguccagcuacaucguggacuccgugaccgucaagaacggcagcauccaccucuacuucgacaaggccgggcagaagaccuacgagcgccacucccugagccacuucgugaaccuggacaaccuccgggccaacaacacgaagggcucccugcccaucaacgugaucgucuucgacgggaagagcaagugcgaggaguccagcgccaaguccgccagcguguacuacucccagcugaugugccagcccauccuccugcuggaccaggcgcucgugagcgacgucggcgacagcgccgagguggccgugaagauguucgacgccuacgucaacaccuucuccagcaccuucaacgugccgauggagaagcugaagacccugguggccacggcggaggccgagcucgccaagaacgucucccuggacaacgugcugagcaccuucaucuccgccgcgcgccagggcuucguggacagcgacgucgagaccaaggacgugguggagugccucaagcugucccaccagagcgacaucgaggucaccggggacuccugcaacaacuacaugcugacguacaacaagguggagaacaugaccccccgggaccucggcgccugcaucgacugcagcgcccgccacaucaacgcccagguggccaagucccacaacaucgcgcugaucuggaacgucaaggacuucaugagccuguccgagcagcuccggaagcagauccgcagcgccgccaagaagaacaaccugcccuucaagcugaccugcgccaccacgcgccagguggugaacgucgugaccaccaagaucgcccucaaggggggcugaggacuaguuauaagacugacuagcccgaugggccucccaacgggcccuccuccccuccuugcaccgagauuaauaaaaaaaaaaaaaaaaaaaaaaaaaaaaaaaaaaaaaaaaaaaaaaaaaaaaaaaaaaaaaaaaugcaucccccccccccccccccccccccccccccccaaaggcucuuuucagagccaccagaauu

SEQ ID NO: 21463 - RNA, 6058 nt, Artificial Sequence
  SARS-CoV-2__MT873500.1__non-structural protein 3 (NSP3) mRNA gc
aggagaaagcuuaccauggcccccaccaaggugaccuucggcgacgacacggucaucgaggugcagggguacaagagcgugaacaucaccuucgagcuggacgagcgcaucgacaagguccucaacgagaagugcuccgccuacaccguggagcugggcaccgaggugaacgaguucgcgugcgucguggccgacgccgugaucaagacgcugcagccggucagcgagcuccugaccccccuggggaucgaccucgacgagugguccauggccaccuacuaccuguucgacgagagcggcgaguucaagcuggccucccacauguacugcagcuucuacccccccgacgaggacgaggaggagggggacugcgaggaggaggaguucgagccguccacccaguacgaguacggcacggaggacgacuaccagggcaagccccucgaguucggggcgaccagcgccgcccugcagcccgaggaggagcaggaggaggacuggcuggacgacgacucccagcagaccgugggccagcaggacgggagcgaggacaaccagaccacgaccauccagaccaucguggagguccagccccagcucgagauggagcugaccccgguggugcagacgaucgaggucaacuccuucagcggcuaccugaagcucaccgacaacguguacaucaagaacgccgacaucguggaggaggcgaagaaggucaagcccaccgugguggucaacgccgccaacguguaccugaagcacgggggcggcguggccggggcccugaacaaggcgaccaacaacgccaugcaggucgaguccgacgacuacaucgccacgaacggcccccucaagguggggggcagcugcguccuguccggccacaaccuggccaagcacugccuccacgugguggggcccaacgucaacaagggcgaggacauccagcugcugaagagcgccuacgagaacuucaaccagcacgaggugcuccuggcgccgcugcucuccgccgggaucuucggcgccgaccccauccacagccugcgggugugcgucgacaccgugcgcaccaacguguaccuggccgucuucgacaagaaccucuacgacaagcugguguccagcuuccuggagaugaagagcgagaagcagguggagcagaagaucgccgagauccccaaggaggaggucaagcccuucaucaccgaguccaagccgagcguggagcagcggaagcaggacgacaagaagaucaaggcgugcguggaggaggucacgaccacccucgaggagaccaaguuccugacggagaaccugcuccuguacaucgacaucaacgggaaccugcaccccgacuccgccacccucgugagcgacaucgacaucaccuuccugaagaaggacgcccccuacaucgugggcgacgucgugcaggagggcgugcugaccgccgucgugauccccacgaagaaggccgggggcaccaccgagaugcucgcgaaggcccugcgcaaggugccgaccgacaacuacaucacgaccuaccccgggcagggccugaacggguacaccgucgaggaggccaagaccgugcucaagaagugcaaguccgccuucuacauccugcccagcaucaucuccaacgagaagcaggagauccugggcaccgugagcuggaaccuccgggagaugcuggcgcacgccgaggagacgcgcaagcugaugcccgucugcguggagaccaaggccaucguguccaccauccagcggaaguacaagggcaucaagauccaggagggggucguggacuacggcgcccgcuucuacuucuacaccagcaagacgaccguggccucccugaucaacacccucaacgaccugaacgagacccuggucacgaugccgcucggguacgugacccacggccugaaccuggaggaggcggcccgguacaugcgcagccucaaggugcccgccaccgucuccgugagcucccccgacgccgugaccgccuacaacggguaccugacgagcuccagcaagacccccgaggagcacuucaucgagaccaucucccuggcgggcagcuacaaggacuggagcuacuccggccagagcacccagcucgggaucgaguuccugaagcggggcgacaaguccgucuacuacacgagcaacccgaccaccuuccaccuggacggggaggugaucaccuucgacaaccucaagacgcugcugucccuccgcgaggugcggaccaucaaggucuucaccaccguggacaacaucaaccugcacacgcagguggucgacaugagcaugaccuacggccagcaguucggccccaccuaccuggacggggccgacgugaccaagaucaagccccacaacucccacgagggcaagacguucuacgugcucccgaacgacgacacccugcgcgucgaggccuucgaguacuaccacaccaccgaccccagcuuccuggggcgguacauguccgcccucaaccacacgaagaaguggaaguacccccaggugaacggccugaccagcaucaagugggccgacaacaacugcuaccuggcgaccgcccuccugacccugcagcagaucgagcucaaguucaaccccccggcccugcaggacgccuacuaccgcgcgcgggccggggaggccgccaacuucugcgcccugauccucgcguacugcaacaagacggugggcgagcugggcgacguccgcgagaccauguccuaccuguuccagcacgccaaccucgacagcugcaagcgggugcugaacgucgugugcaagaccugcgggcagcagcagaccacccugaagggcguggaggccgucauguacauggggacgcucuccuacgagcaguucaagaagggcgugcagauccccugcaccugcgggaagcaggccaccaaguaccuggugcagcaggagagccccuucgucaugauguccgcccccccggcgcaguacgagcugaagcacggcaccuucacgugcgccagcgaguacaccggcaacuaccagugcgggcacuacaagcacaucaccuccaaggagacccucuacugcaucgacggcgcccugcugacgaagagcagcgaguacaaggggcccaucaccgacguguucuacaaggagaacuccuacaccaccacgaucaagcccgugaccuacaagcucgacggcgucgugugcaccgagaucgaccccaagcuggacaacuacuacaagaaggacaacagcuacuucaccgagcagccgaucgaccuggugcccaaccagcccuaccccaacgccuccuucgacaacuucaaguucgucugcgacaacaucaaguucgccgacgaccucaaccagcugacgggguacaagaagccggcgagccgcgagcugaaggugaccuucuuccccgaccucaacggcgacguggucgccaucgacuacaagcacuacacccccuccuucaagaagggcgccaagcugcugcacaagcccaucguguggcacgugaacaacgccaccaacaaggcgacguacaagccgaacaccuggugcauccggugccucuggagcaccaagcccgucgagaccuccaacagcuucgacgugcugaaguccgaggacgcccaggggauggacaaccuggccugcgaggaccucaagcccgugagcgaggaggucguggagaaccccacgauccagaaggacgugcuggagugcaacgucaagaccaccgagguggugggcgacaucauccugaagccggccaacaacucccucaagaucaccgaggaggucgggcacacggaccugauggccgcguacguggacaacagcucccugaccaucaagaagcccaacgagcucagccgcgugcugggccugaagacccucgccacccacgggcuggccgucgugaacuccgugcccugggacacgaucgccaacuacgccaagccguuccugaacaaggucgugagcaccaccaccaacaucgugacgcgcugccucaaccgggucugcaccaacuacaugcccuacuucuucacccugcugcuccagcugugcaccuucacccgcuccacgaacagccggaucaaggcguccaugcccaccaccaucgccaagaacaccgugaagagcgugggcaaguucugccuggaggccagcuucaacuaccucaagucccccaacuucagcaagcugaucaacaucaucaucugguuccugcuccuguccgucugccugggcagccucaucuacuccacggccgcccugggggugcugaugagcaaccucggcaugccguccuacugcaccggguaccgcgagggcuaccugaacagcaccaacgugaccaucgcgacguacugcaccggcuccauccccugcagcgucugccuguccgggcucgacagccuggacaccuaccccucccuggagaccauccagaucacgaucagcuccuucaagugggaccucaccgccuucggccugguggccgagugguuccuggccuacauccucuucacccgguucuucuacgugcuggggcuggccgcgaucaugcagcucuucuucagcuacuucgccguccacuucaucuccaacagcuggcugauguggcugaucaucaaccuggugcagauggcccccaucuccgccauggugcgcauguacaucuucuucgcgagcuucuacuacgucuggaagagcuacgugcacguggucgacggcugcaacuccagcaccugcaugaugugcuacaagcggaaccgcgccacgcggguggagugcaccaccaucgucaacggggugcgccgguccuucuacguguacgccaacggcggcaagggguucugcaagcuccacaacuggaacugcgucaacugcgacaccuucugcgccggcagcacguucaucuccgacgagguggcccgcgaccugagccugcaguucaagcggccgaucaaccccaccgaccaguccagcuacaucguggacuccgucaccgugaagaacgggagcauccaccucuacuucgacaaggcgggccagaagaccuacgagcgccacucccugagccacuucgugaaccuggacaaccuccgggccaacaacacgaaggggucccugcccaucaacgucaucguguucgacggcaagagcaagugcgaggaguccagcgccaaguccgccagcguguacuacucccagcugaugugccagcccauccuccugcuggaccaggcccucgucagcgacgugggcgacagcgcggagguggccgucaagauguucgacgccuacgugaacaccuucuccagcaccuucaacgugccgauggagaagcugaagacccuggucgccacggccgaggcggagcucgccaagaacgugucccuggacaacgugcugagcaccuucaucuccgccgcccgccagggguucgucgacagcgacguggagaccaaggacguggucgagugccucaagcugucccaccagagcgacaucgaggugaccggcgacuccugcaacaacuacaugcugacguacaacaagguggagaacaugaccccccgggaccucggggcgugcaucgacugcagcgcccgccacaucaacgcccaggucgccaagucccacaacaucgcccugaucuggaacgugaaggacuucaugagccuguccgagcagcuccggaagcagauccgcagcgcggccaagaagaacaaccugcccuucaagcugaccugcgccaccacgcgccagguggucaacguggugaccaccaagaucgcccucaagggcgggugaggacuaguuauaagacugacuagcccgaugggccucccaacgggcccuccuccccuccuugcaccgagauuaauaaaaaaaaaaaaaaaaaaaaaaaaaaaaaaaaaaaaaaaaaaaaaaaaaaaaaaaaaaaaaaaaugcaucccccccccccccccccccccccccccccccaaaggcucuuuucagagccaccagaauu

SEQ ID NO: 21464 - RNA, 6058 nt, Artificial Sequence
  SARS-CoV-2__MT873506.1__non-structural protein 3 (NSP3) mRNA gc
aggagaaagcuuaccauggcccccaccaaggugaccuucggcgacgacacggucaucgaggugcagggguacaagagcgugaacaucaccuucgagcuggacgagcgcaucgacaagguccucaacgagaagugcuccgccuacaccguggagcugggcaccgaggugaacgaguucgcgugcgucguggccgacgccgugaucaagacgcugcagccggucagcgagcuccugaccccccuggggaucgaccucgacgagugguccauggccaccuacuaccuguucgacgagagcggcgaguucaagcuggccucccacauguacugcagcuucuacccccccgacgaggacgaggaggagggggacugcgaggaggaggaguucgagccguccacccaguacgaguacggcacggaggacgacuaccagggcaagccccucgaguucggggcgaccagcgccgcccugcagcccgaggaggagcaggaggaggacuggcuggacgacgacucccagcagaccgugggccagcaggacgggagcgaggacaaccagaccacgaccauccagaccaucguggagguccagccccagcucgagauggagcugaccccgguggugcagacgaucgaggucaacuccuucagcggcuaccugaagcucaccgacaacguguacaucaagaacgccgacaucguggaggaggcgaagaaggucaagcccaccgugguggucaacgccgccaacguguaccugaagcacgggggcggcguggccggggcccugaacaaggcgaccaacaacgccaugcaggucgaguccgacgacuacaucgccacgaacggcccccucaagguggggggcagcugcguccuguccggccacaaccuggccaagcacugccuccacgugguggggcccaacgucaacaagggcgaggacauccagcugcugaagagcgccuacgagaacuucaaccagcacgaggugcuccuggcgccgcugcucuccgccgggaucuucggcgccgaccccauccacagccugcgggugugcgucgacaccgugcgcaccaacguguaccuggccgucuucgacaagaaccucuacgacaagcugguguccagcuuccuggagaugaagagcgagaagcagguggagcagaagaucgccgagauccccaaggaggaggucaagcccuucaucaccgaguccaagccgagcguggagcagcggaagcaggacgacaagaagaucaaggcgugcguggaggaggucacgaccacccucgaggagaccaaguuccugacggagaaccugcuccuguacaucgacaucaacgggaaccugcaccccgacuccgccacccucgugagcgacaucgacaucaccuuccugaagaaggacgcccccuacaucgugggcgacgucgugcaggagggcgugcugaccgccgucgugauccccacgaagaaggccgggggcaccaccgagaugcucgcgaaggcccugcgcaaggugccgaccgacaacuacaucacgaccuaccccgggcagggccugaacggguacaccgucgaggaggccaagaccgugcucaagaagugcaaguccgccuucuacauccugcccagcaucaucuccaacgagaagcaggagauccugggcaccgugagcuggaaccuccgggagaugcuggcgcacgccgaggagacgcgcaagcugaugcccgucugcguggagaccaaggccaucguguccaccauccagcggaaguacaagggcaucaagauccaggagggggucguggacuacggcgcccgcuucuacuucuacaccagcaagacgaccguggccucccugaucaacacccucaacgaccugaacgagacccuggucacgaugccgcucggguacgugacccacggccugaaccuggaggaggcggcccgguacaugcgcagccucaaggugcccgccaccgucuccgugagcucccccgacgccgugaccgccuacaacggguaccugacgagcuccagcaagacccccgaggagcacuucaucgagaccaucucccuggcgggcagcuacaaggacuggagcuacuccggccagagcacccagcucgggaucgaguuccugaagcggggcgacaaguccgucuacuacacgagcaacccgaccaccuuccaccuggacggggaggugaucaccuucgacaaccucaagacgcugcugucccuccgcgaggugcggaccaucaaggucuucaccaccguggacaacaucaaccugcacacgcagguggucgacaugagcaugaccuacggccagcaguucggccccaccuaccuggacggggccgacgugaccaagaucaagccccacaacucccacgagggcaagacguucuacgugcucccgaacgacgacacccugcgcgucgaggccuucgaguacuaccacaccaccgaccccagcuuccuggggcgguacauguccgcccucaaccacacgaagaaguggaaguacccccaggugaacggccugaccagcaucaagugggccgacaacaacugcuaccuggcgaccgcccuccugacccugcagcagaucgagcucaaguucaaccccccggcccugcaggacgccuacuaccgcgcgcgggccggggaggccgccaacuucugcgcccugauccucgcguacugcaacaagacggugggcgagcugggcgacguccgcgagaccauguccuaccuguuccagcacgccaaccucgacagcugcaagcgggugcugaacgucgugugcaagaccugcgggcagcagcagaccacccugaagggcguggaggccgucauguacauggggacgcucuccuacgagcaguucaagaagggcgugcagauccccugcaccugcgggaagcaggccaccaaguaccuggugcagcaggagagccccuucgucaugauguccgcccccccggcgcaguacgagcugaagcacggcaccuucacgugcgccagcgaguacaccggcaacuaccagugcgggcacuacaagcacaucaccuccaaggagacccucuacugcaucgacggcgcccugcugacgaagagcagcgaguacaaggggcccaucaccgacguguucuacaaggagaacuccuacaccaccacgaucaagcccgugaccuacaagcucgacggcgucgugugcaccgagaucgaccccaagcuggacaacuacuacaagaaggacaacagcuacuucaccgagcagccgaucgaccuggugcccaaccagcccuaccccaacgccuccuucgacaacuucaaguucgucugcgacaacaucaaguucgccgacgaccucaaccagcugacgggguacaagaagccggcgagccgcgagcugaaggugaccuucuuccccgaccucaacggcgacguggucgccaucgacuacaagcacuacacccccuccuucaagaagggcgccaagcugcugcacaagcccaucguguggcacgugaacaacgccaccaacaaggcgacguacaagccgaacaccuggugcauccggugccucuggagcaccaagcccgucgagaccuccaacagcuucgacgugcugaaguccgaggacgcccaggggauggacaaccuggccugcgaggaccucaagcccgugagcgaggaggucguggagaaccccacgauccagaaggacgugcuggagugcaacgucaagaccaccgagguggugggcgacaucauccugaagccggccaacaacucccucaagaucaccgaggaggucgggcacacggaccugauggccgcguacguggacaacagcucccugaccaucaagaagcccaacgagcucagccgcgugcugggccugaagacccucgccacccacgggcuggccgccgucaacuccgugcccugggacacgaucgccaacuacgcgaagccguuccugaacaagguggucagcaccaccaccaacaucgugacgcgcugccucaaccgggugugcaccaacuacaugcccuacuucuucacccugcugcuccagcugugcaccuucacccgcuccacgaacagccggaucaaggccuccaugcccaccaccaucgccaagaacaccgucaagagcgugggcaaguucugccuggaggccagcuucaacuaccucaagucccccaacuucagcaagcugaucaacaucaucaucugguuccugcuccuguccgugugccugggcagccucaucuacuccacggccgcgcuggggguccugaugagcaaccucggcaugccguccuacugcaccggguaccgcgagggcuaccugaacagcaccaacgugaccaucgccacguacugcaccggcuccauccccugcagcgugugccuguccgggcucgacagccuggacaccuaccccucccuggagaccauccagaucacgaucagcuccuucaagugggaccucaccgccuucggccuggucgccgagugguuccuggccuacauccucuucacccgguucuucuacgugcuggggcuggcggccaucaugcagcucuucuucagcuacuucgccgugcacuucaucuccaacagcuggcugauguggcugaucaucaaccugguccagauggcccccaucuccgcgauggugcgcauguacaucuucuucgccagcuucuacuacguguggaagagcuacguccacgugguggacggcugcaacuccagcaccugcaugaugugcuacaagcggaaccgcgccacgcgggucgagugcaccaccaucgugaacgggguccgccgguccuucuacguguacgccaacggcggcaagggguucugcaagcuccacaacuggaacugcgugaacugcgacaccuucugcgccggcagcacguucaucuccgacgaggucgcgcgcgaccugagccugcaguucaagcggccgaucaaccccaccgaccaguccagcuacaucguggacuccgugaccgucaagaacgggagcauccaccucuacuucgacaaggccggccagaagaccuacgagcgccacucccugagccacuucgugaaccuggacaaccuccgggccaacaacacgaaggggucccugcccaucaacgugaucgucuucgacggcaagagcaagugcgaggaguccagcgccaaguccgccagcguguacuacucccaccugaugugccagcccauccuccugcuggaccaggcgcucgugagcgacgucggcgacagcgccgagguggccgugaagauguucgacgccuacgucaacaccuucuccagcaccuucaacgugccgauggagaagcugaagacccugguggccacggcggaggccgagcucgccaagaacgucucccuggacaacgugcugagcaccuucaucuccgccgcgcgccagggguucguggacagcgacgucgagaccaaggacgugguggagugccucaagcugucccaccagagcgacaucgaggucaccggcgacuccugcaacaacuacaugcugacguacaacaagguggagaacaugaccccccgggaccucggggccugcaucgacugcagcgcccgccacaucaacgcccagguggccaagucccacaacaucgcgcugaucuggaacgucaaggacuucaugagccuguccgagcagcuccggaagcagauccgcagcgccgccaagaagaacaaccugcccuucaagcugaccugcgccaccacgcgccagguggugaacgucgugaccaccaagaucgcccucaagggcgggugaggacuaguuauaagacugacuagcccgaugggccucccaacgggcccuccuccccuccuugcaccgagauuaauaaaaaaaaaaaaaaaaaaaaaaaaaaaaaaaaaaaaaaaaaaaaaaaaaaaaaaaaaaaaaaaaugcaucccccccccccccccccccccccccccccccaaaggcucuuuucagagccaccagaauu

SEQ ID NO: 21465 - RNA, 6058 nt, Artificial Sequence
  SARS-CoV-2__MT876527.1__non-structural protein 3 (NSP3) mRNA gc
aggagaaagcuuaccauggcccccaccaaggugaccuucggcgacgacacggucaucgaggugcagggguacaagagcgugaacaucaccuucgagcuggacgagcgcaucgacaagguccucaacgagaagugcuccgccuacaccguggagcugggcaccgaggugaacgaguucgcgugcgucguggccgacgccgugaucaagacgcugcagccggucagcgagcuccugaccccccuggggaucgaccucgacgagugguccauggccaccuacuaccuguucgacgagagcggcgaguucaagcuggccucccacauguacugcagcuucuacccccccgacgaggacgaggaggagggggacugcgaggaggaggaguucgagccguccacccaguacgaguacggcacggaggacgacuaccagggcaagccccucgaguucggggcgaccagcgccgcccugcagcccgaggaggagcaggaggaggacuggcuggacgacgacucccagcagaccgugggccagcaggacgggagcgaggacaaccagaccacgaccauccagaccaucguggagguccagccccagcucgagauggagcugaccccgguggugcagacgaucgaggucaacuccuucagcggcuaccugaagcucaccgacaacguguacaucaagaacgccgacaucguggaggaggcgaagaaggucaagcccaccgugguggucaacgccgccaacguguaccugaagcacgggggcggcguggccggggcccugaacaaggcgaccaacaacgccaugcaggucgaguccgacgacuacaucgccacgaacggcccccucaagguggggggcagcugcguccuguccggccacaaccuggccaagcacugccuccacgugguggggcccaacgucaacaagggcgaggacauccagcugcugaagagcgccuacgagaacuucaaccagcacgaggugcuccuggcgccgcugcucuccgccgggaucuucggcgccgaccccauccacagccugcgggugugcgucgacaccgugcgcaccaacguguaccuggccgucuucgacaagaaccucuacgacaagcugguguccagcuuccuggagaugaagagcgagaagcagguggagcagaagaucgccgagauccccaaggaggaggucaagcccuucaucaccgaguccaagccgagcguggagcagcggaagcaggacgacaagaagaucaaggcgugcguggaggaggucacgaccacccucgaggagaccaaguuccugacggagaaccugcuccuguacaucgacaucaacgggaaccugcaccccgacuccgccacccucgugagcgacaucgacaucaccuuccugaagaaggacgcccccuacaucgugggcgacgucgugcaggagggcgugcugaccgccgucgugauccccacgaagaaggccgggggcaccaccgagaugcucgcgaaggcccugcgcaaggugccgaccgacaacuacaucacgaccuaccccgggcagggccugaacggguacaccgucgaggaggccaagaccgugcucaagaagugcaaguccgccuucuacauccugcccagcaucaucuccaacgagaagcaggagauccugggcaccgugagcuggaaccuccgggagaugcuggcgcacgccgaggagacgcgcaagcugaugcccgucugcguggagaccaaggccaucguguccaccauccagcggaaguacaagggcaucaagauccaggagggggucguggacuacggcgcccgcuucuacuucuacaccagcaagacgaccguggccucccugaucaacacccucaacgaccugaacgagacccuggucacgaugccgcucggguacgugacccacggccugaaccuggaggaggcggcccgguacaugcgcagccucaaggugcccgccaccgucuccgugagcucccccgacgccgugaccgccuacaacggguaccugacgagcuccagcaagacccccgaggagcacuucaucgagaccaucucccuggcgggcagcuacaaggacuggagcuacuccggccagagcacccagcucgggaucgaguuccugaagcggggcgacaaguccgucuacuacacgagcaacccgaccaccuuccaccuggacggggaggugaucaccuucgacaaccucaagacgcugcugucccuccgcgaggugcggaccaucaaggucuucaccaccguggacaacaucaaccugcacacgcagguggucgacaugagcaugaccuacggccagcaguucggccccaccuaccuggacggggccgacgugaccaagaucaagccccacaacucccacgagggcaagacguucuacgugcucccgaacgacgacacccugcgcgucgaggccuucgaguacuaccacaccaccgaccccagcuuccuggggcgguacauguccgcccucaaccacacgaagaaguggaaguacccccaggugaacggccugaccagcaucaagugggccgacaacaacugcuaccuggcgaccgcccuccugacccugcagcagaucgagcucaaguucaaccccccggcccugcaggacgccuacuaccgcgcgcgggccggggaggccgccaacuucugcgcccugauccucgcguacugcaacaagacggugggcgagcugggcgacguccgcgagaccauguccuaccuguuccagcacgccaaccucgacagcugcaagcgggugcugaacgucgugugcaagaccugcgggcagcagcagaccacccugaagggcguggaggccgucauguacauggggacgcucuccuacgagcaguucaagaagggcgugcagauccccugcaccugcgggaagcaggccaccaaguaccuggugcagcaggagagccccuucgucaugauguccgcccccccggcgcaguacgagcugaagcacggcaccuucacgugcgccagcgaguacaccggcaacuaccagugcgggcacuacaagcacaucaccuccaaggagacccucuacugcaucgacggcgcccugcugacgaagagcagcgaguacaaggggcccaucaccgacguguucuacaaggagaacuccuacaccaccacgaucaagcccgugaccuacaagcucgacggcgucgugugcaccgagaucgaccccaagcuggacaacuacuacaagaaggacaacagcuacuucaccgagcagccgaucgaccuggugcccaaccagcccuaccccaacgccuccuucgacaacuucaaguucgucugcgacaacaucaaguucgccgacgaccucaaccagcugacgggguacaagaagccggcgagccgcgagcugaaggugaccuucuuccccgaccucaacggcgacguggucgccaucgacuacaagcacuacacccccuccuucaagaagggcgccaagcugcugcacaagcccaucguguggcacgugaacaacgccaccaacaaggcgacguacaagccgaacaccuggugcauccggugccucuggagcaccaagcccgucgagaccuccaacagcuucgacgugcugaaguccgaggacgcccaggggauggacaaccuggccugcgaggaccucaagcccgugagcgaggaggucguggagaaccccacgauccagaaggacgugcuggagugcaacgucaagaccaccgagguggugggcgacaucauccugaagccggccaacaacucccucaagaucaccgaggaggucgggcacacggaccugauggccgcguacguggacaacagcucccugaccaucaagaagcccaacgagcucagccgcgugcugggccugaagacccucgccacccacgggcuggccgccgucaacuccgugcccugggacacgaucgccaacuacgcgaagccguuccugaacaagguggucagcaccaccaccaacaucgugacgcgcugccucaaccgggugugcaccaacuacaugcccuacuucuucacccugcugcuccagcugugcaccuucacccgcuccacgaacagccggaucaaggccuccaugcccaccaccaucgccaagaacaccgucaagagcgugggcaaguucugccuggaggccagcuucaacuaccucaagucccccaacuucagcaagcugaucaacaucaucaucugguuccugcuccuguccgugugccugggcagccucaucuacuccacggccgcgcuggggguccugaugagcaaccucggcaugccguccuacugcaccggguaccgcgagggcuaccugaacagcaccaacgugaccaucgccacguacugcaucggcuccauccccugcagcgugugccuguccgggcucgacagccuggacaccuaccccucccuggagaccauccagaucaccaucagcuccuucaagugggaccucacggccuucggccuggucgccgagugguuccuggccuacauccucuucacccgguucuucuacgugcuggggcuggcggccaucaugcagcucuucuucagcuacuucgccgugcacuucaucuccaacagcuggcugauguggcugaucaucaaccugguccagauggcccccaucuccgcgauggugcgcauguacaucuucuucgccagcuucuacuacguguggaagagcuacguccacgugguggacggcugcaacuccagcaccugcaugaugugcuacaagcggaaccgcgccacccgggucgagugcacgaccaucgugaacgggguccgccgguccuucuacguguacgccaacggcggcaagggguucugcaagcuccacaacuggaacugcgugaacugcgacaccuucugcgccggcagcaccuucaucuccgacgaggucgcgcgcgaccugagccugcaguucaagcggccgaucaaccccacggaccaguccagcuacaucguggacuccgugaccgucaagaacgggagcauccaccucuacuucgacaaggccggccagaagaccuacgagcgccacucccugagccacuucgugaaccuggacaaccuccgggccaacaacaccaaggggucccugcccaucaacgugaucgucuucgacggcaagagcaagugcgaggaguccagcgccaaguccgccagcguguacuacucccagcugaugugccagcccauccuccugcuggaccaggcgcucgugagcgacgucggcgacagcgccgagguggccgugaagauguucgacgccuacgucaacacguucuccagcaccuucaacgugccgauggagaagcugaagacccugguggccaccgcggaggccgagcucgccaagaacgucucccuggacaacgugcugagcacguucaucuccgccgcgcgccagggguucguggacagcgacgucgagaccaaggacgugguggagugccucaagcugucccaccagagcgacaucgaggucaccggcgacuccugcaacaacuacaugcugaccuacaacaagguggagaacaugacgccccgggaccucggggccugcaucgacugcagcgcccgccacaucaacgcccagguggccaagucccacaacaucgcgcugaucuggaacgucaaggacuucaugagccuguccgagcagcuccggaagcagauccgcagcgccgccaagaagaacaaccugcccuucaagcugaccugcgccaccacccgccagguggugaacgucgugacgaccaagaucgcccucaagggcgggugaggacuaguuauaagacugacuagcccgaugggccucccaacgggcccuccuccccuccuugcaccgagauuaauaaaaaaaaaaaaaaaaaaaaaaaaaaaaaaaaaaaaaaaaaaaaaaaaaaaaaaaaaaaaaaaaugcaucccccccccccccccccccccccccccccccaaaggcucuuuucagagccaccagaauu

SEQ ID NO: 21466 - RNA, 6058 nt, Artificial Sequence
  SARS-CoV-2__MT876547.1__non-structural protein 3 (NSP3) mRNA gc
aggagaaagcuuaccauggcccccaccaaggugaccuucggcgacgacacggucaucgaggugcagggguacaagagcgugaacaucaccuucgagcuggacgagcgcaucgacaagguccucaacgagaagugcuccgccuacaccguggagcugggcaccgaggugaacgaguucgcgugcgucguggccgacgccgugaucaagacgcugcagccggucagcgagcuccugaccccccuggggaucgaccucgacgagugguccauggccaccuacuaccuguucgacgagagcggcgaguucaagcuggccucccacauguacugcagcuucuacccccccgacgaggacgaggaggagggggacugcgaggaggaggaguucgagccguccacccaguacgaguacggcacggaggacgacuaccagggcaagccccucgaguucggggcgaccagcgccgcccugcagcccgaggaggagcaggaggaggacuggcuggacgacgacucccagcagaccgugggccagcaggacgggagcgaggacaaccagaccacgaccauccagaccaucguggagguccagccccagcucgagauggagcugaccccgguggugcagacgaucgaggucaacuccuucagcggcuaccugaagcucaccgacaacguguacaucaagaacgccgacaucguggaggaggcgaagaaggucaagcccaccgugguggucaacgccgccaacguguaccugaagcacgggggcggcguggccggggcccugaacaaggcgaccaacaacgccaugcaggucgaguccgacgacuacaucgccacgaacggcccccucaagguggggggcagcugcguccuguccggccacaaccuggccaagcacugccuccacgugguggggcccaacgucaacaagggcgaggacauccagcugcugaagagcgccuacgagaacuucaaccagcacgaggugcuccuggcgccgcugcucuccgccgggaucuucggcgccgaccccauccacagccugcgggugugcgucgacaccgugcgcaccaacguguaccuggccgucuucgacaagaaccucuacgacaagcugguguccagcuuccuggagaugaagagcgagaagcagguggagcagaagaucgccgagauccccaaggaggaggucaagcccuucaucaccgaguccaagccgagcguggagcagcggaagcaggacgacaagaagaucaaggcgugcguggaggaggucacgaccacccucgaggagaccaaguuccugacggagaaccugcuccuguacaucgacaucaacgggaaccugcaccccgacuccgccacccucgugagcgacaucgacaucaccuuccugaagaaggacgcccccuacaucgugggcgacgucgugcaggagggcgugcugaccgccgucgugauccccacgaagaaggccgggggcaccaccgagaugcucgcgaaggcccugcgcaaggugccgaccgacaacuacaucacgaccuaccccgggcagggccugaacggguacaccgucgaggaggccaagaccgugcucaagaagugcaaguccgccuucuacauccugcccagcaucaucuccaacgagaagcaggagauccugggcaccgugagcuggaaccuccgggagaugcuggcgcacgccgaggagacgcgcaagcugaugcccgucugcguggagaccaaggccaucguguccaccauccagcggaaguacaagggcaucaagauccaggagggggucguggacuacggcgcccgcuucuacuucuacaccagcaagacgaccguggccucccugaucaacacccucaacgaccugaacgagacccuggucacgaugccgcucggguacgugacccacggccugaaccuggaggaggcggcccgguacaugcgcagccucaaggugcccgccaccgucuccgugagcucccccgacgccgugaccgccuacaacggguaccugacgagcuccagcaagacccccgaggagcacuucaucgagaccaucucccuggcgggcagcuacaaggacuggagcuacuccggccagagcacccagcucgggaucgaguuccugaagcggggcgacaaguccgucuacuacacgagcaacccgaccaccuuccaccuggacggggaggugaucaccuucgacaaccucaagacgcugcugucccuccgcgaggugcggaccaucaaggucuucaccaccguggacaacaucaaccugcacacgcagguggucgacaugagcaugaccuacggccagcaguucggccccaccuaccuggacggggccgacgugaccaagaucaagccccacaacucccacgagggcaagacguucuacgugcucccgaacgacgacacccugcgcgucgaggccuucgaguacuaccacaccaccgaccccagcuuccuggggcgguacauguccgcccucaaccacacgaagaaguggaaguacccccaggugaacggccugaccagcaucaagugggccgacaacaacugcuaccuggcgaccgcccuccugacccugcagcagaucgagcucaaguucaaccccccggcccugcaggacgccuacuaccgcgcgcgggccggggaggccgccaacuucugcgcccugauccucgcguacugcaacaagacggugggcgagcugggcgacguccgcgagaccauguccuaccuguuccagcacgccaaccucgacagcugcaagcgggugcugaacgucgugugcaagaccugcgggcagcagcagaccacccugaagggcguggaggccgucauguacauggggacgcucuccuacgagcaguucaagaagggcgugcagauccccugcaccugcgggaagcaggccaccaaguaccuggugcagcaggagagccccuucgucaugauguccgcccccccggcgcaguacgagcugaagcacggcaccuucacgugcgccagcgaguacaccggcaacuaccagugcgggcacuacaagcacaucaccuccaaggagacccucuacugcaucgacggcgcccugcugacgaagagcagcgaguacaaggggcccaucaccgacguguucuacaaggagaacuccuacaccaccacgaucaagcccgugaccuacaagcucgacggcgucgugugcaccgagaucgaccccaagcuggacaacuacuacaagaaggacaacagcuacuucaccgagcagccgaucgaccuggugcccaaccagcccuaccccaacgccuccuucgacaacuucaaguucgucugcgacaacaucaaguucgccgacgaccucaaccagcugacgggguacaagaagccggcgagccgcgagcugaaggugaccuucuuccccgaccucaacggcgacguggucgccaucgacuacaagcacuacacccccuccuucaagaagggcgccaagcugcugcacaagcccaucguguggcacgugaacaacgccaccaacaaggcgacguacaagccgaacaccuggugcauccggugccucuggagcaccaagcccgucgagaccuccaacagcuucgacgugcugaaguccgaggacgcccaggggauggacaaccuggccugcgaggaccucaagcccgugagcgaggaggucguggagaaccccacgauccagaaggacgugcuggagugcaacgucaagaccaccgagguggugggcgacaucauccugaagccggccaacaacucccucaagaucaccgaggaggucgggcacacggaccugauggccgcguacguggacaacagcucccugaccaucaagaagcccaacgagcucagccgcgugcugggccugaagacccucgccacccacgggcuggccgccgucaacuccgugcccugggacacgaucgccaacuacgcgaagccguuccugaacaagguggucagcaccaccaccaacaucgugacgcgcugccucaaccgggugugcaccaacuacaugcccuacuucuucacccugcugcuccagcugugcaucuucacccgcuccaccaacagccggaucaaggccuccaugcccacgaccaucgccaagaacaccgucaagagcgugggcaaguucugccuggaggccagcuucaacuaccucaagucccccaacuucagcaagcugaucaacaucaucaucugguuccugcuccuguccgugugccugggcagccucaucuacuccaccgccgcgcuggggguccugaugagcaaccucggcaugccguccuacugcacgggguaccgcgagggcuaccugaacagcaccaacgugaccaucgccaccuacugcacgggcuccauccccugcagcgugugccuguccgggcucgacagccuggacaccuaccccucccuggagaccauccagaucaccaucagcuccuucaagugggaccucacggccuucggccuggucgccgagugguuccuggccuacauccucuucacccgguucuucuacgugcuggggcuggcggccaucaugcagcucuucuucagcuacuucgccgugcacuucaucuccaacagcuggcugauguggcugaucaucaaccugguccagauggcccccaucuccgcgauggugcgcauguacaucuucuucgccagcuucuacuacguguggaagagcuacguccacgugguggacggcugcaacuccagcaccugcaugaugugcuacaagcggaaccgcgccacccgggucgagugcacgaccaucgugaacgggguccgccgguccuucuacguguacgccaacggcggcaagggguucugcaagcuccacaacuggaacugcgugaacugcgacaccuucugcgccggcagcaccuucaucuccgacgaggucgcgcgcgaccugagccugcaguucaagcggccgaucaaccccacggaccaguccagcuacaucguggacuccgugaccgucaagaacgggagcauccaccucuacuucgacaaggccggccagaagaccuacgagcgccacucccugagccacuucgugaaccuggacaaccuccgggccaacaacaccaaggggucccugcccaucaacgugaucgucuucgacggcaagagcaagugcgaggaguccagcgccaaguccgccagcguguacuacucccagcugaugugccagcccauccuccugcuggaccaggcgcucgugagcgacgucggcgacagcgccgagguggccgugaagauguucgacgccuacgucaacacguucuccagcaccuucaacgugccgauggagaagcugaagacccugguggccaccgcggaggccgagcucgccaagaacgucucccuggacaacgugcugagcacguucaucuccgccgcgcgccagggguucguggacagcgacgucgagaccaaggacgugguggagugccucaagcugucccaccagagcgacaucgaggucaccggcgacuccugcaacaacuacaugcugaccuacaacaagguggagaacaugacgccccgggaccucggggccugcaucgacugcagcgcccgccacaucaacgcccagguggccaagucccacaacaucgcgcugaucuggaacgucaaggacuucaugagccuguccgagcagcuccggaagcagauccgcagcgccgccaagaagaacaaccugcccuucaagcugaccugcgccaccacccgccagguggugaacgucgugacgaccaagaucgcccucaagggcgggugaggacuaguuauaagacugacuagcccgaugggccucccaacgggcccuccuccccuccuugcaccgagauuaauaaaaaaaaaaaaaaaaaaaaaaaaaaaaaaaaaaaaaaaaaaaaaaaaaaaaaaaaaaaaaaaaugcaucccccccccccccccccccccccccccccccaaaggcucuuuucagagccaccagaauu

SEQ ID NO: 21467 - RNA, 6058 nt, Artificial Sequence
  SARS-CoV-2__MT876555.1__non-structural protein 3 (NSP3) mRNA gc
aggagaaagcuuaccauggcccccaccaaggugaccuucggcgacgacacggucaucgaggugcagggguacaagagcgugaacaucaccuucgagcuggacgagcgcaucgacaagguccucaacgagaagugcuccgccuacaccguggagcugggcaccgaggugaacgaguucgcgugcgucguggccgacgccgugaucaagauccugcagccggucagcgagcuccugacgccccuggggaucgaccucgacgagugguccauggccaccuacuaccuguucgacgagagcggcgaguucaagcuggccucccacauguacugcagcuucuacccccccgacgaggacgaggaggagggggacugcgaggaggaggaguucgagccguccacccaguacgaguacggcaccgaggacgacuaccagggcaagccccucgaguucggggcgacgagcgccgcccugcagcccgaggaggagcaggaggaggacuggcuggacgacgacucccagcagaccgugggccagcaggacgggagcgaggacaaccagaccaccacgauccagaccaucguggagguccagccccagcucgagauggagcugaccccgguggugcagaccaucgaggucaacuccuucagcggcuaccugaagcucacggacaacguguacaucaagaacgccgacaucguggaggaggcgaagaaggucaagcccaccgugguggucaacgccgccaacguguaccugaagcacgggggcggcguggccggggcccugaacaaggcgaccaacaacgccaugcaggucgaguccgacgacuacaucgccaccaacggcccccucaagguggggggcagcugcguccuguccggccacaaccuggccaagcacugccuccacgugguggggcccaacgucaacaagggcgaggacauccagcugcugaagagcgccuacgagaacuucaaccagcacgaggugcuccuggcgccgcugcucuccgccgggaucuucggcgccgaccccauccacagccugcgggugugcgucgacacggugcgcaccaacguguaccuggccgucuucgacaagaaccucuacgacaagcugguguccagcuuccuggagaugaagagcgagaagcagguggagcagaagaucgccgagauccccaaggaggaggucaagcccuucaucaccgaguccaagccgagcguggagcagcggaagcaggacgacaagaagaucaaggcgugcguggaggaggucaccacgacccucgaggagaccaaguuccugaccgagaaccugcuccuguacaucgacaucaacgggaaccugcaccccgacuccgccacgcucgugagcgacaucgacaucaccuuccugaagaaggacgcccccuacaucgugggcgacgucgugcaggagggcgugcugaccgccgucgugauccccaccaagaaggccgggggcacgaccgagaugcucgcgaaggcccugcgcaaggugccgaccgacaacuacaucaccacguaccccgggcagggccugaacggguacaccgucgaggaggccaagaccgugcucaagaagugcaaguccgccuucuacauccugcccagcaucaucuccaacgagaagcaggagauccugggcaccgugagcuggaaccuccgggagaugcuggcgcacgccgaggagacccgcaagcugaugcccgucugcguggagacgaaggccaucguguccaccauccagcggaaguacaagggcaucaagauccaggagggggucguggacuacggcgcccgcuucuacuucuacaccagcaagaccacgguggccucccugaucaacacccucaacgaccugaacgagacccuggucaccaugccgcucggguacgugacgcacggccugaaccuggaggaggcggcccgguacaugcgcagccucaaggugcccgccaccgucuccgugagcucccccgacgccgugaccgccuacaacggguaccugaccagcuccagcaagacgcccgaggagcacuucaucgagaccaucucccuggcgggcagcuacaaggacuggagcuacuccggccagagcacccagcucgggaucgaguuccugaagcggggcgacaaguccgucuacuacaccagcaacccgacgaccuuccaccuggacggggaggugaucaccuucgacaaccucaagacccugcugucccuccgcgaggugcggacgaucaaggucuucaccaccguggacaacaucaaccugcacacccagguggucgacaugagcaugacguacggccagcaguucggccccaccuaccuggacggggccgacgugaccaagaucaagccccacaacucccacgagggcaagaccuucuacgugcucccgaacgacgacacgcugcgcgucgaggccuucgaguacuaccacaccaccgaccccagcuuccuggggcgguacauguccgcccucaaccacaccaagaaguggaaguacccccaggugaacggccugacgagcaucaagugggccgacaacaacugcuaccuggcgaccgcccuccugacccugcagcagaucgagcucaaguucaaccccccggcccugcaggacgccuacuaccgcgcgcgggccggggaggccgccaacuucugcgcccugauccucgcguacugcaacaagaccgugggcgagcugggcgacguccgcgagacgauguccuaccuguuccagcacgccaaccucgacagcugcaagcgggugcugaacgucgugugcaagaccugcgggcagcagcagaccacccugaagggcguggaggccgucauguacauggggacccucuccuacgagcaguucaagaagggcgugcagauccccugcacgugcgggaagcaggccaccaaguaccuggugcagcaggagagccccuucgucaugauguccgcccccccggcgcaguacgagcugaagcacggcaccuucaccugcgccagcgaguacacgggcaacuaccagugcgggcacuacaagcacaucaccuccaaggagacccucuacugcaucgacggcgcccugcugaccaagagcagcgaguacaaggggcccaucacggacguguucuacaaggagaacuccuacaccaccaccaucaagcccgugacguacaagcucgacggcgucgugugcaccgagaucgaccccaaccuggacaacuacuacaagaaggacaacagcuacuucaccgagcagccgaucgaccuggugcccaaccagcccuaccccaacgccuccuucgacaacuucaaguucgucugcgacaacaucaaguucgccgacgaccucaaccagcugaccggguacaagaagccggcgagccgcgagcugaaggugacguucuuccccgaccucaacggcgacguggucgccaucgacuacaagcacuacacccccuccuucaagaagggcgccaagcugcugcacaagcccaucguguggcacgugaacaacgccaccaacaaggcgaccuacaagccgaacacguggugcauccggugccucuggagcaccaagcccgucgagaccuccaacagcuucgacgugcugaaguccgaggacgcccaggggauggacaaccuggccugcgaggaccucaagcccgugagcgaggaggucguggagaaccccaccauccagaaggacgugcuggagugcaacgucaagacgaccgagguggugggcgacaucauccugaagccggccaacaacucccucaagaucaccgaggaggucgggcacaccgaccugauggccgcguacguggacaacagcucccugacgaucaagaagcccaacgagcucagccgcgugcugggccugaagacccucgccacccacgggcuggccgccgucaacuccgugcccugggacaccaucgccaacuacgcgaagccguuccugaacaagguggucagcacgaccaccaacaucgugacccgcugccucaaccgggugugcacgaacuacaugcccuacuucuucacccugcugcuccagcugugcaccuucacccgcuccaccaacagccggaucaaggccuccaugcccacgaccaucgccaagaacaccgucaagagcgugggcaaguucugccuggaggccagcuucaacuaccucaagucccccaacuucagcaagcugaucaacaucaucaucugguuccugcuccuguccgugugccugggcagccucaucuacuccaccgccgcgcuggggguccugaugagcaaccucggcaugccguccuacugcacgggguaccgcgagggcuaccugaacagcaccaacgugaccaucgccaccuacugcacgggcuccauccccugcagcgugugccuguccgggcucgacagccuggacaccuaccccucccuggagaccauccagaucaccaucagcuccuucaagugggaccucacggccuucggccuggucgccgagugguuccuggccuacauccucuucacccgguucuucuacgugcuggggcuggcggccaucaugcagcucuucuucagcuacuucgccgugcacuucaucuccaacagcuggcugauguggcugaucaucaaccugguccagauggcccccaucuccgcgauggugcgcauguacaucuucuucgccagcuucuacuacguguggaagagcuacguccacgugguggacggcugcaacuccagcaccugcaugaugugcuacaagcggaaccgcgccacccgggucgagugcacgaccaucgugaacgggguccgccgguccuucuacguguacgccaacggcggcaagggguucugcaagcuccacaacuggaacugcgugaacugcgacaccuucugcgccggcagcaccuucaucuccgacgaggucgcgcgcgaccugagccugcaguucaagcggccgaucaaccccacggaccaguccagcuacaucguggacuccgugaccgucaagaacgggagcauccaccucuacuucgacaaggccggccagaagaccuacgagcgccacucccugagccacuucgugaaccuggacaaccuccgggccaacaacaccaaggggucccugcccaucaacgugaucgucuucgacggcaagagcaagugcgaggaguccagcgccaaguccgccagcguguacuacucccagcugaugugccagcccauccuccugcuggaccaggcgcucgugagcgacgucggcgacagcgccgagguggccgugaagauguucgacgccuacgucaacacguucuccagcaccuucaacgugccgauggagaagcugaagacccugguggccaccgcggaggccgagcucgccaagaacgucucccuggacaacgugcugagcacguucaucuccgccgcgcgccagggguucguggacagcgacgucgagaccaaggacgugguggagugccucaagcugucccaccagagcgacaucgaggucaccggcgacuccugcaacaacuacaugcugaccuacaacaagguggagaacaugacgccccgggaccucggggccugcaucgacugcagcgcccgccacaucaacgcccagguggccaagucccacaacaucgcgcugaucuggaacgucaaggacuucaugagccuguccgagcagcuccggaagcagauccgcagcgccgccaagaagaacaaccugcccuucaagcugaccugcgccaccacccgccagguggugaacgucgugacgaccaagaucgcccucaagggcgggugaggacuaguuauaagacugacuagcccgaugggccucccaacgggcccuccuccccuccuugcaccgagauuaauaaaaaaaaaaaaaaaaaaaaaaaaaaaaaaaaaaaaaaaaaaaaaaaaaaaaaaaaaaaaaaaaugcaucccccccccccccccccccccccccccccccaaaggcucuuuucagagccaccagaauu

SEQ ID NO: 21468 - RNA, 6058 nt, Artificial Sequence
  SARS-CoV-2__MT876556.1__non-structural protein 3 (NSP3) mRNA gc
aggagaaagcuuaccauggcccccaccaaggugaccuucggcgacgacacggucaucgaggugcagggguacaagagcgugaacaucaccuucgagcuggacgcccgcaucgacaagguccucaacgagaagugcuccgcguacaccguggagcugggcaccgaggugaacgaguucgccugcgucguggccgacgccgugaucaagacgcugcagccggucagcgagcuccugaccccccuggggaucgaccucgacgagugguccauggccaccuacuaccuguucgacgagagcggcgaguucaagcuggcgucccacauguacugcagcuucuacccccccgacgaggacgaggaggagggggacugcgaggaggaggaguucgagccguccacccaguacgaguacggcacggaggacgacuaccagggcaagccccucgaguucggggccaccagcgccgcccugcagcccgaggaggagcaggaggaggacuggcuggacgacgacucccagcagaccgugggccagcaggacgggagcgaggacaaccagaccacgaccauccagaccaucguggagguccagccccagcucgagauggagcugaccccgguggugcagacgaucgaggucaacuccuucagcggcuaccugaagcucaccgacaacguguacaucaagaacgcggacaucguggaggaggccaagaaggucaagcccaccgugguggucaacgccgccaacguguaccugaagcacgggggcggcguggccggggcgcugaacaaggccaccaacaacgccaugcaggucgaguccgacgacuacaucgccacgaacggcccccucaagguggggggcagcugcguccuguccggccacaaccuggccaagcacugccuccacgugguggggcccaacgucaacaagggcgaggacauccagcugcugaagagcgcguacgagaacuucaaccagcacgaggugcuccuggccccgcugcucuccgccgggaucuucggcgccgaccccauccacagccugcgggugugcgucgacaccgugcgcaccaacguguaccuggccgucuucgacaagaaccucuacgacaagcugguguccagcuuccuggagaugaagagcgagaagcagguggagcagaagaucgcggagauccccaaggaggaggucaagcccuucaucaccgaguccaagccgagcguggagcagcggaagcaggacgacaagaagaucaaggccugcguggaggaggucacgaccacccucgaggagaccaaguuccugacggagaaccugcuccuguacaucgacaucaacgggaaccugcaccccgacuccgccacccucgugagcgacaucgacaucaccuuccugaagaaggacgcccccuacaucgugggcgacgucgugcaggagggcgugcugaccgccgucgugauccccacgaagaaggcggggggcaccaccgagaugcucgccaaggcccugcgcaaggugccgaccgacaacuacaucacgaccuaccccgggcagggccugaacggguacaccgucgaggaggccaagaccgugcucaagaagugcaaguccgcguucuacauccugcccagcaucaucuccaacgagaagcaggagauccugggcaccgugagcuggaaccuccgggagaugcuggcccacgccgaggagacgcgcaagcugaugcccgucugcguggagaccaaggccaucguguccaccauccagcggaaguacaagggcaucaagauccaggagggggucguggacuacggcgcccgcuucuacuucuacaccagcaagacgaccguggcgucccugaucaacacccucaacgaccugaacgagacccuggucacgaugccgcucggguacgugacccacggccugaaccuggaggaggccgcccgguacaugcgcagccucaaggugcccgccaccgucuccgugagcucccccgacgccgugaccgcguacaacggguaccugacgagcuccagcaagacccccgaggagcacuucaucgagaccaucucccuggccggcagcuacaaggacuggagcuacuccggccagagcacccagcucgggaucgaguuccugaagcggggcgacaaguccgucuacuacacgagcaacccgaccaccuuccaccuggacggggaggugaucaccuucgacaaccucaagacgcugcugucccuccgcgaggugcggaccaucaaggucuucaccaccguggacaacaucaaccugcacacgcagguggucgacaugagcaugaccuacggccagcaguucggccccaccuaccuggacggggccgacgugaccaagaucaagccccacaacucccacgagggcaagacguucuacgugcucccgaacgacgacacccugcgcgucgaggccuucgaguacuaccacaccaccgaccccagcuuccuggggcgguacauguccgcccucaaccacacgaagaaguggaaguacccccaggugaacggccugaccagcaucaagugggcggacaacaacugcuaccuggccaccgcccuccugacccugcagcagaucgagcucaaguucaaccccccggcccugcaggacgcguacuaccgcgcccgggccggggaggccgccaacuucugcgcgcugauccucgccuacugcaacaagacggugggcgagcugggcgacguccgcgagaccauguccuaccuguuccagcacgccaaccucgacagcugcaagcgggugcugaacgucgugugcaagaccugcgggcagcagcagaccacccugaagggcguggaggccgucauguacauggggacgcucuccuacgagcaguucaagaagggcgugcagauccccugcaccugcgggaagcaggccaccaaguaccuggugcagcaggagagccccuucgucaugauguccgcgcccccggcccaguacgagcugaagcacggcaccuucacgugcgccagcgaguacaccggcaacuaccagugcgggcacuacaagcacaucaccuccaaggagacccucuacugcaucgacggcgcccugcugacgaagagcagcgaguacaaggggcccaucaccgacguguucuacaaggagaacuccuacaccaccacgaucaagcccgugaccuacaagcucgacggcgucgugugcaccgagaucgaccccaagcuggacaacuacuacaagaaggacaacagcuacuucaccgagcagccgaucgaccuggugcccaaccagcccuaccccaacgccuccuucgacaacuucaaguucgucugcgacaacaucaaguucgcggacgaccucaaccagcugacgggguacaagaagccggccagccgcgagcugaaggugaccuucuuccccgaccucaacggcgacguggucgccaucgacuacaagcacuacacccccuccuucaagaagggcgccaagcugcugcacaagcccaucguguggcacgugaacaacgcgaccaacaaggccacguacaagccgaacaccuggugcauccggugccucuggagcaccaagcccgucgagaccuccaacagcuucgacgugcugaaguccgaggacgcccaggggauggacaaccuggccugcgaggaccucaagcccgugagcgaggaggucguggagaaccccacgauccagaaggacgugcuggagugcaacgucaagaccaccgagguggugggcgacaucauccugaagccggccaacaacucccucaagaucaccgaggaggucgggcacacggaccugauggcggccuacguggacaacagcucccugaccaucaagaagcccaacgagcucagccgcgugcugggccugaagacccucgccacccacgggcuggccgccgucaacuccgugcccugggacacgaucgcgaacuacgccaagccguuccugaacaagguggucagcaccaccaccaacaucgugacgcgcugccucaaccgggugugcaccaacuacaugcccuacuucuucacccugcugcuccagcugugcaccuucacccgcuccacgaacagccggaucaaggccuccaugcccaccaccaucgccaagaacaccgucaagagcgugggcaaguucugccuggaggccagcuucaacuaccucaagucccccaacuucagcaagcugaucaacaucaucaucugguuccugcuccuguccgugugccugggcagccucaucuacuccacggcggcccuggggguccugaugagcaaccucggcaugccguccuacugcaccggguaccgcgagggcuaccugaacagcaccaacgugaccaucgccacguacugcaccggcuccauccccugcagcgugugccuguccgggcucgacagccuggacaccuaccccucccuggagaccauccagaucacgaucagcuccuucaagugggaccucaccgccuucggccuggucgccgagugguuccuggcguacauccucuucacccgguucuucuacgugcuggggcuggccgccaucaugcagcucuucuucagcuacuucgccgugcacuucaucuccaacagcuggcugauguggcugaucaucaaccugguccagauggcgcccaucuccgccauggugcgcauguacaucuucuucgccagcuucuacuacguguggaagagcuacguccacgugguggacggcugcaacuccagcaccugcaugaugugcuacaagcggaaccgcgccacgcgggucgagugcaccaccaucgugaacgggguccgccgguccuucuacguguacgccaacggcggcaagggguucugcaagcuccacaacuggaacugcgugaacugcgacaccuucugcgcgggcagcacguucaucuccgacgaggucgcccgcgaccugagccugcaguucaagcggccgaucaaccccaccgaccaguccagcuacaucguggacuccgugaccgucaagaacgggagcauccaccucuacuucgacaaggccggccagaagaccuacgagcgccacucccugagccacuucgugaaccuggacaaccuccgggccaacaacacgaaggggucccugcccaucaacgugaucgucuucgacggcaagagcaagugcgaggaguccagcgccaaguccgcgagcguguacuacucccagcugaugugccagcccauccuccugcuggaccaggcccucgugagcgacgucggcgacagcgccgagguggccgugaagauguucgacgccuacgucaacaccuucuccagcaccuucaacgugccgauggagaagcugaagacccugguggcgacggccgaggccgagcucgccaagaacgucucccuggacaacgugcugagcaccuucaucuccgcggcccgccagggguucguggacagcgacgucgagaccaaggacgugguggagugccucaagcugucccaccagagcgacaucgaggucaccggcgacuccugcaacaacuacaugcugacguacaacaagguggagaacaugaccccccgggaccucggggccugcaucgacugcagcgcccgccacaucaacgcccagguggcgaagucccacaacaucgcccugaucuggaacgucaaggacuucaugagccuguccgagcagcuccggaagcagauccgcagcgccgccaagaagaacaaccugcccuucaagcugaccugcgccaccacgcgccagguggugaacgucgugaccaccaagaucgcgcucaagggcgggugaggacuaguuauaagacugacuagcccgaugggccucccaacgggcccuccuccccuccuugcaccgagauuaauaaaaaaaaaaaaaaaaaaaaaaaaaaaaaaaaaaaaaaaaaaaaaaaaaaaaaaaaaaaaaaaaugcaucccccccccccccccccccccccccccccccaaaggcucuuuucagagccaccagaauu

SEQ ID NO: 21469 - RNA, 6058 nt, Artificial Sequence
  SARS-CoV-2__MT876598.1__non-structural protein 3 (NSP3) mRNA gc
aggagaaagcuuaccauggcccccaccaaggugaccuucggcgacgacacggucaucgaggugcagggguacaagagcgugaacaucaccuucgagcuggacgagcgcaucgacaagguccucaacgagaagugcuccgccuacaccguggagcugggcaccgaggugaacgaguucgcgugcgucguggccgacgccgugaucaagacgcugcagccggucagcgagcuccugaccccccuggggaucgaccucgacgagugguccauggccaccuacuaccuguucgacgagagcggcgaguucaagcuggccucccacauguacugcagcuucuacccccccgacgaggacgaggaggagggggacugcgaggaggaggaguucgagccguccacccaguacgaguacggcacggaggacgacuaccagggcaagccccucgaguucggggcgaccagcgccgcccugcagcccgaggaggagcaggaggaggacuggcuggacgacgacucccagcagaccgugggccagcaggacgggagcgaggacaaccagaccacgaccauccagaccaucguggagguccagccccagcucgagauggagcugaccccgguggugcagacgaucgaggucaacuccuucagcggcuaccugaagcucaccgacaacguguacaucaagaacgccgacaucguggaggaggcgaagaaggucaagcccaccgugguggucaacgccgccaacguguaccugaagcacgggggcggcguggccggggcccugaacaaggcgaccaacaacgccaugcaggucgaguccgacgacuacaucgccacgaacggcccccucaagguggggggcagcugcguccuguccggccacaaccuggccaagcacugccuccacgugguggggcccaacgucaacaagggcgaggacauccagcugcugaagagcgccuacgagaacuucaaccagcacgaggugcuccuggcgccgcugcucuccgccgggaucuucggcgccgaccccauccacagccugcgggugugcgucgacaccgugcgcaccaacguguaccuggccgucuucgacaagaaccucuacgacaagcugguguccagcuuccuggagaugaagagcgagaagcagguggagcagaagaucgccgagauccccaaggaggaggucaagcccuucaucaccgaguccaagccgagcguggagcagcggaagcaggacgacaagaagaucaaggcgugcguggaggaggucacgaccacccucgaggagaccaaguuccugacggagaaccugcuccuguacaucgacaucaacgggaaccugcaccccgacuccgccacccucgugagcgacaucgacaucaccuuccugaagaaggacgcccccuacaucgugggcgacgucgugcaggagggcgugcugaccgccgucgugauccccacgaagaaggccgggggcaccaccgagaugcucgcgaaggcccugcgcaaggugccgaccgacaacuacaucacgaccuaccccgggcagggccugaacggguacaccgucgaggaggccaagaccgugcucaagaagugcaaguccgccuucuacauccugcccagcaucaucuccaacgagaagcaggagauccugggcaccgugagcuggaaccuccgggagaugcuggcgcacgccgaggagacgcgcaagcugaugcccgucugcguggagaccaaggccaucguguccaccauccagcggaaguacaagggcaucaagauccaggagggggucguggacuacggcgcccgcuucuacuucuacaccagcaagacgaccguggccucccugaucaacacccucaacgaccugaacgagacccuggucacgaugccgcucggguacgugacccacggccugaaccuggaggaggcggcccgguacaugcgcagccucaaggugcccgccaccgucuccgugagcucccccgacgccgugaccgccuacaacggguaccugacgagcuccagcaagacccccgaggagcacuucaucgagaccgucucccuggcgggcagcuacaaggacuggagcuacuccggccagagcacccagcucgggaucgaguuccugaagcggggcgacaaguccguguacuacacgagcaacccgaccaccuuccaccuggacggggaggugaucaccuucgacaaccucaagacgcugcugucccuccgcgagguccggaccaucaagguguucaccaccguggacaacaucaaccugcacacgcaggucguggacaugagcaugaccuacggccagcaguucggccccaccuaccuggacggggccgacgugaccaagaucaagccccacaacucccacgagggcaagacguucuacguccucccgaacgacgacacccugcgcguggaggccuucgaguacuaccacaccaccgaccccagcuuccuggggcgguacauguccgcccucaaccacacgaagaaguggaaguacccccaggugaacggccugaccagcaucaagugggccgacaacaacugcuaccuggcgaccgcccuccugacccugcagcagaucgagcucaaguucaaccccccggcccugcaggacgccuacuaccgcgcgcgggccggggaggccgccaacuucugcgcccugauccucgcguacugcaacaagacggucggcgagcugggcgacgugcgcgagaccauguccuaccuguuccagcacgccaaccucgacagcugcaagcggguccugaacguggugugcaagaccugcgggcagcagcagaccacccugaagggcgucgaggccgugauguacauggggacgcucuccuacgagcaguucaagaagggcgugcagauccccugcaccugcgggaagcaggccaccaaguaccugguccagcaggagagccccuucgugaugauguccgcccccccggcgcaguacgagcugaagcacggcaccuucacgugcgccagcgaguacaccggcaacuaccagugcgggcacuacaagcacaucaccuccaaggagacccucuacugcaucgacggcgcccugcugacgaagagcagcgaguacaaggggcccaucaccgacguguucuacaaggagaacuccuacaccaccacgaucaagcccgucaccuacaagcucgacggcguggugugcaccgagaucgaccccaagcuggacaacuacuacaagaaggacaacagcuacuucaccgagcagccgaucgaccugguccccaaccagcccuaccccaacgccuccuucgacaacuucaaguucgugugcgacaacaucaaguucgccgacgaccucaaccagcugacgggguacaagaagccggcgagccgcgagcugaaggugaccuucuuccccgaccucaacggcgacgucguggccaucgacuacaagcacuacacccccuccuucaagaagggcgccaagcugcugcacaagcccaucguguggcacgucaacaacgccaccaacaaggcgacguacaagccgaacaccuggugcauccggugccucuggagcaccaagcccguggagaccuccaacagcuucgacgugcugaaguccgaggacgcccaggggauggacaaccuggccugcgaggaccucaagcccgucagcgaggaggugguggagaaccccacgauccagaaggacguccuggagugcaacgugaagaccaccgagguggucggcgacaucauccugaagccggccaacaacucccucaagaucaccgaggagguggggcacacggaccugauggccgcguacguggacaacagcucccugaccaucaagaagcccaacgagcucagccgcguccugggccugaagacccucgccacccacgggcuggccgccgugaacuccgugcccugggacacgaucgccaacuacgcgaagccguuccugaacaaggucgugagcaccaccaccaacaucgugacgcgcugccucaaccgggucugcaccaacuacaugcccuacuucuucacccugcugcuccagcugugcaccuucacccgcuccacgaacagccggaucaaggccuccaugcccaccaccaucgccaagaacaccgugaagagcgugggcaaguucugccuggaggccagcuucaacuaccucaagucccccaacuucagcaagcugaucaacaucaucaucugguuccugcuccuguccgucugccugggcagccucaucuacuccacggccgcgcugggggugcugaugagcaaccucggcaugccguccuacugcaccggguaccgcgagggcuaccugaacagcaccaacgugaccaucgccacguacugcaccggcuccauccccugcagcgucugccuguccgggcucgacagccuggacaccuaccccucccuggagaccauccagaucacgaucagcuccuucaagugggaccucaccgccuucggccugguggccgagugguuccuggccuacauccucuucacccgguucuucuacgugcuggggcuggcggccaucaugcagcucuucuucagcuacuucgccguccacuucaucuccaacagcuggcugauguggcugaucaucaaccuggugcagauggcccccaucuccgcgauggugcgcauguacaucuucuucgccagcuucuacuacgucuggaagagcuacgugcacguggucgacggcugcaacuccagcaccugcaugaugugcuacaagcggaaccgcgccacgcggguggagugcaccaccaucgucaacggggugcgccgguccuucuacguguacgccaacggcggcaagggguucugcaagcuccacaacuggaacugcgucaacugcgacaccuucugcgccggcagcacguucaucuccgacgagguggcgcgcgaccugagccugcaguucaagcggccgaucaaccccaccgaccaguccagcuacaucguggacuccgucaccgugaagaacgggagcauccaccucuacuucgacaaggccggccagaagaccuacgagcgccacucccugagccacuucgugaaccuggacaaccuccgggccaacaacacgaaggggucccugcccaucaacgucaucguguucgacggcaagagcaagugcgaggaguccagcgccaaguccgccagcguguacuacucccagcugaugugccagcccauccuccugcuggaccaggcgcucgucagcgacgugggcgacagcgccgagguggccgucaagauguucgacgccuacgugaacaccuucuccagcaccuucaacgugccgauggagaagcugaagacccuggucgccacggcggaggccgagcucgccaagaacgugucccuggacaacgugcugagcaccuucaucuccgccgcgcgccagggguucgucgacagcgacguggagaccaaggacguggucgagugccucaagcugucccaccagagcgacaucgaggugaccggcgacuccugcaacaacuacaugcugacguacaacaagguggagaacaugaccccccgggaccucggggccugcaucgacugcagcgcccgccacaucaacgcccaggucgccaagucccacaacaucgcgcugaucuggaacgugaaggacuucaugagccuguccgagcagcuccggaagcagauccgcagcgccgccaagaagaacaaccugcccuucaagcugaccugcgccaccacgcgccagguggucaacguggugaccaccaagaucgcccucaagggcgggugaggacuaguuauaagacugacuagcccgaugggccucccaacgggcccuccuccccuccuugcaccgagauuaauaaaaaaaaaaaaaaaaaaaaaaaaaaaaaaaaaaaaaaaaaaaaaaaaaaaaaaaaaaaaaaaaugcaucccccccccccccccccccccccccccccccaaaggcucuuuucagagccaccagaauu

SEQ ID NO: 21470 - RNA, 6058 nt, Artificial Sequence
  SARS-CoV-2__MT876599.1__non-structural protein 3 (NSP3) mRNA gc
aggagaaagcuuaccauggcccccaccaaggugaccuucggcgacgacacggucaucgaggugcagggguacaagagcgugaacaucaccuucgagcuggacgagcgcaucgacaagguccucaacgagaagugcuccgccuacaccguggagcugggcaccgaggugaacgaguucgcgugcgucguggccgacgccgugaucaagacgcugcagccggucagcgagcuccugaccccccuggggaucgaccucgacgagugguccauggccaccuacuaccuguucgacgagagcggcgaguucaagcuggccucccacauguacugcagcuucuacccccccgacgaggacgaggaggagggggacugcgaggaggaggaguucgagccguccacccaguacgaguacggcacggaggacgacuaccagggcaagccccucgaguucggggcgaccagcgccgcccugcagcccgaggaggagcaggaggaggacuggcuggacgacgacucccagcagaccgugggccagcaggacgggagcgaggacaaccagaccacgaccauccagaccaucguggagguccagccccagcucgagauggagcugaccccgguggugcagacgaucgaggucaacuccuucagcggcuaccugaagcucaccgacaacguguacaucaagaacgccgacaucguggaggaggcgaagaaggucaagcccaccgugguggucaacgccgccaacguguaccugaagcacgggggcggcguggccggggcccugaacaaggcgaccaacaacgccaugcaggucgaguccgacgacuacaucgccacgaacggcccccucaagguggggggcagcugcguccuguccggccacaaccuggccaagcacugccuccacgugguggggcccaacgucaacaagggcgaggacauccagcugcugaagagcgccuacgagaacuucaaccagcacgaggugcuccuggcgccgcugcucuccgccgggaucuucggcgccgaccccauccacagccugcgggugugcgucgacaccgugcgcaccaacguguaccuggccgucuucgacaagaaccucuacgacaagcugguguccagcuuccuggagaugaagagcgagaagcagguggagcagaagaucgccgagauccccaaggaggaggucaagcccuucaucaccgaguccaagccgagcguggagcagcggaagcaggacgacaagaagaucaaggcgugcguggaggaggucacgaccacccucgaggagaccaaguuccugacggagaaccugcuccuguacaucgacaucaacgggaaccugcaccccgacuccgccacccucgugagcgacaucgacaucaccuuccugaagaaggacgcccccuacaucgugggcgacgucgugcaggagggcgugcugaccgccgucgugauccccacgaagaaggccgggggcaccaccgagaugcucgcgaaggcccugcgcaaggugccgaccgacaacuacaucacgaccuaccccgggcagggccugaacggguacaccgucgaggaggccaagaccgugcucaagaagugcaaguccgccuucuacauccugcccagcaucaucuccaacgagaagcaggagauccugggcaccgugagcuggaaccuccgggagaugcuggcgcacgccgaggagacgcgcaagcugaugcccgucugcguggagaccaaggccaucguguccaccauccagcggaaguacaagggcaucaagauccaggagggggucguggacuacggcgcccgcuucuacuucuacaccagcaagacgaccguggccucccugaucaacacccucaacgaccugaacgagacccuggucacgaugccgcucggguacgugacccacggccugaaccuggaggaggcggcccgguacaugcgcagccucaaggugcccgccaccgucuccgugagcucccccgacgccgugaccgccuacaacggguaccugacgagcuccagcaagacccccgaggagcacuucaucgagaccaucucccuggcgggcagcuacaaggacuggagcuacuccggccagagcacccagcucgggaucgaguuccugaagcggggcgacaaguccgucuacuacacgagcaacccgaccaccuuccaccuggacggggaggugaucaccuucgacaaccucaagacgcugcugucccuccgcgaggugcggaccaucaaggucuucaccaccguggacaacaucaaccugcacacgcagguggucgacaugagcaugaccuacgcccagcaguucggccccaccuaccuggacggcgccgacgugaccaagaucaagccccacaacucccacgaggggaagacguucuacgugcucccgaacgacgacacccugcgcgucgaggccuucgaguacuaccacaccaccgaccccagcuuccugggccgguacauguccgcccucaaccacacgaagaaguggaaguacccccaggugaacgggcugaccagcaucaagugggcggacaacaacugcuaccuggccaccgcccuccugacccugcagcagaucgagcucaaguucaaccccccggcccugcaggacgcguacuaccgcgcccgggccggcgaggccgccaacuucugcgcgcugauccucgccuacugcaacaagacggugggggagcugggcgacguccgcgagaccauguccuaccuguuccagcacgccaaccucgacagcugcaagcgggugcugaacgucgugugcaagaccugcggccagcagcagaccacccugaaggggguggaggccgucauguacaugggcacgcucuccuacgagcaguucaagaagggggugcagauccccugcaccugcggcaagcaggccaccaaguaccuggugcagcaggagagccccuucgucaugauguccgcgcccccggcccaguacgagcugaagcacgggaccuucacgugcgccagcgaguacaccggcaacuaccagugcggccacuacaagcacaucaccuccaaggagacccucuacugcaucgacggggcccugcugacgaagagcagcgaguacaagggccccaucaccgacguguucuacaaggagaacuccuacaccaccacgaucaagcccgugaccuacaagcucgacggggucgugugcaccgagaucgaccccaagcuggacaacuacuacaagaaggacaacagcuacuucaccgagcagccgaucgaccuggugcccaaccagcccuaccccaacgccuccuucgacaacuucaaguucgucugcgacaacaucaaguucgcggacgaccucaaccagcugacgggcuacaagaagccggccagccgcgagcugaaggugaccuucuuccccgaccucaacggggacguggucgccaucgacuacaagcacuacacccccuccuucaagaagggcgccaagcugcugcacaagcccaucguguggcacgugaacaacgcgaccaacaaggccacguacaagccgaacaccuggugcauccggugccucuggagcaccaagcccgucgagaccuccaacagcuucgacgugcugaaguccgaggacgcccagggcauggacaaccuggccugcgaggaccucaagcccgugagcgaggaggucguggagaaccccacgauccagaaggacgugcuggagugcaacgucaagaccaccgagguggugggggacaucauccugaagccggccaacaacucccucaagaucaccgaggaggucggccacacggaccugauggcggccuacguggacaacagcucccugaccaucaagaagcccaacgagcucagccgcgugcuggggcugaagacccucgccacccacggccuggccgccgucaacuccgugcccugggacacgaucgcgaacuacgccaagccguuccugaacaagguggucagcaccaccaccaacaucgugacgcgcugccucaaccgggugugcaccaacuacaugcccuacuucuucacccugcugcuccagcugugcaccuucacccgcuccacgaacagccggaucaaggccuccaugcccaccaccaucgccaagaacaccgucaagagcguggggaaguucugccuggaggccagcuucaacuaccucaagucccccaacuucagcaagcugaucaacaucaucaucugguuccugcuccuguccgugugccugggcagccucaucuacuccacggcggcccugggcguccugaugagcaaccucgggaugccguccuacugcaccggcuaccgcgagggguaccugaacagcaccaacgugaccaucgccacguacugcaccggcuccauccccugcagcgugugccuguccggccucgacagccuggacaccuaccccucccuggagaccauccagaucacgaucagcuccuucaagugggaccucaccgccuucgggcuggucgccgagugguuccuggcguacauccucuucacccgguucuucuacgugcugggccuggccgccaucaugcagcucuucuucagcuacuucgccgugcacuucaucuccaacagcuggcugauguggcugaucaucaaccugguccagauggcgcccaucuccgccauggugcgcauguacaucuucuucgccagcuucuacuacguguggaagagcuacguccacgugguggacgggugcaacuccagcaccugcaugaugugcuacaagcggaaccgcgccacgcgggucgagugcaccaccaucgugaacggcguccgccgguccuucuacguguacgccaacgggggcaagggcuucugcaagcuccacaacuggaacugcgugaacugcgacaccuucugcgcggggagcacguucaucuccgacgaggucgcccgcgaccugagccugcaguucaagcggccgaucaaccccaccgaccaguccagcuacaucguggacuccgugaccgucaagaacggcagcauccaccucuacuucgacaaggccgggcagaagaccuacgagcgccacucccugagccacuucgugaaccuggacaaccuccgggccaacaacacgaagggcucccugcccaucaacgugaucgucuucgacgggaagagcaagugcgaggaguccagcgccaaguccgcgagcguguacuacucccagcugaugugccagcccauccuccugcuggaccaggcccucgugagcgacgucggcgacagcgccgagguggccgugaagauguucgacgccuacgucaacaccuucuccagcaccuucaacgugccgauggagaagcugaagacccugguggcgacggccgaggccgagcucgccaagaacgucucccuggacaacgugcuggcgaccuucaucagcgccgcccgccagggcuucguggacuccgacgucgagaccaaggacgugguggagugccucaagcugagccaccaguccgacaucgaggucaccggggacagcugcaacaacuacaugcugacguacaacaagguggagaacaugaccccccgggaccucggcgccugcaucgacugcuccgcccgccacaucaacgcgcagguggccaagagccacaacaucgcccugaucuggaacgucaaggacuucaugucccugagcgagcagcuccggaagcagauccgcuccgccgccaagaagaacaaccugcccuucaagcugaccugcgcgaccacgcgccagguggugaacgucgugaccaccaagaucgcccucaaggggggcugaggacuaguuauaagacugacuagcccgaugggccucccaacgggcccuccuccccuccuugcaccgagauuaauaaaaaaaaaaaaaaaaaaaaaaaaaaaaaaaaaaaaaaaaaaaaaaaaaaaaaaaaaaaaaaaaugcaucccccccccccccccccccccccccccccccaaaggcucuuuucagagccaccagaauu

SEQ ID NO: 21471 - RNA, 6058 nt, Artificial Sequence
  SARS-CoV-2__MT876607.1__non-structural protein 3 (NSP3) mRNA gc
aggagaaagcuuaccauggcccccaccaaggugaccuucggcgacgacacggucaucgaggugcagggguacaagagcgugaacaucaccuucgagcuggacgagcgcaucgacaagguccucaacgagaagugcuccgccuacaccguggagcugggcaccgaggugaacgaguucgcgugcgucguggccgacgccgugaucaagacgcugcagccggucagcgagcuccugaccccccuggggaucgaccucgacgagugguccauggccaccuacuaccuguucgacgagagcggcgaguucaagcuggccucccacauguacugcagcuucuacccccccgacgaggacgaggaggagggggacugcgaggaggaggaguucgagccguccacccaguacgaguacggcacggaggacgacuaccagggcaagccccucgaguucggggcgaccagcgccgcccugcagcccgaggaggagcaggaggaggacuggcuggacgacgacucccagcagaccgugggccagcaggacgggagcgaggacaaccagaccacgaccauccagaccaucguggagguccagccccagcucgagauggagcugaccccgguggugcagacgaucgaggucaacuccuucagcggcuaccugaagcucaccgacaacguguacaucaagaacgccgacaucguggaggaggcgaagaaggucaagcccaccgugguggucaacgccgccaacguguaccugaagcacgggggcggcguggccggggcccugaacaaggcgaccaacaacgccaugcaggucgaguccgacgacuacaucgccacgaacggcccccucaagguggggggcagcugcguccuguccggccacaaccuggccaagcacugccuccacgugguggggcccaacgucaacaagggcgaggacauccagcugcugaagagcgccuacgagaacuucaaccagcacgaggugcuccuggcgccgcugcucuccgccgggaucuucggcgccgaccccauccacagccugcgggugugcgucgacaccgugcgcaccaacguguaccuggccgucuucgacaagaaccucuacgacaagcugguguccagcuuccuggagaugaagagcgagaagcagguggagcagaagaucgccgagauccccaaggaggaggucaagcccuucaucaccgaguccaagccgagcguggagcagcggaagcaggacgacaagaagaucaaggcgugcguggaggaggucacgaccacccucgaggagaccaaguuccugacggagaaccugcuccuguacaucgacaucaacgggaaccugcaccccgacuccgccacccucgugagcgacaucgacaucaccuuccugaagaaggacgugcccuacaucgucggcgacguggugcaggagggcguccugaccgccguggugauccccacgaagaaggccgggggcaccaccgagaugcucgccaaggcgcugcgcaaggucccgaccgacaacuacaucacgaccuaccccgggcagggccugaacggguacaccguggaggaggccaagaccgugcucaagaagugcaaguccgccuucuacauccugcccagcaucaucuccaacgagaagcaggagauccugggcaccgucagcuggaaccuccgggagaugcuggcccacgcggaggagacgcgcaagcugaugcccgugugcguggagaccaaggccaucgucuccaccauccagcggaaguacaagggcaucaagauccaggagggggugguggacuacggcgcccgcuucuacuucuacaccagcaagacgaccgucgccucccugaucaacacccucaacgaccugaacgagacccuggugacgaugccgcucggguacgugacccacggccugaaccuggaggaggccgcgcgguacaugcgcagccucaagguccccgccaccguguccgugagcucccccgacgccgucaccgccuacaacggguaccugacgagcuccagcaagacccccgaggagcacuucaucgagaccaucucccuggccggcagcuacaaggacuggagcuacuccggccagagcacccagcucgggaucgaguuccugaagcggggcgacaaguccguguacuacacgagcaacccgaccaccuuccaccuggacggggaggugaucaccuucgacaaccucaagacgcugcugucccuccgcgagguccggaccaucaagguguucaccaccguggacaacaucaaccugcacacgcaggucguggacaugagcaugaccuacggccagcaguucggccccaccuaccuggacggggcggacgugaccaagaucaagccccacaacucccacgagggcaagacguucuacguccucccgaacgacgacacccugcgcguggaggccuucgaguacuaccacaccaccgaccccagcuuccuggggcgguacauguccgcccucaaccacacgaagaaguggaaguacccccaggugaacggccugaccagcaucaagugggccgacaacaacugcuaccuggccaccgcgcuccugacccugcagcagaucgagcucaaguucaaccccccggcccugcaggacgccuacuaccgcgcccgggcgggggaggccgccaacuucugcgcccugauccucgccuacugcaacaagacggucggcgagcugggcgacgugcgcgagaccauguccuaccuguuccagcacgcgaaccucgacagcugcaagcggguccugaacguggugugcaagaccugcgggcagcagcagaccacccugaagggcgucgaggccgugauguacauggggacgcucuccuacgagcaguucaagaagggcgugcagauccccugcaccugcgggaagcaggccaccaaguaccugguccagcaggagagccccuucgugaugauguccgcccccccggcccaguacgagcugaagcacggcaccuucacgugcgcgagcgaguacaccggcaacuaccagugcgggcacuacaagcacaucaccuccaaggagacccucuacugcaucgacggcgcccugcugacgaagagcagcgaguacaaggggcccaucaccgacguguucuacaaggagaacuccuacaccaccacgaucaagcccgucaccuacaagcucgacggcguggugugcaccgagaucgaccccaagcuggacaacuacuacaagaaggacaacagcuacuucaccgagcagccgaucgaccugguccccaaccagcccuaccccaacgccuccuucgacaacuucaaguucgugugcgacaacaucaaguucgccgacgaccucaaccagcugacgggguacaagaagccggccagccgcgagcugaaggugaccuucuuccccgaccucaacggcgacgucguggcgaucgacuacaagcacuacacccccuccuucaagaagggcgccaagcugcugcacaagcccaucguguggcacgucaacaacgccaccaacaaggccacguacaagccgaacaccuggugcauccggugccucuggagcaccaagcccguggagaccuccaacagcuucgacgugcugaaguccgaggacgcgcaggggauggacaaccuggccugcgaggaccucaagcccgucagcgaggaggugguggagaaccccacgauccagaaggacguccuggagugcaacgugaagaccaccgagguggucggcgacaucauccugaagccggccaacaacucccucaagaucaccgaggagguggggcacacggaccugauggccgccuacguggacaacagcucccugaccaucaagaagcccaacgagcucagccgcguccugggccugaagacccucgcgacccacgggcuggccgccgugaacuccgugcccugggacacgaucgccaacuacgccaagccguuccugaacaaggucgugagcaccaccaccaacaucgugacgcgcugccucaaccgggucugcaccaacuacaugcccuacuucuucacccugcugcuccagcugugcaccuucacccgcuccacgaacagccggaucaaggcguccaugcccaccaccaucgccaagaacaccgugaagagcgugggcaaguucugccuggaggccagcuucaacuaccucaagucccccaacuucagcaagcugaucaacaucaucaucugguuccugcuccuguccgucugccugggcagccucaucuacuccacggccgcccugggggugcugaugagcaaccucggcaugccguccuacugcaccggguaccgcgagggcuaccugaacagcaccaacgugaccaucgcgacguacugcaccggcuccauccccugcagcgucugccuguccgggcucgacagccuggacaccuaccccucccuggagaccauccagaucacgaucagcuccuucaagugggaccucaccgccuucggccugguggccgagugguuccuggccuacauccucuucacccgguucuucuacgugcuggggcuggccgcgaucaugcagcucuucuucagcuacuucgccguccacuucaucuccaacagcuggcugauguggcugaucaucaaccuggugcagauggcccccaucuccgccauggugcgcauguacaucuucuucgcgagcuucuacuacgucuggaagagcuacgugcacguggucgacggcugcaacuccagcaccugcaugaugugcuacaagcggaaccgcgccacgcggguggagugcaccaccaucgucaacggggugcgccgguccuucuacguguacgccaacggcggcaagggguucugcaagcuccacaacuggaacugcgucaacugcgacaccuucugcgccggcagcacguucaucuccgacgagguggcccgcgaccugagccugcaguucaagcggccgaucaaccccaccgaccaguccagcuacaucguggacuccgucaccgugaagaacgggagcauccaccucuacuucgacaaggcgggccagaagaccuacgagcgccacucccugagccacuucgugaaccuggacaaccuccgggccaacaacacgaaggggucccugcccaucaacgucaucguguucgacggcaagagcaagugcgaggaguccagcgccaaguccgccagcguguacuacucccagcugaugugccagcccauccuccugcuggaccaggcccucgucagcgacgugggcgacagcgcggagguggccgucaagauguucgacgccuacgugaacaccuucuccagcaccuucaacgugccgauggagaagcugaagacccuggucgccacggccgaggcggagcucgccaagaacgugucccuggacaacgugcugagcaccuucaucuccgccgcccgccagggguucgucgacagcgacguggagaccaaggacguggucgagugccucaagcugucccaccagagcgacaucgaggugaccggcgacuccugcaacaacuacaugcugacguacaacaagguggagaacaugaccccccgggaccucggggcgugcaucgacugcagcgcccgccacaucaacgcccaggucgccaagucccacaacaucgcccugaucuggaacgugaaggacuucaugagccuguccgagcagcuccggaagcagauccgcagcgcggccaagaagaacaaccugcccuucaagcugaccugcgccaccacgcgccagguggucaacguggugaccaccaagaucgcccucaagggcgggugaggacuaguuauaagacugacuagcccgaugggccucccaacgggcccuccuccccuccuugcaccgagauuaauaaaaaaaaaaaaaaaaaaaaaaaaaaaaaaaaaaaaaaaaaaaaaaaaaaaaaaaaaaaaaaaaugcaucccccccccccccccccccccccccccccccaaaggcucuuuucagagccaccagaauu

SEQ ID NO: 21472 - RNA, 6058 nt, Artificial Sequence
  SARS-CoV-2__MT877304.1__non-structural protein 3 (NSP3) mRNA gc
aggagaaagcuuaccauggcccccaccaaggugaccuucggcgacgacacggucaucgaggugcagggguacaagagcgugaacaucaccuucgagcuggacgagcgcaucgacaagguccucaacgagaagugcuccgccuacaccguggagcugggcaccgaggugaacgaguucgcgugcgucguggccgacgccgugaucaagacgcugcagccggucagcgagcuccugaccccccuggggaucgaccucgacgagugguccauggccaccuacuaccuguucgacgagagcggcgaguucaagcuggccucccacauguacugcagcuucuacccccccgacgaggacgaggaggagggggacugcgaggaggaggaguucgagccguccacccaguacgaguacggcacggaggacgacuaccagggcaagccccucgaguucggggcgaccagcgccgcccugcagcccgaggaggagcaggaggaggacuggcuggacgacgacucccagcagaccgugggccagcaggacgggagcgaggacaaccagaccacgaccauccagaccaucguggagguccagccccagcucgagauggagcugaccccgguggugcagacgaucgaggucaacuccuucagcggcuaccugaagcucaccgacaacguguacaucaagaacgccgacaucguggaggaggcgaagaaggucaagcccaccgugguggucaacgccgccaacguguaccugaagcacgggggcggcguggccggggcccugaacaaggcgaccaacaacgccaugcaggucgaguccgacgacuacaucgccacgaacggcccccucaagguggggggcagcugcguccuguccggccacaaccuggccaagcacugccuccacgugguggggcccaacgucaacaagggcgaggacauccagcugcugaagagcgccuacgagaacuucaaccagcacgaggugcuccuggcgccgcugcucuccgccgggaucuucggcgccgaccccauccacagccugcgggugugcgucgacaccgugcgcaccaacguguaccuggccgucuucgacaagaaccucuacgacaagcugguguccagcuuccuggagaugaagagcgagaagcagguggagcagaagaucgccgagauccccaaggaggaggucaagcccuucaucaccgaguccaagccgagcguggagcagcggaagcaggacgacaagaagaucaaggcgugcguggaggaggucacgaccacccucgaggagaccaaguuccugacggagaaccugcuccuguacaucgacaucaacgggaaccugcaccccgacuccgccacccucgugagcgacaucgacaucaccuuccugaagaaggacgcccccuacaucgugggcgacgucgugcaggagggcgugcugaccgccgucgugauccccacgaagaaggccgggggcaccaccgagaugcucgcgaaggcccugcgcaaggugccgaccgacaacuacaucacgaccuaccccgggcagggccugaacggguacaccgucgaggaggccaagaccgugcucaagaagugcaaguccgccuucuacauccugcccagcaucaucuccaacgagaagcaggagauccugggcaccgugagcuggaaccuccgggagaugcuggcgcacgccgaggagacgcgcaagcugaugcccgucugcguggagaccaaggccaucguguccaccauccagcggaaguacaagggcaucaagauccaggagggggucguggacuacggcgcccgcuucuacuucuacaccagcaagacgaccguggccucccugaucaacacccucaacgaccugaacgagacccuggucacgaugccgcucggguacgugacccacggccugaaccuggaggaggcggcccgguacaugcgcagccucaaggugcccgccaccgucuccgugagcucccccgacgccgugaccgccuacaacggguaccugacgagcuccagcaagacccccgaggagcacuucaucgagaccaucucccuggcgggcagcuacaaggacuggagcuacuccggccagagcacccagcucgggaucgaguuccugaagcggggcgacaaguccgucuacuacacgagcaacccgaccaccuuccaccuggacggggaggugaucaccuucgacaaccucaagacgcugcugucccuccgcgaggugcggaccaucaaggucuucaccaccguggacaacaucaaccugcacacgcagguggucgacaugagcaugaccuacggccagcaguucggccccaccuaccuggacggggccgacgugaccaagaucaagccccacaacucccacgagggcaagacguucuacgugcucccgaacgacgacacccugcgcgucgaggccuucgaguacuaccacaccaccgaccccagcuuccuggggcgguacauguccgcccucaaccacacgaagaaguggaaguacccccaggugaacggccugaccagcaucaagugggccgacaacaacugcuaccuggcgaccgcccuccugacccugcagcagaucgagcucaaguucaaccccccggcccugcaggacgccuacuaccgcgcgcgggccggggaggccgccaacuucugcgcccugauccucgcguacugcaacaagacggugggcgagcugggcgacguccgcgagaccauguccuaccuguuccagcacgccaaccucgacagcugcaagcgggugcugaacgucgugugcaagaccugcgggcagcagcagaccacccugaagggcguggaggccgucauguacauggggacgcucuccuacgagcaguucaagaagggcgugcagauccccugcaccugcgggaagcaggccaccaaguaccuggugcagcaggagagccccuucgucaugauguccgcccccccggcgcaguacgagcugaagcacggcaccuucacgugcgccagcgaguacaccggcaacuaccagugcgggcacuacaagcacaucaccuccaaggagacccucuacugcaucgacggcgcccugcugacgaagagcagcgaguacaaggggcccaucaccgacguguucuacaaggagaacuccuacaccaccacgaucaagcccgugaccuacaagcucgacggcgucgugugcaccgagaucgaccccaagcuggacaacuacuacaagaaggacaacagcuacuucaccgagcagccgaucgaccuggugcccaaccagcccuaccccaacgccuccuucgacaacuucaaguucgucugcgacaacaucaaguucgccgacgaccucaaccagcugacgggguacaagaagccggcgagccgcgagcugaaggugaccuucuuccccgaccucaacggcgacguggucgccaucgacuacaagcacuacacccccuccuucaagaagggcgccaagcugcugcacaagcccaucguguggcacgugaacaacgccaccaacaaggcgacguacaagccgaacaccuggugcauccggugccucuggagcaccaagcccgucgagaccuccaacagcuucgacgugcugaaguccgaggacgcccaggggauggacaaccuggccugcgaggaccucaagcccgugagcgaggaggucguggagaaccccacgauccagaaggacgugcuggagugcaacgucaagaccaccgagguggugggcgacaucauccugaagccggccaacaacucccucaagaucaccgaggaggucgggcacacggaccugauggccgcguacguggacaacagcucccugaccaucaagaagcccaacgagcucagccgcgugcugggccugaagacccucgccacccacgggcuggccgccgucaacuccgugcccugggacacgaucgccaacuacgcgaagccguuccugaacaagguggucagcaccaccaccaacaucgugacgcgcugccucaaccgggugugcaccaacuacaugcccuacuucuucacccugcugcuccagcugugcaccuucacccgcuccacgaacagccggaucaaggccuccaugcccaccaccaucgccaagaacaccgucaagagcgugggcaaguucugccuggaggccagcuucaacuaccucaagucccccaacuucagcaagcugaucaacaucaucaucugguuccugcuccuguccgugugccugggcagccucaucuacuccacggccgcgcuggggguccugaugagcaaccucggcaugccguccuacugcaccggguaccgcgagggcuaccugaacagcaccaacgugaccaucgccacguacugcaccggcuccauccccugcagcgugugccuguccgggcucgacagccuggacaccuaccccucccuggagaccauccagaucacgaucagcuccuucaagugggaccucaccgccuucggccuggucgccgagugguuccuggccuacauccucuucacccgguucuucuacgugcuggggcuggcggccaucaugcagcucuucuucagcuacuucgccauccacuucaucuccaacagcuggcugauguggcugaucaucaaccuggugcagauggcccccaucuccgcgaugguccgcauguacaucuucuucgccagcuucuacuacguguggaagagcuacgugcacgucguggacggcugcaacuccagcaccugcaugaugugcuacaagcggaaccgcgccacgcggguggagugcaccaccaucgucaacggggugcgccgguccuucuacgucuacgccaacggcggcaagggguucugcaagcuccacaacuggaacugcgugaacugcgacaccuucugcgccggcagcacguucaucuccgacgagguggcgcgcgaccugagccugcaguucaagcggccgaucaaccccaccgaccaguccagcuacaucgucgacuccgugaccgugaagaacgggagcauccaccucuacuucgacaaggccggccagaagaccuacgagcgccacucccugagccacuucgucaaccuggacaaccuccgggccaacaacacgaaggggucccugcccaucaacgugaucguguucgacggcaagagcaagugcgaggaguccagcgccaaguccgccagcgucuacuacucccagcugaugugccagcccauccuccugcuggaccaggcgcucgugagcgacgugggcgacagcgccgaggucgccgugaagauguucgacgccuacgugaacaccuucuccagcaccuucaacgucccgauggagaagcugaagacccugguggccacggcggaggccgagcucgccaagaacgugucccuggacaacguccugagcaccuucaucuccgccgcgcgccagggguucguggacagcgacguggagaccaaggacgucguggagugccucaagcugucccaccagagcgacaucgaggugaccggcgacuccugcaacaacuacaugcugacguacaacaaggucgagaacaugaccccccgggaccucggggccugcaucgacugcagcgcccgccacaucaacgcccagguggccaagucccacaacaucgcgcugaucuggaacgugaaggacuucaugagccuguccgagcagcuccggaagcagauccgcagcgccgccaagaagaacaaccugcccuucaagcugaccugcgccaccacgcgccaggucgugaacguggucaccaccaagaucgcccucaagggcgggugaggacuaguuauaagacugacuagcccgaugggccucccaacgggcccuccuccccuccuugcaccgagauuaauaaaaaaaaaaaaaaaaaaaaaaaaaaaaaaaaaaaaaaaaaaaaaaaaaaaaaaaaaaaaaaaaugcaucccccccccccccccccccccccccccccccaaaggcucuuuucagagccaccagaauu

SEQ ID NO: 21473 - RNA, 6058 nt, Artificial Sequence
  SARS-CoV-2__MT877315.1__non-structural protein 3 (NSP3) mRNA gc
aggagaaagcuuaccauggcccccaccaaggugaccuucggcgacgacacggucaucgaggugcagggguacaagagcgugaacaucaccuucgagcuggacgagcgcaucgacaagguccucaacgagaagugcuccgccuacaccguggagcugggcaccgaggugaacgaguucgcgugcgucguggccgacgccgugaucaagacgcugcagccggucagcgagcuccugaccccccuggggaucgaccucgacgagugguccauggccaccuacuaccuguucgacgagagcggcgaguucaagcuggccucccacauguacugcagcuucuacccccccgacgaggacgaggaggagggggacugcgaggaggaggaguucgagccguccacccaguacgaguacggcacggaggacgacuaccagggcaagccccucgaguucggggcgaccagcgccgcccugcagcccgaggaggagcaggaggaggacuggcuggacgacgacucccagcagaccgugggccagcaggacgggagcgaggacaaccagaccacgaccauccagaccaucguggagguccagccccagcucgagauggagcugaccccgguggugcagacgaucgaggucaacuccuucagcggcuaccugaagcucaccgacaacguguacaucaagaacgccgacaucguggaggaggcgaagaaggucaagcccaccgugguggucaacgccgccaacguguaccugaagcacgggggcggcguggccggggcccugaacaaggcgaccaacaacgccaugcaggucgaguccgacgacuacaucgccacgaacggcccccucaagguggggggcagcugcguccuguccggccacaaccuggccaagcacugccuccacgugguggggcccaacgucaacaagggcgaggacauccagcugcugaagagcgccuacgagaacuucaaccagcacgaggugcuccuggcgccgcugcucuccgccgggaucuucggcgccgaccccauccacagccugcgggugugcgucgacaccgugcgcaccaacguguaccuggccgucuucgacaagaaccucuacgacaagcugguguccagcuuccuggagaugaagagcgagaagcagguggagcagaagaucgccgagauccccaaggaggaggucaagcccuucaucaccgaguccaagccgagcguggagcagcggaagcaggacgacaagaagaucaaggcgugcguggaggaggucacgaccacccucgaggagaccaaguuccugacggagaaccugcuccuguacaucgacaucaacgggaaccugcaccccgacuccgccacccucgugagcgacaucgacaucaccuuccugaagaaggacgcccccuacaucgugggcgacgucgugcaggagggcgugcugaccgccgucgugauccccacgaagaaggccgggggcaccaccgagaugcucgcgaaggcccugcgcaaggugccgaccgacaacuacaucacgaccuaccccgggcagggccugaacggguacaccgucgaggaggccaagaccgugcucaagaagugcaaguccgccuucuacauccugcccagcaucaucuccaacgagaagcaggagauccugggcaccgugagcuggaaccuccgggagaugcuggcgcacgccgaggagacgcgcaagcugaugcccgucugcguggagaccaaggccaucguguccaccauccagcggaaguacaagggcaucaagauccaggagggggucguggacuacggcgcccgcuucuacuucuacaccagcaagacgaccguggccucccugaucaacacccucaacgaccugaacgagacccuggucacgaugccgcucggguacgugacccacggccugaaccuggaggaggcggcccgguacaugcgcagccucaaggugcccgccaccgucuccgugagcucccccgacgccgugaccgccuacaacggguaccugacgagcuccagcaagacccccgaggagcacuucaucgagaccaucucccuggcgggcagcuacaaggacuggagcuacuccggccagagcacccagcucgggaucgaguuccugaagcggggcgacaaguccgucuacuacacgagcaacccgaccaccuuccaccuggacggggaggugaucaccuucgacaaccucaagacgcugcugucccuccgcgaggugcggaccaucaaggucuucaccaccguggacaacaucaaccugcacacgcagguggucgacaugagcaugaccuacggccagcaguucggccccaccuaccuggacggggccgacgugaccaagaucaagccccacaacucccacgagggcaagacguucuacgugcucccgaacgacgacacccugcgcgucgaggccuucgaguacuaccacaccaccgaccccagcuuccuggggcgguacauguccgcccucaaccacacgaagaaguggaaguacccccaggugaacggccugaccagcaucaagugggccgacaacaacugcuaccuggcgaccgcccuccugacccugcagcagaucgagcucaaguucaaccccccggcccugcaggacgccuacuaccgcgcgcgggccggggaggccgccaacuucugcgcccugauccucgcguacugcaacaagacggugggcgagcugggcgacguccgcgagaccauguccuaccuguuccagcacgccaaccucgacagcugcaagcgggugcugaacgucgugugcaagaccugcgggcagcagcagaccacccugaagggcguggaggccgucauguacauggggacgcucuccuacgagcaguucaagaagggcgugcagauccccugcaccugcgggaagcaggccaccaaguaccuggugcagcaggagagccccuucgucaugauguccgcccccccggcgcaguacgagcugaagcacggcaccuucacgugcgccagcgaguacaccggcaacuaccagugcgggcacuacaagcacaucaccuccaaggagacccucuacugcaucgacggcgcccugcugacgaagagcagcgaguacaaggggcccaucaccgacguguucuacaaggagaacuccuacaccaccacgaucaagcccgugaccuacaagcucgacggcgucgugugcaccgagaucgaccccaagcuggacaacuacuacaagaaggacaacagcuacuucaccgagcagccgaucgaccuggugcccaaccagcccuaccccaacgccuccuucgacaacuucaaguucgucugcgacaacaucaaguucgccgacgaccucaaccagcugacgggguacaagaagccggcgagccgcgagcugaaggugaccuucuuccccgaccucaacggcgacguggucgccaucgacuacaagcacuacacccccuccuucaagaagggcgccaagcugcugcacaagcccaucguguggcacgugaacaacgccaccaacaaggcgacguacaagccgaacaccuggugcauccggugccucuggagcaccaagcccgucgagaccuccaacagcuucgacgugcugaaguccgaggacgcccaggggauggacaaccuggccugcgaggaccucaagcccgugagcgaggaggucguggagaaccccacgauccagaaggacgugcuggagugcaacgucaagaccaccgagguggugggcgacaucauccugaagccggccaacaacucccucaagaucaccgaggaggucgggcacacggaccugauggccgcguacguggacaacagcucccugaccaucaagaagcccaacgagcucagccgcgugcugggccugaagacccucgccacccacgggcuggccgccgucaacuccgugcccugggacacgaucgccaacuacgcgaagccguuccugaacaagguggucagcaccaccaccaacaucgugacgcgcugccucaaccgggugugcaccaacuacaugcccuacuucuucacccugcugcuccagcugugcaccuucacccgcuccacgaacagccggaucaaggccuccaugcccaccaccaucgccaagaacaccgucaagagcgccggcaaguucugccuggaggccagcuucaacuaccucaagucccccaacuucagcaagcugaucaacaucaucaucugguuccugcuccuguccgugugccugggcagccucaucuacuccacggcggcccugggggugcugaugagcaaccucggcaugccguccuacugcaccggguaccgcgagggcuaccugaacagcaccaacgucaccaucgccacguacugcaccggcuccauccccugcagcgugugccuguccgggcucgacagccuggacaccuaccccucccuggagaccauccagaucacgaucagcuccuucaagugggaccucaccgccuucggccugguggccgagugguuccuggcguacauccucuucacccgguucuucuacguccuggggcuggccgccaucaugcagcucuucuucagcuacuucgccgugcacuucaucuccaacagcuggcugauguggcugaucaucaaccuggugcagauggcgcccaucuccgccaugguccgcauguacaucuucuucgccagcuucuacuacguguggaagagcuacgugcacgucguggacggcugcaacuccagcaccugcaugaugugcuacaagcggaaccgcgccacgcggguggagugcaccaccaucgucaacggggugcgccgguccuucuacgucuacgccaacggcggcaagggguucugcaagcuccacaacuggaacugcgugaacugcgacaccuucugcgcgggcagcacguucaucuccgacgagguggcccgcgaccugagccugcaguucaagcggccgaucaaccccaccgaccaguccagcuacaucgucgacuccgugaccgugaagaacgggagcauccaccucuacuucgacaaggccggccagaagaccuacgagcgccacucccugagccacuucgucaaccuggacaaccuccgggccaacaacacgaaggggucccugcccaucaacgugaucguguucgacggcaagagcaagugcgaggaguccagcgccaaguccgcgagcgucuacuacucccagcugaugugccagcccauccuccugcuggaccaggcccucgugagcgacgugggcgacagcgccgaggucgccgugaagauguucgacgccuacgugaacaccuucuccagcaccuucaacgucccgauggagaagcugaagacccugguggcgacggccgaggccgagcucgccaagaacgugucccuggacaacguccugagcaccuucaucuccgcggcccgccagggguucguggacagcgacguggagaccaaggacgucguggagugccucaagcugucccaccagagcgacaucgaggugaccggcgacuccugcaacaacuacaugcugacguacaacaaggucgagaacaugaccccccgggaccucggggccugcaucgacugcagcgcccgccacaucaacgcccagguggcgaagucccacaacaucgcccugaucuggaacgugaaggacuucaugagccuguccgagcagcuccggaagcagauccgcagcgccgccaagaagaacaaccugcccuucaagcugaccugcgccaccacgcgccaggucgugaacguggucaccaccaagaucgcgcucaagggcgggugaggacuaguuauaagacugacuagcccgaugggccucccaacgggcccuccuccccuccuugcaccgagauuaauaaaaaaaaaaaaaaaaaaaaaaaaaaaaaaaaaaaaaaaaaaaaaaaaaaaaaaaaaaaaaaaaugcaucccccccccccccccccccccccccccccccaaaggcucuuuucagagccaccagaauu

SEQ ID NO: 21474 - RNA, 6058 nt, Artificial Sequence
  SARS-CoV-2__MT877324.1__non-structural protein 3 (NSP3) mRNA gc
aggagaaagcuuaccauggcccccaccaaggugaccuucggcgacgacacggucaucgaggugcagggguacaagagcgugaacaucaccuucgagcuggacgagcgcaucgacaagguccucaacgagaagugcuccgccuacaccguggagcugggcaccgaggugaacgaguucgcgugcgucguggccgacgccgugaucaagacgcugcagccggucagcgagcuccugaccccccuggggaucgaccucgacgagugguccauggccaccuacuaccuguucgacgagagcggcgaguucaagcuggccucccacauguacugcagcuucuacccccccgacgaggacgaggaggagggggacugcgaggaggaggaguucgagccguccacccaguacgaguacggcacggaggacgacuaccagggcaagccccucgaguucggggcgaccagcgccgcccugcagcccgaggaggagcaggaggaggacuggcuggacgacgacucccagcagaccgugggccagcaggacgggagcgaggacaaccagaccacgaccauccagaccaucguggagguccagccccagcucgagauggagcugaccccgguggugcagacgaucgaggucaacuccuucagcggcuaccugaagcucaccgacaacguguacaucaagaacgccgacaucguggaggaggcgaagaaggucaagcccaccgugguggucaacgccgccaacguguaccugaagcacgggggcggcguggccggggcccugaacaaggcgaccaacaacgccaugcaggucgaguccgacgacuacaucgccacgaacggcccccucaagguggggggcagcugcguccuguccggccacaaccuggccaagcacugccuccacgugguggggcccaacgucaacaagggcgaggacauccagcugcugaagagcgccuacgagaacuucaaccagcacgaggugcuccuggcgccgcugcucuccgccgggaucuucggcgccgaccccauccacagccugcgggugugcgucgacaccgugcgcaccaacguguaccuggccgucuucgacaagaaccucuacgacaagcugguguccagcuuccuggagaugaagagcgagaagcagguggagcagaagaucgccgagauccccaaggaggaggucaagcccuucaucaccgaguccaagccgagcguggagcagcggaagcaggacgacaagaagaucaaggcgugcguggaggaggucacgaccacccucgaggagaccaaguuccugacggagaaccugcuccuguacaucgacaucaacgggaaccugcaccccgacuccgccacccucgugagcgacaucgacaucaccuuccugaagaaggacgcccccuacaucgugggcgacgucgugcaggagggcgugcugaccgccgucgugauccccacgaagaaggccgggggcaccaccgagaugcucgcgaaggcccugcgcaaggugccgaccgacaacuacaucacgaccuaccccgggcagggccugaacggguacaccgucgaggaggccaagaccgugcucaagaagugcaaguccgccuucuacauccugcccagcaucaucuccaacgagaagcaggagauccugggcaccgugagcuggaaccuccgggagaugcuggcgcacgccgaggagacgcgcaagcugaugcccgucugcguggagaccaaggccaucguguccaccauccagcggaaguacaagggcaucaagauccaggagggggucguggacuacggcgcccgcuucuacuucuacaccagcaagacgaccguggccucccugaucaacacccucaacgaccugaacgagacccuggucacgaugccgcucggguacgugacccacggccugaaccuggaggaggcggcccgguacaugcgcagccucaaggugcccgccaccgucuccgugagcucccccgacgccgugaccgccuacaacggguaccugacgagcuccagcaagacccccgaggagcacuucaucgagaccaucucccuggcgggcagcuacaaggacuggagcuacuccggccagagcacccagcucgggaucgaguuccugaagcggggcgacaaguccgucuacuacacgagcaacccgaccaccuuccaccuggacggggaggugaucaccuucgacaaccucaagacgcugcugucccuccgcgaggugcggaccaucaaggucuucaccaccguggacaacaucaaccugcacacgcagguggucgacaugagcaugaccuacggccagcaguucggccccaccuaccuggacggggccgacgugaccaagaucaagccccacaacucccacgagggcaagacguucuacgugcucccgaacgacgacacccugcgcgucgaggccuucgaguacuaccacaccaccgaccccagcuuccuggggcgguacauguccgcccucaaccacacgaagaaguggaaguacccccaggugaacggccugaccagcaucaagugggccgacaacaacugcuaccuggcgaccgcccuccugacccugcagcagaucgagcucaaguucaaccccccggcccugcaggacgccuacuaccgcgcgcgggccggggaggccgccaacuucugcgcccugauccucgcguacugcaacaagacggugggcgagcugggcgacguccgcgagaccauguccuaccuguuccagcacgccaaccucgacagcugcaagcgggugcugaacgucgugugcaagaccugcgggcagcagcagaccacccugaagggcguggaggccgucauguacauggggacgcucuccuacgagcaguucaagaagggcgugcagauccccugcaccugcgggaagcaggccaccaaguaccuggugcagcaggagagccccuucgucaugauguccgcccccccggcgcaguacgagcugaagcacggcaccuucacgugcgccagcgaguacaccggcaacuaccagugcgggcacuacaagcacaucaccuccaaggagacccucuacugcaucgacggcgcccugcugacgaagagcagcgaguacaaggggcccaucaccgacguguucuacaaggagaacuccuacaccaccacgaucaagcccgugaccuacaagcucgacggcgucgugugcaccgagaucgaccccaagcuggacaacuacuacaagaaggacaacagcuacuucaccgagcagccgaucgaccuggugcccaaccagcccuacuccaacgccagcuucgacaacuucaaguucgucugcgacaacaucaaguucgccgacgaccucaaccagcugacgggguacaagaagcccgcgucccgcgagcugaaggugaccuucuucccggaccucaacggcgacguggucgccaucgacuacaagcacuacacccccagcuucaagaagggcgccaagcugcugcacaagcccaucguguggcacgugaacaacgccaccaacaaggcgacguacaagcccaacaccuggugcauccggugccucugguccaccaagccggucgagaccagcaacuccuucgacgugcugaagagcgaggacgcccaggggauggacaaccuggccugcgaggaccucaagcccguguccgaggaggucguggagaaccccacgauccagaaggacgugcuggagugcaacgucaagaccaccgagguggugggcgacaucauccugaagcccgccaacaacagccucaagaucaccgaggaggucgggcacacggaccugauggccgcguacguggacaacuccagccugaccaucaagaagccgaacgagcucucccgcgugcugggccugaagacccucgccacccacgggcuggccgccgucaacagcgugcccugggacacgaucgccaacuacgcgaagcccuuccugaacaagguggucuccaccaccaccaacaucgugacgcgcugccucaaccgggugugcaccaacuacaugccguacuucuucacccugcugcuccagcugugcaccuucacccgcagcacgaacucccggaucaaggccagcaugcccaccaccaucgccaagaacaccgucaagagcgugggcaaguucugccuggaggccuccuucaacuaccucaagagccccaacuucuccaagcugaucaacaucaucaucugguuccugcuccugagcgugugccugggcucccucaucuacagcacggccgcgcuggggguccugauguccaaccucggcaugcccagcuacugcaccggguaccgcgagggcuaccugaacuccaccaacgugaccaucgccacguacugcaccggcagcaucccgugcuccgugugccugagcgggcucgacucccuggacaccuaccccagccuggagaccauccagaucacgaucuccagcuucaagugggaccucaccgccuucggccuggucgccgagugguuccuggccuacauccucuucacccgguucuucuacgugcuggggcuggcggccaucaugcagcucuucuucuccuacuucgccgugcacuucaucagcaacuccuggcugauguggcugaucaucaaccugguccagauggcccccaucagcgcgauggugcgcauguacaucuucuucgccagcuucuacuacguguggaaguccuacguccacgugguggacggcugcaacagcuccaccugcaugaugugcuacaagcggaaccgcgccacgcgggucgagugcaccaccaucgugaacgggguccgccggagcuucuacguguacgccaacggcggcaagggguucugcaagcuccacaacuggaacugcgugaacugcgacaccuucugcgccggcuccacguucaucagcgacgaggucgcgcgcgaccugucccugcaguucaagcggcccaucaacccgaccgaccagagcuccuacaucguggacagcgugaccgucaagaacggguccauccaccucuacuucgacaaggccggccagaagaccuacgagcgccacagccugucccacuucgugaaccuggacaaccuccgggccaacaacacgaaggggagccugcccaucaacgugaucgucuucgacggcaaguccaagugcgaggagagcuccgccaagagcgccuccguguacuacagccagcugaugugccagcccauccuccugcuggaccaggcgcucgugagcgacgucggcgacuccgccgagguggccgugaagauguucgacgccuacgucaacaccuucagcuccaccuucaacgugcccauggagaagcugaagacccugguggccacggcggaggccgagcucgccaagaacgucagccuggacaacgugcuguccaccuucaucagcgccgcgcgccagggguucguggacuccgacgucgagaccaaggacgugguggagugccucaagcugagccaccaguccgacaucgaggucaccggcgacagcugcaacaacuacaugcugacguacaacaagguggagaacaugaccccgcgggaccucggggccugcaucgacugcuccgcccgccacaucaacgcccagguggccaagagccacaacaucgcgcugaucuggaacgucaaggacuucaugucccugagcgagcagcuccggaagcagauccgcuccgccgccaagaagaacaaccugcccuucaagcugaccugcgccaccacgcgccagguggugaacgucgugaccaccaagaucgcccucaagggcgggugaggacuaguuauaagacugacuagcccgaugggccucccaacgggcccuccuccccuccuugcaccgagauuaauaaaaaaaaaaaaaaaaaaaaaaaaaaaaaaaaaaaaaaaaaaaaaaaaaaaaaaaaaaaaaaaaugcaucccccccccccccccccccccccccccccccaaaggcucuuuucagagccaccagaauu

SEQ ID NO: 21475 - RNA, 6058 nt, Artificial Sequence
  SARS-CoV-2__MT877379.1__non-structural protein 3 (NSP3) mRNA gc
aggagaaagcuuaccauggcccccaccaaggugaccuucggcgacgacacggucaucgaggugcagggguacaagagcgugaacaucaccuucgagcuggacgagcgcaucgacaagguccucaacgagaagugcuccgccuacaccguggagcugggcaccgaggugaacgaguucgcgugcgucguggccgacgccgugaucaagacgcugcagccggucagcgagcuccugaccccccuggggaucgaccucgacgagugguccauggccaccuacuaccuguucgacgagagcggcgaguucaagcuggccucccacauguacugcagcuucuacccccccgacgaggacgaggaggagggggacugcgaggaggaggaguucgagccguccacccaguacgaguacggcacggaggacgacuaccagggcaagccccucgaguucggggcgaccagcgccgcccugcagcccgaggaggagcaggaggaggacuggcuggacgacgacucccagcagaccgugggccagcaggacgggagcgaggacaaccagaccacgaccauccagaccaucguggagguccagccccagcucgagauggagcugaccccgguggugcagacgaucgaggucaacuccuucagcggcuaccugaagcucaccgacaacguguacaucaagaacgccgacaucguggaggaggcgaagaaggucaagcccaccgugguggucaacgccgccaacguguaccugaagcacgggggcggcguggccggggcccugaacaaggcgaccaacaacgccaugcaggucgaguccgacgacuacaucgccacgaacggcccccucaagguggggggcagcugcguccuguccggccacaaccuggccaagcacugccuccacgugguggggcccaacgucaacaagggcgaggacauccagcugcugaagagcgccuacgagaacuucaaccagcacgaggugcuccuggcgccgcugcucuccgccgggaucuucggcgccgaccccauccacagccugcgggugugcgucgacaccgugcgcaccaacguguaccuggccgucuucgacaagaaccucuacgacaagcugguguccagcuuccuggacaugaagagcgagaagcagguggagcagaagaucgccgagauccccaaggaggaggucaagcccuucaucaccgaguccaagccgagcguggagcagcggaagcaggacgacaagaagaucaaggcgugcguggaggaggucacgaccacccucgaggagaccaaguuccugacggagaaccugcuccuguacaucgacaucaacgggaaccugcaccccgacuccgccacccucgugagcgacaucgacaucaccuuccugaagaaggacgcccccuacaucgugggcgacgucgugcaggagggcgugcugaccgccgucgugauccccacgaagaaggccgggggcaccaccgagaugcucgcgaaggcccugcgcaaggugccgaccgacaacuacaucacgaccuaccccgggcagggccugaacggguacaccgucgaggaggccaagaccgugcucaagaagugcaaguccgccuucuacauccugcccagcaucaucuccaacgagaagcaggagauccugggcaccgugagcuggaaccuccgggagaugcuggcgcacgccgaggagacgcgcaagcugaugcccgucugcguggagaccaaggccaucguguccaccauccagcggaaguacaagggcaucaagauccaggagggggucguggacuacggcgcccgcuucuacuucuacaccagcaagacgaccguggccucccugaucaacacccucaacgaccugaacgagacccuggucacgaugccgcucggguacgugacccacggccugaaccuggaggaggcggcccgguacaugcgcagccucaaggugcccgccaccgucuccgugagcucccccgacgccgugaccgccuacaacggguaccugacgagcuccagcaagacccccgaggagcacuucaucgagaccaucucccuggcgggcagcuacaaggacuggagcuacuccggccagagcacccagcucgggaucgaguuccugaagcggggcgacaaguccgucuacuacacgagcaacccgaccaccuuccaccuggacggggaggugaucaccuucgacaaccucaagacgcugcugucccuccgcgaggugcggaccaucaaggucuucaccaccguggacaacaucaaccugcacacgcagguggucgacaugagcaugaccuacggccagcaguucggccccaccuaccuggacggggccgacgugaccaagaucaagccccacaacucccacgagggcaagacguucuacgugcucccgaacgacgacacccugcgcgucgaggccuucgaguacuaccacaccaccgaccccagcuuccuggggcgguacauguccgcccucaaccacacgaagaaguggaaguacccccaggugaacggccugaccagcaucaagugggccgacaacaacugcuaccuggcgaccgcccuccugacccugcagcagaucgagcucaaguucaaccccccggcccugcaggacgccuacuaccgcgcgcgggccggggaggccgccaacuucugcgcccugauccucgcguacugcaacaagacggugggcgagcugggcgacguccgcgagaccauguccuaccuguuccagcacgccaaccucgacagcugcaagcgggugcugaacgucgugugcaagaccugcgggcagcagcagaccacccugaagggcguggaggccgucauguacauggggacgcucuccuacgagcaguucaagaagggcgugcagauccccugcaccugcgggaagcaggccaccaaguaccuggugcagcaggagagccccuucgucaugauguccgcccccccggcgcaguacgagcugaagcacggcaccuucacgugcgccagcgaguacaccggcaacuaccagugcgggcacuacaagcacaucaccuccaaggagacccucuacugcaucgacggcgcccugcugacgaagagcagcgaguacaaggggcccaucaccgacguguucuacaaggagaacuccuacaccaccacgaucaagcccgugaccuacaagcucgacggcgucgugugcaccgagaucgaccccaagcuggacaacuacuacaagaaggacaacagcuacuucaccgagcagccgaucgaccuggugcccaaccagcccuaccccaacgccuccuucgacaacuucaaguucgucugcgacaacaucaaguucgccgacgaccucaaccagcugacgggguacaagaagccggcgagccgcgagcugaaggugaccuucuuccccgaccucaacggcgacguggucgccaucgacuacaagcacuacacccccuccuucaagaagggcgccaagcugcugcacaagcccaucguguggcacgugaacaacgccaccaacaaggcgacguacaagccgaacaccuggugcauccggugccucuggagcaccaagcccgucgagaccuccaacagcuucgacgugcugaaguccgaggacgcccaggggauggacaaccuggccugcgaggaccucaagcccgugagcgaggaggucguggagaaccccacgauccagaaggacgugcuggagugcaacgucaagaccaccgagguggugggcgacaucauccugaagccggccaacaaccgccucaagaucaccgaggaggucgggcacacggaccugauggccgcguacguggacaacuccagccugaccaucaagaagcccaacgagcucucccgcgugcugggccugaagacccucgccacccacgggcuggccgccgucaacagcgugcccugggacacgaucgccaacuacgcgaagccguuccugaacaagguggucuccaccaccaccaacaucgugacgcggugccucaaccgcgugugcaccaacuacaugcccuacuucuucacccugcugcuccagcugugcaccuucacccggagcacgaacucccgcaucaaggccagcaugcccaccaccaucgccaagaacaccgucaaguccgugggcaaguucugccuggaggccagcuucaacuaccucaagagccccaacuucuccaagcugaucaacaucaucaucugguuccugcuccugagcgugugccugggcucccucaucuacagcacggccgcgcuggggguccugauguccaaccucggcaugccgagcuacugcaccggguaccgggagggcuaccugaacuccaccaacgugaccaucgccacguacugcaccggcagcauccccugcuccgugugccugagcgggcucgacucccuggacaccuaccccagccuggagaccauccagaucacgaucuccagcuucaagugggaccucaccgccuucggccuggucgccgagugguuccuggccuacauccucuucacccgcuucuucuacgugcuggggcuggcggccaucaugcagcucuucuucuccuacuucgccgugcacuucaucagcaacuccuggcugauguggcugaucaucaaccugguccagauggcccccaucagcgcgauggugcggauguacaucuucuucgccuccuucuacuacguguggaagagcuacguccacgugguggacggcugcaacagcuccaccugcaugaugugcuacaagcgcaaccgggccacgcgcgucgagugcaccaccaucgugaacgggguccggcgcagcuucuacguguacgccaacggcggcaagggguucugcaagcuccacaacuggaacugcgugaacugcgacaccuucugcgccggcuccacguucaucagcgacgaggucgcgcgggaccugucccugcaguucaagcgcccgaucaaccccaccgaccagagcuccuacaucguggacagcgugaccgucaagaacggguccauccaccucuacuucgacaaggccggccagaagaccuacgagcggcacagccugucccacuucgugaaccuggacaaccuccgcgccaacaacacgaaggggagccugcccaucaacgugaucgucuucgacggcaaguccaagugcgaggagagcuccgccaagagcgccuccguguacuacagccagcugaugugccagcccauccuccugcuggaccaggcgcucguguccgacgucggcgacagcgccgagguggccgugaagauguucgacgccuacgucaacaccuucagcuccaccuucaacgugccgauggagaagcugaagacccugguggccacggcggaggccgagcucgccaagaacgucagccuggacaacgugcuguccaccuucaucagcgccgcgcggcagggguucguggacuccgacgucgagaccaaggacgugguggagugccucaagcugagccaccaguccgacaucgaggucaccggcgacagcugcaacaacuacaugcugacguacaacaagguggagaacaugaccccccgcgaccucggggccugcaucgacugcuccgcccggcacaucaacgcccagguggccaagagccacaacaucgcgcugaucuggaacgucaaggacuucaugucccugagcgagcagcuccgcaagcagauccgcuccgccgccaagaagaacaaccugcccuucaagcugaccugcgccaccacgcggcagguggugaacgucgugaccaccaagaucgcccucaagggcgggugaggacuaguuauaagacugacuagcccgaugggccucccaacgggcccuccuccccuccuugcaccgagauuaauaaaaaaaaaaaaaaaaaaaaaaaaaaaaaaaaaaaaaaaaaaaaaaaaaaaaaaaaaaaaaaaaugcaucccccccccccccccccccccccccccccccaaaggcucuuuucagagccaccagaauu

SEQ ID NO: 21476 - RNA, 6058 nt, Artificial Sequence
  SARS-CoV-2__MT877409.1__non-structural protein 3 (NSP3) mRNA gc
aggagaaagcuuaccauggcccccaccaaggugaccuucggcgacgacacggucaucgaggugcagggguacaagagcgugaacaucaccuucgagcuggacgagcgcaucgacaagguccucaacgagaagugcuccgccuacaccguggagcugggcaccgaggugaacgaguucgcgugcgucguggccgacgccgugaucaagacgcugcagccggucagcgagcuccugaccccccuggggaucgaccucgacgagugguccauggccaccuacuaccuguucgacgagagcggcgaguucaagcuggccucccacauguacugcagcuucuacccccccgacgaggacgaggaggagggggacugcgaggaggaggaguucgagccguccacccaguacgaguacggcacggaggacgacuaccagggcaagccccucgaguucggggcgaccagcgccgcccugcagcccgaggaggagcaggaggaggacuggcuggacgacgacucccagcagaccgugggccagcaggacgggagcgaggacaaccagaccacgaccauccagaccaucguggagguccagccccagcucgagauggagcugaccccgguggugcagacgaucgaggucaacuccuucagcggcuaccugaagcucaccgacaacguguacaucaagaacgccgacaucguggaggaggcgaagaaggucaagcccaccgugguggucaacgccgccaacguguaccugaagcacgggggcggcguggccggggcccugaacaaggcgaccaacaacgccaugcaggucgaguccgacgacuacaucgccacgaacggcccccucaagguggggggcagcugcguccuguccggccacaaccuggccaagcacugccuccacgugguggggcccaacgucaacaagggcgaggacauccagcugcugaagagcgccuacgagaacuucaaccagcacgaggugcuccuggcgccgcugcucuccgccgggaucuucggcgccgaccccauccacagccugcgggugugcgucgacaccgugcgcaccaacguguaccuggccgucuucgacaagaaccucuacgacaagcugguguccagcuuccuggagaugaagagcgagaagcagguggagcagaagaucgccgagauccccaaggaggaggucaagcccuucaucaccgaguccaagccgagcguggagcagcggaagcaggacgacaagaagaucaaggcgugcguggaggaggucacgaccacccucgaggagaccaaguuccugacggagaaccugcuccuguacaucgacaucaacgggaaccugcaccccgacuccgccacccucgugagcgacaucgacaucaccuuccugaagaaggacgcccccuacaucgugggcgacgucgugcaggagggcgugcugaccgccgucgugauccccacgaagaaggccgggggcaccaccgagaugcucgcgaaggcccugcgcaaggugccgaccgacaacuacaucacgaccuaccccgggcagggccugaacggguacaccgucgaggaggccaagaccgugcucaagaagugcaaguccgccuucuacauccugcccagcaucaucuccaacgagaagcaggagauccugggcaccgugagcuggaaccuccgggagaugcuggcgcacgccgaggagacgcgcaagcugaugcccgucugcguggagaccaaggccaucguguccaccauccagcggaaguacaagggcaucaagauccaggagggggucguggacuacggcgcccgcuucuacuucuacaccagcaagacgaccguggccucccugaucaacacccucaacgaccugaacgagacccuggucacgaugccgcucggguacgugacccacggccugaaccuggaggaggcggcccgguacaugcgcagccucaaggugcccgccaccgucuccgugagcucccccgacgccgugaccgccuacaacggguaccugacgagcuccagcaagacccccgaggagcacuucaucgagaccaucucccuggcgggcagcuacaaggacuggagcuacuccggccagagcacccagcucgggaucgaguuccugaagcggggcgacaaguccgucuacuacacgagcaacccgaccaccuuccaccuggacggggaggugaucaccuucgacaaccucaagacgcugcugucccuccgcgaggugcggaccaucaaggucuucaccaccguggacaacaucaaccugcacacgcagguggucgacaugagcaugaccuacggccagcaguucggccccaccuaccuggacggggccgacgugaccaagaucaagccccacaacucccacgagggcaagacguucuacgugcucccgaacgacgacacccugcgcgucgaggccuucgaguacuaccacaccaccgaccccagcuuccuggggcgguacauguccgcccucaaccacacgaagaaguggaaguacccccaggugaacggccugaccagcaucaagugggccgacaacaacugcuaccuggcgaccgcccuccugacccugcagcagaucgagcucaaguucaaccccccggcccugcaggacgccuacuaccgcgcgcgggccggggaggccgccaacuucugcgcccugauccucgcguacugcaacaagacggugggcgagcugggcgacguccgcgagaccauguccuaccuguuccagcacgccaaccucgacagcugcaagcgggugcugaacgucgugugcaagaccugcgggcagcagcagaccacccugaagggcguggaggccgucauguacauggggacgcucuccuacgagcaguucaagaagggcgugcagauccccugcaccugcgggaagcaggccaccaaguaccuggugcagcaggagagccccuucgucaugauguccgcccccccggcgcaguacgagcugaagcacggcaccuucacgugcgccagcgaguacaccggcaacuaccagugcgggcacuacaagcacaucaccuccaaggagacccucuacugcaucgacggcgcccugcugacgaagagcagcgaguacaaggggcccaucaccgacguguucuacaaggagaacuccuacaccaccacgaucaagcccgugaccuacaagcucgacggcgucgugugcaccgagaucgaccccaagcuggacaacuacuacaagaaggacaacagcuacuucaccgagcagccgaucgaccuggugcccaaccagcccuaccccaacgccuccuucgacaacuucaaguucgucugcgacaacaucaaguucgccgacgaccucaaccagcugacgggguacaagaagccggcgagccgcgagcugaaggugaccuucuuccccgaccucaacggcgacguggucgccaucgacuacaagcacuacacccccuccuucaagaagggcgccaagcugcugcacaagcccaucguguggcacgugaacaacgccaccaacaaggcgacguacaagccgaacaccuggugcauccggugccucuggagcaccaagcccgucgagaccuccaacagcuucgacgugcugaaguccgaggacgcccaggggauggacaaccuggccugcgaggaccucaagcccgugagcgaggaggucguggagaaccccacgauccagaaggacgugcuggagugcaacgucaagaccaccgagguggugggcgacaucauccugaagccggccaacaaccgccucaagaucaccgaggaggucgggcacacggaccugauggccgcguacguggacaacuccagccugaccaucaagaagcccaacgagcucucccgcgugcugggccugaagacccucgccacccacgggcuggccgccgucaacagcgugcccugggacacgaucgccaacuacgcgaagccguuccugaacaagguggucuccaccaccaccaacaucgugacgcggugccucaaccgcgugugcaccaacuacaugcccuacuucuucacccugcugcuccagcugugcaccuucacccggagcacgaacucccgcaucaaggccagcaugcccaccaccaucgccaagaacaccgucaaguccgugggcaaguucugccuggaggccagcuucaacuaccucaagagccccaacuucuccaagcugaucaacaucaucaucugguuccugcuccugagcgugugccugggcucccucaucuacagcacggccgcgcuggggguccugauguccaaccucggcaugccgagcuacugcaccggguaccgggagggcuaccugaacuccaccaacgugaccaucgccacguacugcaccggcagcauccccugcuccgugugccugagcgggcucgacucccuggacaccuaccccagccuggagaccauccagaucacgaucuccagcuucaagugggaccucaccgccuucggccuggucgccgagugguuccuggccuacauccucuucacccgcuucuucuacgugcuggggcuggcggccaucaugcagcucuucuucuccuacuucgccgugcacuucaucagcaacuccuggcugauguggcugaucaucaaccugguccagauggcccccaucagcgcgauggugcggauguacaucuucuucgccuccuucuacuacguguggaagagcuacguccacgugguggacggcugcaacagcuccaccugcaugaugugcuacaagcgcaaccgggccacgcgcgucgagugcaccaccaucgugaacgggguccggcgcagcuucuacguguacgccaacggcggcaagggguucugcaagcuccacaacuggaacugcguguccugcgacaccuucugcgccggcagcacguucaucuccgacgaggucgcgcgggaccugagccugcaguucaagcgcccgaucaaccccaccgaccaguccagcuacaucguggacuccgugaccgucaagaacgggagcauccaccucuacuucgacaaggccggccagaagaccuacgagcggcacucccugagccacuucgugaaccuggacaaccuccgcgccaacaacacgaaggggucccugcccaucaacgugaucgucuucgacggcaagagcaagugcgaggaguccagcgccaaguccgccagcguguacuacucccagcugaugugccagcccauccuccugcuggaccaggcgcucgugagcgacgucggcgacagcgccgagguggccgugaagauguucgacgccuacgucaacaccuucuccagcaccuucaacgugccgauggagaagcugaagacccugguggccacggcggaggccgagcucgccaagaacgucucccuggacaacgugcugagcaccuucaucuccgccgcgcggcagggguucguggacagcgacgucgagaccaaggacgugguggagugccucaagcugucccaccagagcgacaucgaggucaccggcgacuccugcaacaacuacaugcugacguacaacaagguggagaacaugaccccccgcgaccucggggccugcaucgacugcagcgcccggcacaucaacgcccagguggccaagucccacaacaucgcgcugaucuggaacgucaaggacuucaugagccuguccgagcagcuccgcaagcagauccgcagcgccgccaagaagaacaaccugcccuucaagcugaccugcgccaccacgcggcagguggugaacgucgugaccaccaagaucgcccucaagggcgggugaggacuaguuauaagacugacuagcccgaugggccucccaacgggcccuccuccccuccuugcaccgagauuaauaaaaaaaaaaaaaaaaaaaaaaaaaaaaaaaaaaaaaaaaaaaaaaaaaaaaaaaaaaaaaaaaugcaucccccccccccccccccccccccccccccccaaaggcucuuuucagagccaccagaauu

SEQ ID NO: 21477 - RNA, 6058 nt, Artificial Sequence
  SARS-CoV-2__MT872497.1__non-structural protein 3 (NSP3) mRNA gc
aggagaaagcuuaccauggcccccaccaaggugaccuucggcgacgacacggucaucgaggugcagggguacaagagcgugaacaucaccuucgagcuggacgagcgcaucgacaagguccucaacgagaagugcuccgccuacaccguggagcugggcaccgaggugaacgaguucgcgugcgucguggccgacgccgugaucaagacgcugcagccggucagcgagcuccugaccccccuggggaucgaccucgacgagugguccauggccaccuacuaccuguucgacgagagcggcgaguucaagcuggccucccacauguacugcagcuucuacccccccgacgaggacgaggaggagggggacugcgaggaggaggaguucgagccguccacccaguacgaguacggcacggaggacgacuaccagggcaagccccucgaguucggggcgaccagcgccgcccugcagcccgaggaggagcaggaggaggacuggcuggacgacgacucccagcagaccgugggccagcaggacgggagcgaggacaaccagaccacgaccauccagaccaucguggagguccagccccagcucgagauggagcugaccccgguggugcagacgaucgaggucaacuccuucagcggcuaccugaagcucaccgacaacguguacaucaagaacgccgacaucguggaggaggcgaagaaggucaagcccaccgugguggucaacgccgccaacguguaccugaagcacgggggcggcguggccggggcccugaacaaggcgaccaacaacgccaugcaggucgaguccgacgacuacaucgccacgaacggcccccucaagguggggggcagcugcguccuguccggccacaaccuggccaagcacugccuccacgugguggggcccaacgucaacaagggcgaggacauccagcugcugaagagcgccuacgagaacuucaaccagcacgaggugcuccuggcgccgcugcucuccgccgggaucuucggcgccgaccccauccacagccugcgggugugcgucgacaccgugcgcaccaacguguaccuggccgucuucgacaagaaccucuacgacaagcugguguccagcuuccuggagaugaagagcgagaagcagguggagcagaagaucgccgagauccccaaggaggaggucaagcccuucaucaccgaguccaagccgagcguggagcagcggaagcaggacgacaagaagaucaaggcgugcguggaggaggucacgaccacccucgaggagaccaaguuccugacggagaaccugcuccuguacaucgacaucaacgggaaccugcaccccgacuccgccacccucgugagcgacaucgacaucaccuuccugaagaaggacgcccccuacaucgugggcgacgucgugcaggagggcgugcugaccgccgucgugauccccacgaagaaggccgggggcaccaccgagaugcucgcgaaggcccugcgcaaggugccgaccgacaacuacaucacgaccuaccccgggcagggccugaacggguacaccgucgaggaggccaagaccgugcucaagaagugcaaguccgccuucuacauccugcccagcaucaucuccaacgagaagcaggagauccugggcaccgugagcuggaaccuccgggagaugcuggcgcacgccgaggagacgcgcaagcugaugcccgucugcguggagaccaaguccaucgugagcaccauccagcggaaguacaagggcaucaagauccaggagggggucguggacuacggcgcccgcuucuacuucuacaccuccaagacgaccguggccagccugaucaacacccucaacgaccugaacgagacccuggucacgaugccgcucggguacgugacccacggccugaaccuggaggaggccgcgcgguacaugcgcucccucaaggugcccgccaccgucagcguguccagccccgacgccgugaccgccuacaacggguaccugacguccagcuccaagacccccgaggagcacuucaucgagaccaucagccuggccggcagcuacaaggacugguccuacagcggccaguccacccagcucgggaucgaguuccugaagcggggcgacaagagcgucuacuacacguccaacccgaccaccuuccaccuggacggggaggugaucaccuucgacaaccucaagacgcugcugagccuccgcgaggugcggaccaucaaggucuucaccaccguggacaacaucaaccugcacacgcagguggucgacauguccaugaccuacggccagcaguucggccccaccuaccuggacggggcggacgugaccaagaucaagccccacaacagccacgagggcaagacguucuacgugcucccgaacgacgacacccugcgcgucgaggccuucgaguacuaccacaccaccgaccccuccuuccuggggcgguacaugagcgcccucaaccacacgaagaaguggaaguacccccaggugaacggccugaccuccaucaagugggccgacaacaacugcuaccuggccaccgcgcuccugacccugcagcagaucgagcucaaguucaaccccccggcccugcaggacgccuacuaccgcgcccgggcgggggaggccgccaacuucugcgcccugauccucgccuacugcaacaagacggugggcgagcugggcgacguccgcgagaccaugagcuaccuguuccagcacgcgaaccucgacuccugcaagcgggugcugaacgucgugugcaagaccugcgggcagcagcagaccacccugaagggcguggaggccgucauguacauggggacgcucagcuacgagcaguucaagaagggcgugcagauccccugcaccugcgggaagcaggccaccaaguaccuggugcagcaggagucccccuucgucaugaugagcgcccccccggcccaguacgagcugaagcacggcaccuucacgugcgcguccgaguacaccggcaacuaccagugcgggcacuacaagcacaucaccagcaaggagacccucuacugcaucgacggcgcccugcugacgaagagcuccgaguacaaggggcccaucaccgacguguucuacaaggagaacagcuacaccaccacgaucaagcccgugaccuacaagcucgacggcgucgugugcaccgagaucgaccccaagcuggacaacuacuacaagaaggacaacuccuacuucaccgagcagccgaucgaccuggugcccaaccagcccuaccccaacgccagcuucgacaacuucaaguucgucugcgacaacaucaaguucgccgacgaccucaaccagcugacgggguacaagaagccggccucccgcgagcugaaggugaccuucuuccccgaccucaacggcgacguggucgcgaucgacuacaagcacuacacccccagcuucaagaagggcgccaagcugcugcacaagcccaucguguggcacgugaacaacgccaccaacaaggccacguacaagccgaacaccuggugcauccggugccucugguccaccaagcccgucgagaccagcaacuccuucgacgugcugaagagcgaggacgcgcaggggauggacaaccuggccugcgaggaccucaagcccguguccgaggaggucguggagaaccccacgauccagaaggacgugcuggagugcaacgucaagaccaccgagguggugggcgacaucauccugaagccggccaacaacagccucaagaucaccgaggaggucgggcacacggaccugauggccgccuacguggacaacuccagccugaccaucaagaagcccaacgagcucucccgcgugcugggccugaagacccucgcgacccacgggcuggccgccgucaacagcgugcccugggacacgaucgccaacuacgccaagccguuccugaacaagguggucuccaccaccaccaacaucgugacgcgcugccucaaccgggugugcaccaacuacaugcccuacuucuucacccugcugcuccagcugugcaccuucacccgcagcacgaacucccggaucaaggcgagcaugcccaccaccaucgccaagaacaccgucaagagcgugggcaaguucugccuggaggccuccuucaacuaccucaagagccccaacuucuccaagcugaucaacaucaucaucugguuccugcuccugagcgugugccugggcucccucaucuacagcacggccgcccuggggguccugauguccaaccucggcaugccgagcuacugcaccggguaccgcgagggcuaccugaacuccaccaacgugaccaucgcgacguacugcaccggcagcauccccugcuccgugugccugagcgggcucgacucccuggacaccuaccccagccuggagaccauccagaucacgaucuccagcuucaagugggaccucaccgccuucggccuggucgccgagugguuccuggccuacauccucuucacccgguucuucuacgugcuggggcuggccgcgaucaugcagcucuucuucuccuacuucgccgugcacuucaucagcaacuccuggcugauguggcugaucaucaaccugguccagauggcccccaucagcgccauggugcgcauguacaucuucuucgcgagcuucuacuacguguggaaguccuacguccacgugguggacggcugcaacagcuccaccugcaugaugugcuacaagcggaaccgcgccacgcgggucgagugcaccaccaucgugaacgggguccgccggagcuucuacguguacgccaacggcggcaagggguucugcaagcuccacaacuggaacugcgugaacugcgacaccuucugcgccggcuccacguucaucagcgacgaggucgcccgcgaccugucccugcaguucaagcggccgaucaaccccaccgaccagagcuccuacaucguggacagcgugaccgucaagaacggguccauccaccucuacuucgacaaggcgggccagaagaccuacgagcgccacagccugucccacuucgugaaccuggacaaccuccgggccaacaacacgaaggggagccugcccaucaacgugaucgucuucgacggcaaguccaagugcgaggagagcuccgccaagagcgccuccguguacuacagccagcugaugugccagcccauccuccugcuggaccaggcccucgugagcgacgucggcgacuccgcggagguggccgugaagauguucgacgccuacgucaacaccuucagcuccaccuucaacgugccgauggagaagcugaagacccugguggccacggccgaggcggagcucgccaagaacgucagccuggacaacgugcuguccaccuucaucagcgccgcccgccagggguucguggacuccgacgucgagaccaaggacgugguggagugccucaagcugagccaccaguccgacaucgaggucaccggcgacagcugcaacaacuacaugcugacguacaacaagguggagaacaugaccccccgggaccucggggcgugcaucgacugcuccgcccgccacaucaacgcccagguggccaagagccacaacaucgcccugaucuggaacgucaaggacuucaugucccugagcgagcagcuccggaagcagauccgcuccgcggccaagaagaacaaccugcccuucaagcugaccugcgccaccacgcgccagguggugaacgucgugaccaccaagaucgcccucaagggcgggugaggacuaguuauaagacugacuagcccgaugggccucccaacgggcccuccuccccuccuugcaccgagauuaauaaaaaaaaaaaaaaaaaaaaaaaaaaaaaaaaaaaaaaaaaaaaaaaaaaaaaaaaaaaaaaaaugcaucccccccccccccccccccccccccccccccaaaggcucuuuucagagccaccagaauu

SEQ ID NO: 21478 - RNA, 6058 nt, Artificial Sequence
  SARS-CoV-2__MT873807.1__non-structural protein 3 (NSP3) mRNA gc
aggagaaagcuuaccauggcccccaccaaggugaccuucggcgacgacacggucaucgaggugcagggguacaagagcgugaacaucaccuucgagcuggacgagcgcaucgacaagguccucaacgagaagugcuccgccuacaccguggagcugggcaccgaggugaacgaguucgcgugcgucguggccgacgccgugaucaagacgcugcagccggucagcgagcuccugaccccccuggggaucgaccucgacgagugguccauggccaccuacuaccuguucgacgagagcggcgaguucaagcuggccucccacauguacugcagcuucuacccccccgacgaggacgaggaggagggggacugcgaggaggaggaguucgagccguccacccaguacgaguacggcacggaggacgacuaccagggcaagccccucgaguucggggcgaccagcgccgcccugcagcccgaggaggagcaggaggaggacuggcuggacgacgacucccagcagaccgugggccagcaggacgggagcgaggacaaccagaccacgaccauccagaccaucguggagguccagccccagcucgagauggagcugaccccgguggugcagacgaucgaggucaacuccuucagcggcuaccugaagcucaccgacaacguguacaucaagaacgccgacaucguggaggaggcgaagaaggucaagcccaccgugguggucaacgccgccaacguguaccugaagcacgggggcggcguggccggggcccugaacaaggcgaccaacaacgccaugcaggucgaguccgacgacuacaucgccacgaacggcccccucaagguggggggcagcugcguccuguccggccacaaccuggccaagcacugccuccacgugguggggcccaacgucaacaagggcgaggacauccagcugcugaagagcgccuacgagaacuucaaccagcacgaggugcuccuggcgccgcugcucuccgccgggaucuucggcgccgaccccauccacagccugcgggugugcgucgacaccgugcgcaccaacguguaccuggccgucuucgacaagaaccucuacgacaagcugguguccagcuuccuggagaugaagagcgagaagcagguggagcagaagaucgccgagauccccaaggaggaggucaagcccuucaucaccgaguccaagccgagcguggagcagcggaagcaggacgacaagaagaucaaggcgugcguggaggaggucacgaccacccucgaggagaccaaguuccugacggagaaccugcuccuguacaucgacaucaacgggaaccugcaccccgacuccgccacccucgugagcgacaucgacaucaccuuccugaagaaggacgcccccuacaucgugggcgacgucgugcaggagggcgugcugaccgccgucgugauccccacgaagaaggccgggggcaccaccgagaugcucgcgaaggcccugcgcaaggugccgaccgacaacuacaucacgaccuaccccgggcagggccugaacggguacaccgucgaggaggccaagaccgugcucaagaagugcaaguccgccuucuacauccugcccagcaucaucuccaacgagaagcaggagauccugggcaccgugagcuggaaccuccgggagaugcuggcgcacgccgaggagacgcgcaagcugaugcccgucugcguggagaccaaggccaucguguccaccauccagcggaaguacaagggcaucaagauccaggagggggucguggacuacggcgcccgcuucuacuucuacaccagcaagacgaccguggccucccugaucaacacccucaacgaccugaacgagacccuggucacgaugccgcucggguacgugacccacggccugaaccuggaggaggcggcccgguacaugcgcagccucaaggugcccgccaccgucuccgugagcucccccgacgccgugaccgccuacaacggguaccugacgagcuccagcaagacccccgaggagcacuucaucgagaccaucucccuggcgggcagcuacaaggacuggagcuacuccggccagagcacccagcucgggaucgaguuccugaagcggggcgacaaguccgucuacuacaucagcaacccgacgaccuuccaccuggacggggaggugaucaccuucgacaaccucaagacccugcugucccuccgcgaggugcggacgaucaaggucuucaccaccguggacaacaucaaccugcacacccagguggucgacaugagcaugacguacggccagcaguucggccccaccuaccuggacggggccgacgugaccaagaucaagccccacaacucccacgagggcaagaccuucuacgugcucccgaacgacgacacgcugcgcgucgaggccuucgaguacuaccacaccaccgaccccagcuuccuggggcgguacauguccgcccucaaccacaccaagaaguggaaguacccccaggugaacggccugacgagcaucaagugggccgacaacaacugcuaccuggcgaccgcccuccugacccugcagcagaucgagcucaaguucaaccccccggcccugcaggacgccuacuaccgcgcgcgggccggggaggccgccaacuucugcgcccugauccucgcguacugcaacaagaccgugggcgagcugggcgacguccgcgagacgauguccuaccuguuccagcacgccaaccucgacagcugcaagcgggugcugaacgucgugugcaagaccugcgggcagcagcagaccacccugaagggcguggaggccgucauguacauggggacccucuccuacgagcaguucaagaagggcgugcagauccccugcacgugcgggaagcaggccaccaaguaccuggugcagcaggagagccccuucgucaugauguccgcccccccggcgcaguacgagcugaagcacggcaccuucaccugcgccagcgaguacacgggcaacuaccagugcgggcacuacaagcacaucaccuccaaggagacccucuacugcaucgacggcgcccugcugaccaagagcagcgaguacaaggggcccaucacggacguguucuacaaggagaacuccuacaccaccaccaucaagcccgugacguacaagcucgacggcgucgugugcaccgagaucgaccccaagcuggacaacuacuacaagaaggacaacagcuacuucaccgagcagccgaucgaccuggugcccaaccagcccuaccccaacgccuccuucgacaacuucaaguucgucugcgacaacaucaaguucgccgacgaccucaaccagcugaccggguacaagaagccggcgagccgcgagcugaaggugacguucuuccccgaccucaacggcgacguggucgccaucgacuacaagcacuacacccccuccuucaagaagggcgccaagcugcugcacaagcccaucguguggcacgugaacaacgccaccaacaaggcgaccuacaagccgaacacguggugcauccggugccucuggagcaccaagcccgucgagaccuccaacagcuucgacgugcugaaguccgaggacgcccaggggauggacaaccuggccugcgaggaccucaagcccgugagcgaggaggucguggagaaccccaccauccagaaggacgugcuggagugcaacgucaagacgaccgagguggugggcgacaucauccugaagccggccaacaacucccucaagaucaccgaggaggucgggcacaccgaccugauggccgcguacguggacaacagcucccugacgaucaagaagcccaacgagcucagccgcgugcugggccugaagacccucgccacccacgggcuggccgccgucaacuccgugcccugggacaccaucgccaacuacgcgaagccguuccugaacaagguggucagcacgaccaccaacaucgugacccgcugccucaaccgggugugcacgaacuacaugcccuacuucuucacccugcugcuccagcugugcaccuucacccgcuccaccaacagccggaucaaggccuccaugcccacgaccaucgccaagaacaccgucaagagcgugggcaaguucugccuggaggccagcuucaacuaccucaagucccccaacuucagcaagcugaucaacaucaucaucugguuccugcuccuguccgugugccugggcagccucaucuacuccaccgccgcgcuggggguccugaugagcaaccucggcaugccguccuacugcacgggguaccgcgagggcuaccugaacagcaccaacgugaccaucgccaccuacugcacgggcuccauccccugcagcgugugccuguccgggcucgacagccuggacaccuaccccucccuggagaccauccagaucaccaucagcuccuucaagugggaccucacggccuucggccuggucgccgagugguuccuggccuacauccucuucacccgguucuucuacgugcuggggcuggcggccaucaugcagcucuucuucagcuacuucgccgugcacuucaucuccaacagcuggcugauguggcugaucaucaaccugguccagauggcccccaucuccgcgauggugcgcauguacaucuucuucgccagcuucuacuacguguggaagagcuacguccacgugguggacggcugcaacuccagcaccugcaugaugugcuacaagcggaaccgcgccacccgggucgagugcacgaccaucgugaacgggguccgccgguccuucuacguguacgccaacggcggcaagggguucugcaagcuccacaacuggaacugcgugaacugcgacaccuucugcgccggcagcaccuucaucuccgacgaggucgcgcgcgaccugagccugcaguucaagcggccgaucaaccccacggaccaguccagcuacaucguggacuccgugaccgucaagaacgggagcauccaccucuacuucgacaaggccggccagaagaccuacgagcgccacucccugagccacuucgugaaccuggacaaccuccgggccaacaacaccaaggggucccugcccaucaacgugaucgucuucgacggcaagagcaagugcgaggaguccagcgccaaguccgccagcguguacuacucccagcugaugugccagcccauccuccugcuggaccaggcgcucgugagcgacgucggcgacagcgccgagguggccgugaagauguucgacgccuacgucaacacguucuccagcaccuucaacgugccgauggagaagcugaagacccugguggccaccgcggaggccgagcucgccaagaacgucucccuggacaacgugcugagcacguucaucuccgccgcgcgccagggguucguggacagcgacgucgagaccaaggacgugguggagugccucaagcugucccaccagagcgacaucgaggucaccggcgacuccugcaacaacuacaugcugaccuacaacaagguggagaacaugacgccccgggaccucggggccugcaucgacugcagcgcccgccacaucaacgcccagguggccaagucccacaacaucgcgcugaucuggaacgucaaggacuucaugagccuguccgagcagcuccggaagcagauccgcagcgccgccaagaagaacaaccugcccuucaagcugaccugcgccaccacccgccagguggugaacgucgugacgaccaagaucgcccucaagggcgggugaggacuaguuauaagacugacuagcccgaugggccucccaacgggcccuccuccccuccuugcaccgagauuaauaaaaaaaaaaaaaaaaaaaaaaaaaaaaaaaaaaaaaaaaaaaaaaaaaaaaaaaaaaaaaaaaugcaucccccccccccccccccccccccccccccccaaaggcucuuuucagagccaccagaauu

SEQ ID NO: 21479 - RNA, 6058 nt, Artificial Sequence
  SARS-CoV-2__MT856452.1__non-structural protein 3 (NSP3) mRNA gc
aggagaaagcuuaccauggcccccaccaaggugaccuucggcgacgacacggucaucgaggugcagggguacaagagcgugaacaucaccuucgagcuggacgagcgcaucgacaagguccucaacgagaagugcuccgccuacaccguggagcugggcaccgaggugaacgaguucgcgugcgucguggccgacgccgugaucaagacgcugcagccggucagcgagcuccugaccccccuggggaucgaccucgacgagugguccauggccaccuacuaccuguucgacgagagcggcgaguucaagcuggccucccacauguacugcagcuucuacccccccgacgaggacgaggaggagggggacugcgaggaggaggaguucgagccguccacccaguacgaguacggcacggaggacgacuaccagggcaagccccucgaguucggggcgaccagcgccgcccugcagcccgaggaggagcaggaggaggacuggcuggacgacgacucccagcagaccgugggccagcaggacgggagcgaggacaaccagaccacgaccauccagaccaucguggagguccagccccagcucgagauggagcugaccccgguggugcagacgaucgaggucaacuccuucagcggcuaccugaagcucaccgacaacguguacaucaagaacgccgacaucguggaggaggcgaagaaggucaagcccaccgugguggucaacgccgccaacguguaccugaagcacgggggcggcguggccggggcccugaacaaggcgaccaacaacgccaugcaggucgaguccgacgacuacaucgccacgaacggcccccucaagguggggggcagcugcguccuguccggccacaaccuggccaagcacugccuccacgugguggggcccaacgucaacaagggcgaggacauccagcugcugaagagcgccuacgagaacuucaaccagcacgaggugcuccuggcgccgcugcucuccgccgggaucuucggcgccgaccccauccacagccugcgggugugcgucgacaccgugcgcaccaacguguaccuggccgucuucgacaagaaccucuacgacaagcugguguccagcuuccuggagaugaagagcgagaagcagguggagcagaagaucgccgagauccccaaggaggaggucaagcccuucaucaccgaguccaagccgagcguggagcagcggaagcaggacgacaagaagaucaaggcgugcguggaggaggucacgaccacccucgaggagaccaaguuccugacggagaaccugcuccuguacaucgacaucaacgggaaccugcaccccgacuccgccacccucgugagcgacaucgacaucaccuuccugcgcaaggacgcccccuacaucgugggcgacgucgugcaggagggcgugcugaccgccgucgugauccccacgaagaaggccgggggcaccaccgagaugcucgcgaaggcccugcggaaggugccgaccgacaacuacaucacgaccuaccccgggcagggccugaacggguacaccgucgaggaggccaagaccgugcucaagaagugcaaguccgccuucuacauccugcccagcaucaucuccaacgagaagcaggagauccugggcaccgugagcuggaaccuccgcgagaugcuggcgcacgccgaggagacgcggaagcugaugcccgucugcguggagaccaaggccaucguguccaccauccagcgcaaguacaagggcaucaagauccaggagggggucguggacuacggcgcccgguucuacuucuacaccagcaagacgaccguggccucccugaucaacacccucaacgaccugaacgagacccuggucacgaugccgcucggguacgugacccacggccugaaccuggaggaggcggcccgcuacaugcggagccucaaggugcccgccaccgucuccgugagcucccccgacgccgugaccgccuacaacggguaccugacgagcuccagcaagacccccgaggagcacuucaucgagaccaucucccuggcgggcagcuacaaggacuggagcuacuccggccagagcacccagcucgggaucgaguuccugaagcgcggcgacaaguccgucuacuacacgagcaacccgaccaccuuccaccuggacggggaggugaucaccuucgacaaccucaagacgcugcugucccuccgggaggugcgcaccaucaaggucuucaccaccguggacaacaucaaccugcacacgcagguggucgacaugagcaugaccuacggccagcaguucggccccaccuaccuggacggggccgacgugaccaagaucaagccccacaacucccacgagggcaagacguucuacgugcucccgaacgacgacacccugcgggucgaggccuucgaguacuaccacaccaccgaccccagcuuccuggggcgcuacauguccgcccucaaccacacgaagaaguggaaguacccccaggugaacggccugaccagcaucaagugggccgacaacaacugcuaccuggcgaccgcccuccugacccugcagcagaucgagcucaaguucaaccccccggcccugcaggacgccuacuaccgggcgcgcgccggggaggccgccaacuucugcgcccugauccucgcguacugcaacaagacggugggcgagcugggcgacguccgggagaccauguccuaccuguuccagcacgccaaccucgacagcugcaagcgcgugcugaacgucgugugcaagaccugcgggcagcagcagaccacccugaagggcguggaggccgucauguacauggggacgcucuccuacgagcaguucaagaagggcgugcagauccccugcaccugcgggaagcaggccaccaaguaccuggugcagcaggagagccccuucgucaugauguccgcccccccggcgcaguacgagcugaagcacggcaccuucacgugcgccagcgaguacaccggcaacuaccagugcgggcacuacaagcacaucaccuccaaggagacccucuacugcaucgacggcgcccugcugacgaagagcagcgaguacaaggggcccaucaccgacguguucuacaaggagaacuccuacaccaccacgaucaagcccgugaccuacaagcucgacggcgucgugugcaccgagaucgaccccaagcuggacaacuacuacaagaaggacaacagcuacuucaccgagcagccgaucgaccuggugcccaaccagcccuaccccaacgccuccuucgacaacuucaaguucgucugcgacaacaucaaguucgccgacgaccucaaccagcugacgggguacaagaagccggcgagccgggagcugaaggugaccuucuuccccgaccucaacggcgacguggucgccaucgacuacaagcacuacacccccuccuucaagaagggcgccaagcugcugcacaagcccaucguguggcacgugaacaacgccaccaacaaggcgacguacaagccgaacaccuggugcauccgcugccucuggagcaccaagcccgucgagaccuccaacagcuucgacgugcugaaguccgaggacgcccaggggauggacaaccuggccugcgaggaccucaagcccgugagcgaggaggucguggagaaccccacgauccagaaggacgugcuggagugcaacgucaagaccaccgagguggugggcgacaucauccugaagccggccaacaacucccucaagaucaccgaggaggucgggcacacggaccugauggccgcguacguggacaacagcucccugaccaucaagaagcccaacgagcucagccgcgugcugggccugaagacccucgccacccacgggcuggccgccgucaacuccgugcccugggacacgaucgccaacuacgcgaagccguuccugaacaagguggucagcaccaccaccaacaucgugacgcggugccucaaccgcgugugcaccaacuacaugcccuacuucuucacccugcugcuccagcugugcaccuucacccgguccacgaacagccgcaucaaggccuccaugcccaccaccaucgccaagaacaccgucaagagcgugggcaaguucugccuggaggccagcuucaacuaccucaagucccccaacuucagcaagcugaucaacaucaucaucugguuccugcuccuguccgugugccugggcagccucaucuacuccacggccgcgcuggggguccugaugagcaaccucggcaugccguccuacugcaccggguaccgggagggcuaccugaacagcaccaacgugaccaucgccacguacugcaccggcuccauccccugcagcgugugccuguccgggcucgacagccuggacaccuaccccucccuggagaccauccagaucacgaucagcuccuucaagugggaccucaccgccuucggccuggucgccgagugguuccuggccuacauccucuucacccgcuucuucuacgugcuggggcuggcggccaucaugcagcucuucuucagcuacuucgccgugcacuucaucuccaacagcuggcugauguggcugaucaucaaccugguccagauggcccccaucuccgcgauggugcggauguacaucuucuucgccagcuucuacuacguguggaagagcuacguccacgugguggacggcugcaacuccagcaccugcaugaugugcuacaagcgcaaccgggccacgcgcgucgagugcaccaccaucgugaacgggguccggcgcuccuucuacguguacgccaacggcggcaagggguucugcaagcuccacaacuggaacugcgugaacugcgacaccuucugcgccggcagcacguucaucuccgacgaggucgcgcgggaccugagccugcaguucaagcgcccgaucaaccccaccgaccaguccagcuacaucguggacuccgugaccgucaagaacgggagcauccaccucuacuucgacaaggccggccagaagaccuacgagcggcacucccugagccacuucgugaaccuggacaaccuccgcgccaacaacacgaaggggucccugcccaucaacgugaucgucuucgacggcaagagcaagugcgaggaguccagcgccaaguccgccagcguguacuacucccagcugaugugccagcccauccuccugcuggaccaggcgcucgugagcgacgucggcgacagcgccgagguggccgugaagauguucgacgccuacgucaacaccuucuccagcaccuucaacgugccgauggagaagcugaagacccugguggccacggcggaggccgagcucgccaagaacgucucccuggacaacgugcugagcaccuucaucuccgccgcgcggcagggguucguggacagcgacgucgagaccaaggacgugguggagugccucaagcugucccaccagagcgacaucgaggucaccggcgacuccugcaacaacuacaugcugacguacaacaagguggagaacaugaccccccgcgaccucggggccugcaucgacugcagcgcccggcacaucaacgcccagguggccaagucccacaacaucgcgcugaucuggaacgucaaggacuucaugagccuguccgagcagcuccgcaagcagauccgcagcgccgccaagaagaacaaccugcccuucaagcugaccugcgccaccacgcggcagguggugaacgucgugaccaccaagaucgcccucaagggcgggugaggacuaguuauaagacugacuagcccgaugggccucccaacgggcccuccuccccuccuugcaccgagauuaauaaaaaaaaaaaaaaaaaaaaaaaaaaaaaaaaaaaaaaaaaaaaaaaaaaaaaaaaaaaaaaaaugcaucccccccccccccccccccccccccccccccaaaggcucuuuucagagccaccagaauu

SEQ ID NO: 21480 - RNA, 6058 nt, Artificial Sequence
  SARS-CoV-2__MT856453.1__non-structural protein 3 (NSP3) mRNA gc
aggagaaagcuuaccauggcccccaccaaggugaccuucggcgacgacacggucaucgaggugcagggguacaagagcgugaacaucaccuucgagcuggacgagcgcaucgacaagguccucaacgagaagugcuccgccuacaccguggagcugggcaccgaggugaacgaguucgcgugcgucguggccgacgccgugaucaagacgcugcagccggucagcgagcuccugaccccccuggggaucgaccucgacgagugguccauggccaccuacuaccuguucgacgagagcggcgaguucaagcuggccucccacauguacugcagcuucuacccccccgacgaggacgaggaggagggggacugcgaggaggaggaguucgagccguccacccaguacgaguacggcacggaggacgacuaccagggcaagccccucgaguucggggcgaccagcgccgcccugcagcccgaggaggagcaggaggaggacuggcuggacgacgacucccagcagaccgugggccagcaggacgggagcgaggacaaccagaccacgaccauccagaccaucguggagguccagccccagcucgagauggagcugaccccgguggugcagacgaucgaggucaacuccuucagcggcuaccugaagcucaccgacaacguguacaucaagaacgccgacaucguggaggaggcgaagaaggucaagcccaccgugguggucaacgccgccaacguguaccugaagcacgggggcggcguggccggggcccugaacaaggcgaccaacaacgccaugcaggucgaguccgacgacuacaucgccacgaacggcccccucaagguggggggcagcugcguccuguccggccacaaccuggccaagcacugccuccacgugguggggcccaacgucaacaagggcgaggacauccagcugcugaagagcgccuacgagaacuucaaccagcacgaggugcuccuggcgccgcugcucuccgccgggaucuucggcgccgaccccauccacagccugcgggugugcgucgacaccgugcgcaccaacguguaccuggccgucuucgacaagaaccucuacgacaagcugguguccagcuuccuggagaugaagagcgagaagcagguggagcagaagaucgccgagauccccaaggaggaggucaagcccuucaucaccgaguccaagccgagcguggagcagcggaagcaggacgacaagaagaucaaggcgugcguggaggaggucacgaccacccucgaggagaccaaguuccugacggagaaccugcuccuguacaucgacaucaacgggaaccugcaccccgacuccgccacccucgugagcgacaucgacaucaccuuccugaagaaggacgcccccuacaucgugggcgacgucgugcaggagggcgugcugaccgccgucgugauccccacgaagaaggccgggggcaccaccgagaugcucgcgaaggcccugcgcaaggugccgaccgacaacuacaucacgaccuaccccgggcagggccugaacggguacaccgucgaggaggccaagaccgugcucaagaagugcaaguccgccuucuacauccugcccagcaucaucuccaacgagaagcaggagauccugggcaccgugagcuggaaccuccgggagaugcuggcgcacgccgaggagacgcgcaagcugaugcccgucugcguggagaccaaggccaucguguccaccauccagcggaaguacaagggcaucaagauccaggagggggucguggacuacggcgcccgcuucuacuucuacaccagcaagacgaccguggccucccugaucaacacccucaacgaccugaacgagacccuggucacgaugccgcucggguacgugacccacggccugaaccuggaggaggcggcccgguacaugcgcagccucaaggugcccgccaccgucuccgugagcucccccgacgccgugaccgccuacaacggguaccugacgagcuccagcaagacccccgaggagcacuucaucgagaccaucucccuggcgggcagcuacaaggacuggagcuacuccggccagagcacccagcucgggaucgaguuccugaagcggggcgacaaguccgucuacuacacgagcaacccgaccaccuuccaccuggacggggaggugaucaccuucgacaaccucaagacgcugcugucccuccgcgaggugcggaccaucaaggucuucaccaccguggacaacaucaaccugcacacgcagguggucgacaugagcaugaccuacggccagcaguucggccccaccuaccuggacggggccgacgugaccaagaucaagccccacaacucccacgagggcaagacguucuacgugcucccgaacgacgacacccugcgcgucgaggccuucgaguacuaccacaccaccgaccccagcuuccuggggcgguacauguccgcccucaaccacacgaagaaguggaaguacccccaggugaacggccugaccagcaucaagugggccgacaacaacugcuaccuggcgaccgcccuccugacccugcagcagaucgagcucaaguucaaccccccggcccugcaggacgccuacuaccgcgcgcgggccggggaggccgccaacuucugcgcccugauccucgcguacugcaacaagacggugggcgagcugggcgacguccgcgagaccauguccuaccuguuccagcacgccaaccucgacagcugcaagcgggugcugaacgucgugugcaagaccugcgggcagcagcagaccacccugaagggcguggaggccgucauguacauggggacgcucuccuacgagcaguucaagaagggcgugcagauccccugcaccugcgggaagcaggccaccaaguaccuggugcagcaggagagccccuucgucaugauguccgcccccccggcgcaguacgagcugaagcacggcaccuucacgugcgccagcgaguacaccggcaacuaccagugcgggcacuacaagcacaucaccuccaaggagacccucuacugcaucgacggcgcccugcugacgaagagcagcgaguacaaggggcccaucaccgacguguucuacaaggagaacuccuacaccaccacgaucaagcccgugaccuacaagcucgacggcgucgugugcaccgagaucgaccccaagcuggacaacuacuacaagaaggacaacagcuacuucaccgagcagccgaucgaccuggugcccaaccagcccuaccccaacgccuccuucgacaacuucaaguucgucugcgacaacaucaaguucgccgacgaccucaaccagcugacgggguacaagaagccggcgagccgcgagcugaaggugaccuucuuccccgaccucaacggcgacguggucgccaucgacuacaagcacuacacccccuccuucaagaagggcgccaagcugcugcacaagcccaucguguggcacgugaacaacgccaccaacaaggcgacguacaagccgaacaccuggugcauccggugccucuggagcaccaagcccgucgagaccuccaacagcuucgacgugcugaaguccgaggacgcccaggggauggacaaccuggccugcgaggaccucaagcccgugagcgaggaggucguggagaaccccacgauccagaaggacgugcuggagugcaacgucaagaccaccgagguggugggcgacaucauccugaagccggccaacaacucccucaagaucaccgaggaggucgggcacacggaccugauggccgcguacguggacaacagcucccugaccaucaagaagcccaacgagcucagccgcgugcugggccugaagacccucgccacccacgggcuggccgccgucaacuccgugcccugggacacgaucgccaacuacgcgaagccguuccugaacaagguggucagcaccaccaccaacaucgugacgcgcugccucaaccgggugugcaccaacuacaugcccuacuucuucacccugcugcuccagcugugcaccuucacccgcuccacgaacagccggaucaaggccuccaugcccaccaccaucgccaagaacaccgucaagagcgugggcaaguucugccuggaggccagcuucaacuaccucaagucccccaacuucagcaagcugaucaacaucaucaucugguuccugcuccuguccgugugccugggcagccucaucuacuccacggccgcgcuggggguccugaugagcaaccucggcaugccguccuacugcaccggguaccgcgagggcuaccugaacagcaccaacgugaccaucgccacguacugcaccggcuccauccccugcagcgugugccuguccgggcucgacagccuggacaccuaccccucccuggagaccauccagaucacgaucagcucccucaagugggaccugaccgccuucggccuggucgccgagugguuccucgccuacauccuguucacccgguucuucuacgugcuggggcucgcggccaucaugcagcuguucuucagcuacuucgccgugcacuucaucuccaacagcuggcugauguggcugaucaucaaccucguccagauggcccccaucuccgcgauggugcgcauguacaucuucuucgccagcuucuacuacguguggaagagcuacguccacgugguggacggcugcaacuccagcaccugcaugaugugcuacaagcggaaccgcgccacgcgggucgagugcaccaccaucgugaacgggguccgccgguccuucuacguguacgccaacggcggcaagggguucugcaagcugcacaacuggaacugcgugaacugcgacaccuucugcgccggcagcacguucaucuccgacgaggucgcgcgcgaccugagccuccaguucaagcggccgaucaaccccaccgaccaguccagcuacaucguggacuccgugaccgucaagaacgggagcauccaccuguacuucgacaaggccggccagaagaccuacgagcgccacucccugagccacuucgugaaccucgacaaccugcgggccaacaacacgaaggggucccugcccaucaacgugaucgucuucgacggcaagagcaagugcgaggaguccagcgccaaguccgccagcguguacuacucccagcucaugugccagcccauccugcugcucgaccaggcgcuggugagcgacgucggcgacagcgccgagguggccgugaagauguucgacgccuacgucaacaccuucuccagcaccuucaacgugccgauggagaagcugaagacccucguggccacggcggaggccgagcuggccaagaacgucucccuggacaacgugcucagcaccuucaucuccgccgcgcgccagggguucguggacagcgacgucgagaccaaggacgugguggagugccugaagcugucccaccagagcgacaucgaggucaccggcgacuccugcaacaacuacaugcucacguacaacaagguggagaacaugaccccccgggaccugggggccugcaucgacugcagcgcccgccacaucaacgcccagguggccaagucccacaacaucgcgcugaucuggaacgucaaggacuucaugagccucuccgagcagcugcggaagcagauccgcagcgccgccaagaagaacaaccugcccuucaagcucaccugcgccaccacgcgccagguggugaacgucgugaccaccaagaucgcccugaagggcgggugaggacuaguuauaagacugacuagcccgaugggccucccaacgggcccuccuccccuccuugcaccgagauuaauaaaaaaaaaaaaaaaaaaaaaaaaaaaaaaaaaaaaaaaaaaaaaaaaaaaaaaaaaaaaaaaaugcaucccccccccccccccccccccccccccccccaaaggcucuuuucagagccaccagaauu

SEQ ID NO: 21481 - RNA, 6058 nt, Artificial Sequence
  SARS-CoV-2__MT856456.1__non-structural protein 3 (NSP3) mRNA gc
aggagaaagcuuaccauggcccccaccaaggugaccuucggcgacgacacggucaucgaggugcagggguacaagagcgugaacaucaccuucgagcuggacgagcgcaucgacaagguccucaacgagaagugcuccgccuacaccguggagcugggcaccgagguggacgaguucgcgugcgucguggccgacgccgugaucaagacgcugcagccggucagcgagcuccugaccccccuggggaucgaccucgacgagugguccauggccaccuacuaccuguucgacgagagcggcgaguucaagcuggccucccacauguacugcagcuucuacccccccgacgaggacgaggaggagggggacugcgaggaggaggaguucgagccguccacccaguacgaguacggcacggaggacgacuaccagggcaagccccucgaguucggggcgaccagcgccgcccugcagcccgaggaggagcaggaggaggacuggcuggacgacgacucccagcagaccgugggccagcaggacgggagcgaggacaaccagaccacgaccauccagaccaucguggagguccagccccagcucgagauggagcugaccccgguggugcagacgaucgaggucaacuccuucagcggcuaccugaagcucaccgacaacguguacaucaagaacgccgacaucguggaggaggcgaagaaggucaagcccaccgugguggucaacgccgccaacguguaccugaagcacgggggcggcguggccggggcccugaacaaggcgaccaacaacgccaugcaggucgaguccgacgacuacaucgccacgaacggcccccucaagguggggggcagcugcguccuguccggccacaaccuggccaagcacugccuccacgugguggggcccaacgucaacaagggcgaggacauccagcugcugaagagcgccuacgagaacuucaaccagcacgaggugcuccuggcgccgcugcucuccgccgggaucuucggcgccgaccccauccacagccugcgggugugcgucgacaccgugcgcaccaacguguaccuggccgucuucgacaagaaccucuacgacaagcugguguccagcuuccuggagaugaagagcgagaagcagguggagcagaagaucgccgagauccccaaggaggaggucaagcccuucaucaccgaguccaagccgagcguggagcagcggaagcaggacgacaagaagaucaaggcgugcguggaggaggucacgaccacccucgaggagaccaaguuccugacggagaaccugcuccuguacaucgacaucaacgggaaccugcaccccgacuccgccacccucgugagcgacaucgacaucaccuuccugaagaaggacgcccccuacaucgugggcgacgucgugcaggagggcgugcugaccgccgucgugauccccacgaagaaggccgggggcaccaccgagaugcucgcgaaggcccugcgcaaggugccgaccgacaacuacaucacgaccuaccccgggcagggccugaacggguacaccgucgaggaggccaagaccgugcucaagaagugcaaguccgccuucuacauccugcccagcaucaucuccaacgagaagcaggagauccugggcaccgugagcuggaaccuccgggagaugcuggcgcacgccgaggagacgcgcaagcugaugcccgucugcguggagaccaaggccaucguguccaccauccagcggaaguacaagggcaucaagauccaggagggggucguggacuacggcgcccgcuucuacuucuacaccagcaagacgaccguggccucccugaucaacacccucaacgaccugaacgagacccuggucacgaugccgcucggguacgugacccacggccugaaccuggaggaggcggcccgguacaugcgcagccucaaggugcccgccaccgucuccgugagcucccccgacgccgugaccgccuacaacggguaccugacgagcuccagcaagacccccgaggagcacuucaucgagaccauccugcucgcgggcuccuacaaggacuggagcuacagcggccaguccacccagcuggggaucgaguuccugaagcggggcgacaagagcgucuacuacacguccaacccgaccaccuuccaccucgacggggaggugaucaccuucgacaaccugaagacgcugcucagccugcgcgaggugcggaccaucaaggucuucaccaccguggacaacaucaaccugcacacgcagguggucgacauguccaugaccuacggccagcaguucggccccaccuaccucgacggggccgacgugaccaagaucaagccccacaacagccacgagggcaagacguucuacgugcugccgaacgacgacacccugcgcgucgaggccuucgaguacuaccacaccaccgaccccuccuuccucgggcgguacaugagcgcccugaaccacacgaagaaguggaaguacccccaggugaacggccugaccuccaucaagugggccgacaacaacugcuaccucgcgaccgcccugcugacccuccagcagaucgagcugaaguucaaccccccggcccugcaggacgccuacuaccgcgcgcgggccggggaggccgccaacuucugcgcccucauccuggcguacugcaacaagacggugggcgagcugggcgacguccgcgagaccaugagcuaccucuuccagcacgccaaccuggacuccugcaagcgggugcugaacgucgugugcaagaccugcgggcagcagcagaccacccucaagggcguggaggccgucauguacauggggacgcugagcuacgagcaguucaagaagggcgugcagauccccugcaccugcgggaagcaggccaccaaguaccuggugcagcaggagucccccuucgucaugaugagcgcccccccggcgcaguacgagcucaagcacggcaccuucacgugcgccuccgaguacaccggcaacuaccagugcgggcacuacaagcacaucaccagcaaggagacccuguacugcaucgacggcgcccugcucacgaaguccagcgaguacaaggggcccaucaccgacguguucuacaaggagaacagcuacaccaccacgaucaagcccgugaccuacaagcuggacggcgucgugugcaccgagaucgaccccaagcuggacaacuacuacaagaaggacaacuccuacuucaccgagcagccgaucgaccucgugcccaaccagcccuaccccaacgccagcuucgacaacuucaaguucgucugcgacaacaucaaguucgccgacgaccugaaccagcugacgggguacaagaagccggcgucccgcgagcucaaggugaccuucuuccccgaccugaacggcgacguggucgccaucgacuacaagcacuacacccccagcuucaagaagggcgccaagcugcuccacaagcccaucguguggcacgugaacaacgccaccaacaaggcgacguacaagccgaacaccuggugcauccggugccugugguccaccaagcccgucgagaccagcaacuccuucgacgugcugaagagcgaggacgcccaggggauggacaaccucgccugcgaggaccugaagcccguguccgaggaggucguggagaaccccacgauccagaaggacgugcuggagugcaacgucaagaccaccgagguggugggcgacaucauccucaagccggccaacaacagccugaagaucaccgaggaggucgggcacacggaccugauggccgcguacguggacaacuccagccucaccaucaagaagcccaacgagcugucccgcgugcugggccucaagacccuggccacccacgggcuggccgccgucaacagcgugcccugggacacgaucgccaacuacgcgaagccguuccucaacaagguggucuccaccaccaccaacaucgugacgcgcugccugaaccgggugugcaccaacuacaugcccuacuucuucacccugcuccugcagcugugcaccuucacccgcagcacgaacucccggaucaaggccagcaugcccaccaccaucgccaagaacaccgucaaguccgugggcaaguucugccucgaggccagcuucaacuaccugaagagccccaacuucuccaagcugaucaacaucaucaucugguuccuccugcugagcgugugccucggcucccugaucuacagcacggccgcgcuggggguccucauguccaaccugggcaugccgagcuacugcaccggguaccgcgagggcuaccugaacuccaccaacgugaccaucgccacguacugcaccggcagcauccccugcuccgugugccucagcgggcuggacucccuggacaccuaccccagccucgagaccauccagaucacgaucuccagcuucaagugggaccugaccgccuucggccuggucgccgagugguuccucgccuacauccuguucacccgguucuucuacgugcuggggcucgcggccaucaugcagcuguucuucuccuacuucgccgugcacuucaucagcaacuccuggcugauguggcugaucaucaaccucguccagauggcccccaucagcgcgauggugcgcauguacaucuucuucgccuccuucuacuacguguggaagagcuacguccacgugguggacggcugcaacagcuccaccugcaugaugugcuacaagcggaaccgcgccacgcgggucgagugcaccaccaucgugaacgggguccgccggagcuucuacguguacgccaacggcggcaagggguucugcaagcugcacaacuggaacugcgugaacugcgacaccuucugcgccggcuccacguucaucagcgacgaggucgcgcgcgaccugucccuccaguucaagcggccgaucaaccccaccgaccagagcuccuacaucguggacagcgugaccgucaagaacggguccauccaccuguacuucgacaaggccggccagaagaccuacgagcgccacagccugucccacuucgugaaccucgacaaccugcgggccaacaacacgaaggggagccugcccaucaacgugaucgucuucgacggcaaguccaagugcgaggagagcuccgccaagagcgccuccguguacuacagccagcucaugugccagcccauccugcugcucgaccaggcgcugguguccgacgucggcgacagcgccgagguggccgugaagauguucgacgccuacgucaacaccuucagcuccaccuucaacgugccgauggagaagcugaagacccucguggccacggcggaggccgagcuggccaagaacgucagccuggacaacgugcucuccaccuucaucagcgccgcgcgccagggguucguggacuccgacgucgagaccaaggacgugguggagugccugaagcugagccaccaguccgacaucgaggucaccggcgacagcugcaacaacuacaugcucacguacaacaagguggagaacaugaccccccgggaccugggggccugcaucgacugcuccgcccgccacaucaacgcccagguggccaagagccacaacaucgcgcugaucuggaacgucaaggacuucaugucccucagcgagcagcugcggaagcagauccgcuccgccgccaagaagaacaaccugcccuucaagcucaccugcgccaccacgcgccagguggugaacgucgugaccaccaagaucgcccugaagggcgggugaggacuaguuauaagacugacuagcccgaugggccucccaacgggcccuccuccccuccuugcaccgagauuaauaaaaaaaaaaaaaaaaaaaaaaaaaaaaaaaaaaaaaaaaaaaaaaaaaaaaaaaaaaaaaaaaugcaucccccccccccccccccccccccccccccccaaaggcucuuuucagagccaccagaauu

SEQ ID NO: 21482 - RNA, 6058 nt, Artificial Sequence
  SARS-CoV-2__MT856680.1__non-structural protein 3 (NSP3) mRNA gc
aggagaaagcuuaccauggcccccaccaaggugaccuucggcgacgacacggucaucgaggugcagggguacaagagcgugaacaucaccuucgagcuggacgagcgcaucgacaagguccucaacgagaagugcuccgccuacaccguggagcugggcaccgaggugaacgaguucgcgugcgucguggccgacgccgugaucaagacgcugcagccggucagcgagcuccugaccccccuggggaucgaccucgacgagugguccauggccaccuacuaccuguucgacgagagcggcgaguucaagcuggccucccacauguacugcagcuucuacccccccgacgaggacgaggaggagggggacugcgaggaggaggaguucgagccguccacccaguacgaguacggcacggaggacgacuaccagggcaagccccucgaguucggggcgaccagcgccgcccugcagcccgaggaggagcaggaggaggacuggcuggacgacgacucccagcagaccgugggccagcaggacgggagcgaggacaaccagaccacgaccauccagaccaucguggagguccagccccagcucgagauggagcugaccccgguggugcagacgaucgaggucaacuccuucagcggcuaccugaagcucaccgacaacguguacaucaagaacgccgacaucguggaggaggcgaagaaggucaagcccaccgugguggucaacgccgccaacguguaccugaagcacgggggcggcguggccggggcccugaacaaggcgaccaacaacgccaugcaggucgaguccgacgacuacaucgccacgaacggcccccucaagguggggggcagcugcguccuguccggccacaaccuggccaagcacugccuccacgugguggggcccaacgucaacaagggcgaggacauccagcugcugaagagcgccuacgagaacuucaaccagcacgaggugcuccuggcgccgcugcucuccgccgggaucuucggcgccgaccccauccacagccugcgggugugcgucgacaccgugcgcaccaacguguaccuggccgucuucgacaagaaccucuacgacaagcugguguccagcuuccuggagaugaagagcgagaagcagguggagcagaagaucgccgagauccccaaggaggaggucaagcccuucaucaccgaguccaagccgagcguggagcagcggaagcaggacgacaagaagaucaaggcgugcguggaggaggucacgaccacccucgaggagaccaaguuccugacggagaaccugcuccuguacaucgacaucaacgggaaccugcaccccgacuccgccacccucgugagcgacaucgacaucaccuuccugaagaaggacgcccccuacaucgugggcgacgucgugcaggagggcgugcugaccgccgucgugauccccacgaagaaggccgggggcaccaccgagaugcucgcgaaggcccugcgcaaggugccgaccgacaacuacaucacgaccuaccccgggcagggccugaacggguacaccgucgaggaggccaagaccgugcucaagaagugcaaguccgccuucuacauccugcccagcaucaucuccaacgagaagcaggagauccugggcaccgugagcuggaaccuccgggagaugcuggcgcacgccgaggagacgcgcaagcugaugcccgucugcguggagaccaaggccaucguguccaccauccagcggaaguacaagggcaucaagauccaggagggggucguggacuacggcgcccgcuucuacuucuacaccagcaagacgaccguggccucccugaucaacacccucaacgaccugaacgagacccuggucacgaugccgcucggguacgugacccacggccugaaccuggaggaggcggcccgguacaugcgcagccucaaggugcccgccaccgucuccgugagcucccccgacgccgugaccgccuacaacggguaccugacgagcuccagcaagacccccgaggagcacuucaucgagaccaucucccuggcgggcagcuacaaggacuggagcuacuccggccagagcacccagcucgggaucgaguuccugaagcggggcgacaaguccgucuacuacacgagcaacccgaccaccuuccaccuggacggggaggugaucaccuucgacaaccucaagacgcugcugucccuccgcgaggugcggaccaucaaggucuucaccaccguggacaacaucaaccugcacacgcagguggucgacaugagcaugaccuacggccagcaguucggccccaccuaccuggacggggccgacgugaccaagaucaagccccacaacucccacgagggcaagacguucuacgugcucccgaacgacgacacccugcgcgucgaggccuucgaguacuaccacaccaccgaccccagcuuccuggggcgguacauguccgcccucaaccacacgaagaaguggaaguacccccaggugaacggccugaccagcaucaagugggccgacaacaacugcuaccuggcgaccgcccuccugacccugcagcagaucgagcucaaguucaaccccccggcccugcaggacgccuacuaccgcgcgcgggccggggaggccgccaacuucugcgcccugauccucgcguacugcaacaagacggugggcgagcugggcgacguccgcgagaccauguccuaccuguuccagcacgccaaccucgacagcugcaagcgggugcugaacgucgugugcaagaccugcgggcagcagcagaccacccugaagggcguggaggccgucauguacauggggacgcucuccuacgagcaguucaagaagggcgugcagauccccugcaccugcgggaagcaggccaccaaguaccuggugcagcaggagagccccuucgucaugauguccgcccccccggcgcaguacgagcugaagcacggcaccuucacgugcgccagcgaguacaccggcaacuaccagugcgggcacuacaagcacaucaccuccaaggagacccucuacugcaucgacggcgcccugcugacgaagagcagcgaguacaaggggcccaucaccgacguguucuacaaggagaacuccuacaccaccacgaucaagcccgugaccuacaagcucgacggcgucgugugcaccgagaucgaccccaagcuggacaacuacuacaagaaggacaacagcuacuucaccgagcagccgaucgaccuggugcccaaccagcccuaccccaacgccuccuucgacaacuucaaguucgucugcgacaacaucaaguucgccgacgaccucaaccagcugacgggguacaagaagccggcgagccgcgagcugaaggugaccuucuuccccgaccucaacggcgacguggucgccaucgacuacaagcacuacacccccuccuucaagaagggcgccaagcugcugcacaagcccaucguguggcacgugaacaacgccaccaacaaggcgacguacaagccgaacaccuggugcauccggugccucuggagcaccaagcccgucgagaccuccaacagcuucgacgugcugaaguccgaggacgcccaggggauggacaaccuggccugcgaggaccucaagcccgugagcgaggaggucguggagaaccccacgauccagaaggacgugcuggagugcaacgucaagaccaccgagguggugggcgacaucauccugaagccggccaacaacucccucaagaucaccgaggaggucgggcacacggaccugauggccgcguacguggacaacagcucccugaccaucaagaagcccaacgagcucagccgcgugcugggccugaagacccucgccacccacgggcuggccgccgucaacuccgugcccugggacacgaucgccaacuacgcgaagccguuccugaacaagguggucagcaccaccaccaacaucgugacgcgcugccucaaccgggugugcaccaacuacaugcccuacuucuucacccugcugcuccagcugugcaccuucacccgcuccacgaacagccggaucaaggccuccaugcccaccaccaucgccaagaacaccgucaagagcgugggcaaguucugccuggaggccagcuucaacuaccucaagucccccaacuucagcaagcugaucaacaucaucaucugguuccugcuccuguccgugugccugggcagccucaucuacuccacggccgcgcuggggguccugaugagcaaccucggcaugccguccuacugcaccggguaccgcgagggcuaccugaacagcaccaacgugaccaucgccacguacugcaccggcuccauccccugcagcgugugccuguccgggcucgacagccuggacaccuaccccucccuggagaccauccagaucacgaucagcuccuucaagugggaccucaccgccuucggccuggucgccgagugguuccuggccuacauccucuucacccgguucuucuacgugcuggggcuggcggccaucaugcagcucuucuucagcuacuucgccgugcacuucaucuccaacagcuggcugauguggcugaucaucaaccugguccagauggcccccaucuccgcgauggugcgcauguacaucuucuucgccagcuucuacuacguguggaagagcuacguccacgugguggacggcugcaacuccagcaccugcaugaugugcuacaagcggaaccgcgccacgcgggucgagugcaccaccaucgugaacgggguccgccgguccuucuacguguacgccaacggcggcaagggguucugcaagcuccacaacuggaacugcgugaacugcgacaccuucugcgccggcagcacguucaucuccgacgaggucgcgcgcgaccugagccugcaguucaagcggccgaucaaccccaccgaccaguccagcuacaucguggacuccgugaccgucaagaacgggagcauccaccucuacuucgacaaggccggccagaagaccuacgagcgccacucccugagccacuucgugaaccuggacaaccuccgggccaacaacacgaaggggucccugcccaucaacgugaucgucuucgacggcaagagcaagugcgaggaguccagcgccaaguccgccagcguguacuacucccagcugaugugccagcccauccuccugcuggaccaggcgcucgugagcgacgucggcgacagcgccgagguggccgugaagauguucgacgccuacgucaacaccuucuccagcaccuucaacgugccgaucgagaagcugaagacccugguggccacggcggaggccgagcucgccaagaacgucucccuggacaacgugcugagcaccuucaucuccgccgcgcgccagggguucguggacagcgacgucgagaccaaggacgugguggagugccucaagcugucccaccagagcgacaucgaggucaccggcgacuccugcaacaacuacaugcugacguacaacaagguggagaacaugaccccccgggaccucggggccugcaucgacugcagcgcccgccacaucaacgcccagguggccaagucccacaacaucgcgcugaucuggaacgucaaggacuucaugagccuguccgagcagcuccggaagcagauccgcagcgccgccaagaagaacaaccugcccuucaagcugaccugcgccaccacgcgccagguggugaacgucgugaccaccaagaucgcccucaagggcgggugaggacuaguuauaagacugacuagcccgaugggccucccaacgggcccuccuccccuccuugcaccgagauuaauaaaaaaaaaaaaaaaaaaaaaaaaaaaaaaaaaaaaaaaaaaaaaaaaaaaaaaaaaaaaaaaaugcaucccccccccccccccccccccccccccccccaaaggcucuuuucagagccaccagaauu

SEQ ID NO: 21483 - RNA, 6058 nt, Artificial Sequence
  SARS-CoV-2__MT856685.1__non-structural protein 3 (NSP3) mRNA gc
aggagaaagcuuaccauggcccccaccaaggugaccuucggcgacgacacggucaucgaggugcagggguacaagagcgugaacaucaccuucgagcuggacgagcgcaucgacaagguccucaacgagaagugcuccgccuacaccguggagcugggcaccgaggugaacgaguucgcgugcgucguggccgacgccgugaucaagacgcugcagccggucagcgagcuccugaccccccuggggaucgaccucgacgagugguccauggccaccuacuaccuguucgacgagagcggcgaguucaagcuggccucccacauguacugcagcuucuacccccccgacgaggacgaggaggagggggacugcgaggaggaggaguucgagccguccacccaguacgaguacggcacggaggacgacuaccagggcaagccccucgaguucggggcgaccagcgccgcccugcagcccgaggaggagcaggaggaggacuggcuggacgacgacucccagcagaccgugggccagcaggacgggagcgaggacaaccagaccacgaccauccagaccaucguggagguccagccccagcucgagauggagcugaccccgguggugcagacgaucgaggucaacuccuucagcggcuaccugaagcucaccgacaacguguacaucaagaacgccgacaucguggaggaggcgaagaaggucaagcccaccgugguggucaacgccgccaacguguaccugaagcacgggggcggcguggccggggcccugaacaaggcgaccaacaacgccaugcaggucgaguccgacgacuacaucgccacgaacggcccccucaagguggggggcagcugcguccuguccggccacaaccuggccaagcacugccuccacgugguggggcccaacgucaacaagggcgaggacauccagcugcugaagagcgccuacgagaacuucaaccagcacgaggugcuccuggcgccgcugcucuccgccgggaucuucggcgccgaccccauccacagccugcgggugugcgucgacaccgugcgcaccaacguguaccuggccgucuucgacaagaaccucuacgacaagcugguguccagcuuccuggagaugaagagcgagaagcagguggagcagaagaucgccgagauccccaaggaggaggucaagcccuucaucaccgaguccaagccgagcguggagcagcggaagcaggacgacaagaagaucaaggcgugcguggaggaggucacgaccacccucgaggagaccaaguuccugacggagaaccugcuccuguacaucgacaucaacgggaaccugcaccccgacuccgccacccucgugagcgacaucgacaucaccuuccugaagaaggacgcccccuacaucgugggcgacgucgugcaggagggcgugcugaccgccgucgugauccccacgaagaaggccgggggcaccaccgagaugcucgcgaaggcccugcgcaaggugccgaccgacaacuacaucacgaccuaccccgggcagggccugaacggguacaccgucgaggaggccaagaccgugcucaagaagugcaaguccgccuucuacauccugcccagcaucaucuccaacgagaagcaggagauccugggcaccgugagcuggaaccuccgggagaugcuggcgcacgccgaggagacgcgcaagcugaugcccgucugcguggagaccaaggccaucguguccaccauccagcggaaguacaagggcaucaagauccaggagggggucguggacuacggcgcccgcuucuacuucuacaccagcaagacgaccguggccucccugaucaacacccucaacgaccugaacgagacccuggucacgaugccgcucggguacgugacccacggccugaaccuggaggaggcggcccgguacaugcgcagccucaaggugcccgccaccgucuccgugagcucccccgacgccgugaccgccuacaacggguaccugacgagcuccagcaagacccccgaggagcacuucaucgagaccaucucccuggcgggcagcuacaaggacuggagcuacuccggccagagcacccagcucgggaucgaguuccugaagcggggcgacaaguccgucuacuacacgagcaacccgaccaccuuccaccuggacggggaggugaucaccuucgacaaccucaagacgcugcugucccuccgcgaggugcggaccaucaaggucuucaccaccguggacaacaucaaccugcacacgcagguggucgacaugagcaugaccuacggccagcaguucggccccaccuaccuggacggggccgacgugaccaagaucaagccccacaacucccacgagggcaagacguucuacgugcucccgaacgacgacacccugcgcgucgaggccuucgaguacuaccacaccaccgaccccagcuuccuggggcgguacauguccgcccucaaccacacgaagaaguggaaguacccccaggugaacggccugaccagcaucaagugggccgacaacaacugcuaccuggcgaccgcccuccugacccugcagcagaucgagcucaaguucaaccccccggcccugcaggacgccuacuaccgcgcgcgggccggggaggccgccaacuucugcgcccugauccucgcguacugcaacaagacggugggcgagcugggcgacguccgcgagaccauguccuaccuguuccagcacgccaaccucgacagcugcaagcgggugcugaacgucgugugcaagaccugcgggcagcagcagaccacccugaagggcguggaggccgucauguacauggggacgcucuccuacgagcaguucaagaagggcgugcagauccccugcaccugcgggaagcaggccaccaaguaccuggugcagcaggagagccccuucgucaugauguccgcccccccggcgcaguacgagcugaagcacggcaccuucacgugcgccagcgaguacaccggcaacuaccagugcgggcacuacaagcacaucaccuccaaggagacccucuacugcaucgacggcgcccugcugacgaagagcagcgaguacaaggggcccaucaccgacguguucuacaaggagaacuccuacaccaccacgaucaagcccgugaccuacaagcucgacggcgucgugugcaccgagaucgaccccaagcuggacaacuacuacaagaaggacaacagcuacuucaccgagcagccgaucgaccuggugcccaaccagcccuaccccaacgccuccuucgacaacuucaaguucgucugcgacaacaucaaguucgccgacgaccucaaccagcugacgggguacaagaagccggcgagccgcgagcugaaggugaccuucuuccccgaccucaacggcgacguggucgccaucgacuacaagcacuacacccccuccuucaagaagggcgccaagcugcugcacaagcccaucguguggcacgugaacaacgccaccaacaaggcgacguacaagccgaacaccuggugcauccggugccucuggagcaccaagcccgucgagaccuccaacagcuucgacgugcugaaguccgaggacgcccaggggauggacaaccuggccugcgaggaccucaagcccgugagcgaggaggucguggagaaccccacgauccagaaggacgugcuggagugcaacgucaagaccaccgagguggugggcgacaucauccugaagccggccaacaacucccucaagaucaccgaggaggucgggcacacggaccugauggccgcguacguggacaacagcucccugaccaucaagaagcccaacgagcucagccgcgugcugggccugaagacccucgccacccacgggcuggccgccgucaacuccgugcccugggacacgaucgccaacuacgcgaagcuguuccucaacaagguggucagcaccaccaccaacaucgugacgcgcugccugaaccgggugugcaccaacuacaugccguacuucuucacccugcuccugcagcugugcaccuucacccgcuccacgaacagccggaucaaggccuccaugcccaccaccaucgccaagaacaccgucaagagcgugggcaaguucugccucgaggccagcuucaacuaccugaagucccccaacuucagcaagcugaucaacaucaucaucugguuccuccugcuguccgugugccucggcagccugaucuacuccacggccgcgcuggggguccucaugagcaaccugggcaugcccuccuacugcaccggguaccgcgagggcuaccugaacagcaccaacgugaccaucgccacguacugcaccggcuccaucccgugcagcgugugccucuccgggcuggacagccuggacaccuaccccucccucgagaccauccagaucacgaucagcuccuucaagugggaccugaccgccuucggccuggucgccgagugguuccucgccuacauccuguucacccgguucuucuacgugcuggggcucgcggccaucaugcagcuguucuucagcuacuucgccgugcacuucaucuccaacagcuggcugauguggcugaucaucaaccucguccagauggcccccaucuccgcgauggugcgcauguacaucuucuucgccagcuucuacuacguguggaagagcuacguccacgugguggacggcugcaacuccagcaccugcaugaugugcuacaagcggaaccgcgccacgcgggucgagugcaccaccaucgugaacgggguccgccgguccuucuacguguacgccaacggcggcaagggguucugcaagcugcacaacuggaacugcgugaacugcgacaccuucugcgccggcagcacguucaucuccgacgaggucgcgcgcgaccugagccuccaguucaagcggcccaucaacccgaccgaccaguccagcuacaucguggacuccgugaccgucaagaacgggagcauccaccuguacuucgacaaggccggccagaagaccuacgagcgccacucccugagccacuucgugaaccucgacaaccugcgggccaacaacacgaaggggucccugcccaucaacgugaucgucuucgacggcaagagcaagugcgaggaguccagcgccaaguccgccagcguguacuacucccagcucaugugccagcccauccugcugcucgaccaggcgcuggugagcgacgucggcgacagcgccgagguggccgugaagauguucgacgccuacgucaacaccuucuccagcaccuucaacgugcccauggagaagcugaagacccucguggccacggcggaggccgagcuggccaagaacgucucccuggacaacgugcucagcaccuucaucuccgccgcgcgccagggguucguggacagcgacgucgagaccaaggacgugguggagugccugaagcugucccaccagagcgacaucgaggucaccggcgacuccugcaacaacuacaugcucacguacaacaagguggagaacaugaccccgcgggaccugggggccugcaucgacugcagcgcccgccacaucaacgcccagguggccaagucccacaacaucgcgcugaucuggaacgucaaggacuucaugagccucuccgagcagcugcggaagcagauccgcagcgccgccaagaagaacaaccugcccuucaagcucaccugcgccaccacgcgccagguggugaacgucgugaccaccaagaucgcccugaagggcgggugaggacuaguuauaagacugacuagcccgaugggccucccaacgggcccuccuccccuccuugcaccgagauuaauaaaaaaaaaaaaaaaaaaaaaaaaaaaaaaaaaaaaaaaaaaaaaaaaaaaaaaaaaaaaaaaaugcaucccccccccccccccccccccccccccccccaaaggcucuuuucagagccaccagaauu

SEQ ID NO: 21484 - RNA, 6058 nt, Artificial Sequence
  SARS-CoV-2__MT846005.1__non-structural protein 3 (NSP3) mRNA gc
aggagaaagcuuaccauggcccccaccaaggugaccuucggcgacgacacggucaucgaggugcagggguacaagagcgugaacaucaccuucgagcuggacgagcgcaucgacaagguccucaacgagaagugcuccgccuacaccguggagcugggcaccgaggugaacgaguucgcgugcgucguggccgacgccgugaucaagacgcugcagccggucagcgagcuccugaccccccuggggaucgaccucgacgagugguccauggccaccuacuaccuguucgacgagagcggcgaguucaagcuggccucccacauguacugcagcuucuacccccucgacgaggacgaggaggagggggacugcgaggaggaggaguucgagcccuccacccaguacgaguacggcacggaggacgacuaccagggcaagccgcuggaguucggggcgaccagcgccgcccugcagcccgaggaggagcaggaggaggacuggcucgacgacgacucccagcagaccgugggccagcaggacgggagcgaggacaaccagaccacgaccauccagaccaucguggagguccagccccagcuggagauggagcugacccccguggugcagacgaucgaggucaacuccuucagcggcuaccucaagcugaccgacaacguguacaucaagaacgccgacaucguggaggaggcgaagaaggucaagccgaccgugguggucaacgccgccaacguguaccugaagcacgggggcggcguggccggggcccucaacaaggcgaccaacaacgccaugcaggucgaguccgacgacuacaucgccacgaacggcccccugaagguggggggcagcugcguccuguccggccacaaccucgccaagcacuuccugcacgugguggggcccaacgucaacaagggcgaggacauccagcugcucaagagcgccuacgagaacuucaaccagcacgaggugcugcuggcgccccuccuguccgccgggaucuucggcgccgacccgauccacagccugcgggugugcgucgacaccgugcgcaccaacguguaccucgccgucuucgacaagaaccuguacgacaagcugguguccagcuuccucgagaugaagagcgagaagcagguggagcagaagaucgccgagauccccaaggaggaggucaagcccuucaucaccgaguccaagcccagcguggagcagcggaagcaggacgacaagaagaucaaggcgugcguggaggaggucacgaccacccuggaggagaccaaguuccugacggagaaccuccugcuguacaucgacaucaacgggaaccuccacccggacuccgccacccuggugagcgacaucgacaucaccuuccugaagaaggacgcccccuacaucgugggcgacgucgugcaggagggcgugcucaccgccgucgugauccccacgaagaaggccgggggcaccaccgagaugcuggcgaaggcccugcgcaaggugcccaccgacaacuacaucacgaccuacccggggcagggccucaacggguacaccgucgaggaggccaagaccgugcugaagaagugcaaguccgccuucuacauccugcccagcaucaucuccaacgagaagcaggagauccucggcaccgugagcuggaaccugcgggagaugcuggcgcacgccgaggagacgcgcaagcugaugcccgucugcguggagaccaaggccaucguguccaccauccagcggaaguacaagggcaucaagauccaggagggggucguggacuacggcgcccgcuucuacuucuacaccagcaagacgaccguggccucccucaucaacacccugaacgaccugaacgagacccucgucacgaugccccugggguacgugacccacggccugaaccucgaggaggcggcccgguacaugcgcagccugaaggugccggccaccgucuccgugagcucccccgacgccgugaccgccuacaacggguaccugacgagcuccagcaagacccccgaggagcacuucaucgagaccaucucccucgcgggcagcuacaaggacuggagcuacuccggccagagcacccagcuggggaucgaguuccugaagcggggcgacaaguccgucuacuacacgagcaaccccaccaccuuccaccucgacggggaggugaucaccuucgacaaccugaagacgcugcucucccugcgcgaggugcggaccaucaaggucuucaccaccguggacaacaucaaccugcacacgcagguggucgacaugagcaugaccuacggccagcaguucggcccgaccuaccucgacggggccgacgugaccaagaucaagccccacaacucccacgagggcaagacguucuacgugcugcccaacgacgacacccugcgcgucgaggccuucgaguacuaccacaccaccgacccgagcuuccucgggcgguacauguccgcccugaaccacacgaagaaguggaaguacccccaggugaacggccugaccagcaucaagugggccgacaacaacugcuaccucgcgaccgcccugcugacccuccagcagaucgagcugaaguucaacccccccgcccugcaggacgccuacuaccgcgcgcgggccggggaggccgccaacuucugcgcccucauccuggcguacugcaacaagacggugggcgagcugggcgacguccgcgagaccauguccuaccucuuccagcacgccaaccuggacagcugcaagcgggugcugaacgucgugugcaagaccugcgggcagcagcagaccacccucaagggcguggaggccgucauguacauggggacgcuguccuacgagcaguucaagaagggcgugcagaucccgugcaccugcgggaagcaggccaccaaguaccuggugcagcaggagagccccuucgucaugauguccgccccccccgcgcaguacgagcucaagcacggcaccuucacgugcgccagcgaguacaccggcaacuaccagugcgggcacuacaagcacaucaccuccaaggagacccuguacugcaucgacggcgcccugcucacgaagagcagcgaguacaaggggccgaucaccgacguguucuacaaggagaacuccuacaccaccacgaucaagcccgugaccuacaagcuggacggcgucgugugcaccgagaucgaccccaagcuggacaacuacuacaagaaggacaacagcuacuucaccgagcagcccaucgaccucgugccgaaccagcccuaccccaacgccuccuucgacaacuucaaguucgucugcgacaacaucaaguucgccgacgaccugaaccagcugacgggguacaagaagcccgcgagccgcgagcucaaggugaccuucuucccggaccugaacggcgacguggucgccaucgacuacaagcacuacacccccuccuucaagaagggcgccaagcugcuccacaagcccaucguguggcacgugaacaacgccaccaacaaggcgacguacaagcccaacaccuggugcauccggugccuguggagcaccaagccggucgagaccuccaacagcuucgacgugcugaaguccgaggacgcccaggggauggacaaccucgccugcgaggaccugaagcccgugagcgaggaggucguggagaaccccacgauccagaaggacgugcuggagugcaacgucaagaccaccgagguggugggcgacaucauccucaagcccgccaacaacucccugaagaucaccgaggaggucgggcacacggaccugauggccgcguacguggacaacagcucccucaccaucaagaagccgaacgagcugagccgcgugcugggccucaagacccuggccacccacgggcuggccgccgucaacuccgugcccugggacacgaucgccaacuacgcgaagcccuuccucaacaagguggucagcaccaccaccaacaucgugacgcgcugccugaaccgggugugcaccaacuacaugccguacuucuucacccugcuccugcagcugugcaccuucacccgcuccacgaacagccggaucaaggccuccaugcccaccaccaucgccaagaacaccgucaagagcgugggcaaguucugccucgaggccagcuucaacuaccugaagucccccaacuucagcaagcugaucaacaucaucaucugguuccuccugcuguccgugugccucggcagccugaucuacuccacggccgcgcuggggguccucaugagcaaccugggcaugcccuccuacugcaccggguaccgcgagggcuaccugaacagcaccaacgugaccaucgccacguacugcaccggcuccaucccgugcagcgugugccucuccgggcuggacagccuggacaccuaccccucccucgagaccauccagaucacgaucagcuccuucaagugggaccugaccgccuucggccuggucgccgagugguuccucgccuacauccuguucacccgguucuucuacgugcuggggcucgcggccaucaugcagcuguucuucagcuacuucgccgugcacuucaucuccaacagcuggcugauguggcugaucaucaaccucguccagauggcccccaucuccgcgauggugcgcauguacaucuucuucgccagcuucuacuacguguggaagagcuacguccacgugguggacggcugcaacuccagcaccugcaugaugugcuacaagcggaaccgcgccacgcgggucgagugcaccaccaucgugaacgggguccgccgguccuucuacguguacgccaacggcggcaagggguucugcaagcugcacaacuggaacugcgugaacugcgacaccuucugcgccggcagcacguucaucuccgacgaggucgcgcgcgaccugagccuccaguucaagcggcccaucaacccgaccgaccaguccagcuacaucguggacuccgugaccgucaagaacgggagcauccaccuguacuucgacaaggccggccagaagaccuacgagcgccacucccugagccacuucgugaaccucgacaaccugcgggccaacaacacgaaggggucccugcccaucaacgugaucgucuucgacggcaagagcaagugcgaggaguccagcgccaaguccgccagcguguacuacucccagcucaugugccagcccauccugcugcucgaccaggcgcuggugagcgacgucggcgacagcgccgagguggccgugaagauguucgacgccuacgucaacaccuucuccagcaccuucaacgugcccauggagaagcugaagacccucguggccacggcggaggccgagcuggccaagaacgucucccuggacaacgugcucagcaccuucaucuccgccgcgcgccagggguucguggacagcgacgucgagaccaaggacgugguggagugccugaagcugucccaccagagcgacaucgaggucaccggcgacuccugcaacaacuacaugcucacguacaacaagguggagaacaugaccccgcgggaccugggggccugcaucgacugcagcgcccgccacaucaacgcccagguggccaagucccacaacaucgcgcugaucuggaacgucaaggacuucaugagccucuccgagcagcugcggaagcagauccgcagcgccgccaagaagaacaaccugcccuucaagcucaccugcgccaccacgcgccagguggugaacgucgugaccaccaagaucgcccugaagggcgggugaggacuaguuauaagacugacuagcccgaugggccucccaacgggcccuccuccccuccuugcaccgagauuaauaaaaaaaaaaaaaaaaaaaaaaaaaaaaaaaaaaaaaaaaaaaaaaaaaaaaaaaaaaaaaaaaugcaucccccccccccccccccccccccccccccccaaaggcucuuuucagagccaccagaauu

SEQ ID NO: 21485 - RNA, 6058 nt, Artificial Sequence
  SARS-CoV-2__MT846006.1__non-structural protein 3 (NSP3) mRNA gc
aggagaaagcuuaccauggcccccaccaaggugaccuucggcgacgacacggucaucgaggugcagggguacaagagcgugaacaucaccuucgagcuggacgagcgcaucgacaagguccucaacgagaagugcuccgccuacaccguggagcugggcaccgaggugaacgaguucgcgugcgucguggccgacgccgugaucaagacgcugcagccggucagcgagcuccugaccccccuggggaucgaccucgacgagugguccauggccaccuacuaccuguucgacgagagcggcgaguucaagcuggccucccacauguacugcagcuucuacccccccgacgaggacgaggaggagggggacugcgaggaggaggaguucgagccguccacccaguacgaguacggcacggaggacgacuaccagggcaagccccucgaguucggggcgaccagcgccgcccugcagcccgaggaggagcaggaggaggacuggcuggacgacgacucccagcagaccgugggccagcaggacgggagcgaggacaaccagaccacgaccauccagaccaucguggagguccagccccagcucgagauggagcugaccccgguggugcagacgaucgaggucaacuccuucagcggcuaccugaagcucaccgacaacguguacaucaagaacgccgacaucguggaggaggcgaagaaggucaagcccaccgugguggucaacgccgccaacguguaccugaagcacgggggcggcguggccggggcccugaacaaggcgaccaacaacgccaugcaggucgaguccgacgacuacaucgccacgaacggcccccucaagguggggggcagcugcguccuguccggccacaaccuggccaagcacugccuccacgugguggggcccaacgucaacaagggcgaggacauccagcugcugaagagcgccuacgagaacuucaaccagcacgaggugcuccuggcgccgcugcucuccgccgggaucuucggcgccgaccccauccacagccugcgggugugcgucgacaccgugcgcaccaacguguaccuggccgucuucgacaagaaccucuacgacaagcugguguccagcuuccuggagaugaagagcgagaagcagguggagcagaagaucgccgagauccccaaggaggaggucaagcccuucaucaccgaguccaagccgagcguggagcagcggaagcaggacgacaagaagaucaaggcgugcguggaggaggucacgaccacccucgaggagaccaaguuccugacggagaaccugcuccuguacaucgacaucaacgggaaccugcaccccgacuccgccacccucgugagcgacaucgacaucaccuuccugaagaaggacgcccccuacaucgugggcgacgucgugcaggagggcgugcugaccgccgucgugauccccacgaagaaggccgggggcaccaccgagaugcucgcgaaggcccugcgcaaggugccgaccgacaacuacaucacgaccuaccccgggcagggccugaacggguacaccgucgaggaggccaagaccgugcucaagaagugcaaguccgccuucuacauccugcccagcaucaucuccaacgagaagcaggagauccugggcaccgugagcuggaaccuccgggagaugcuggcgcacgccgaggagacgcgcaagcugaugcccgucugcguggagaccaaggccaucguguccaccauccagcggaaguacaagggcaucaagauccaggagggggucguggacuacggcgcccgcuucuacuucuacaccagcaagacgaccguggccucccugaucaacacccucaacgaccugaacgagacccuggucacgaugccgcucggguacgugacccacggccugaaccuggaggaggcggcccgguacaugcgcagccucaaggugcccgccaccgucuccgugagcucccccgacgccgugaccgccuacaacggguaccugacgagcuccagcaagacccccgaggagcacuucaucgagaccaucucccuggcgggcagcuacaaggacuggagcuacuccggccagagcacccagcucgggaucgaguuccugaagcggggcgacaaguccgucuacuacacgagcaacccgaccaccuuccaccuggacggggaggugaucaccuucgacaaccucaagacgcugcugucccuccgcgaggugcggaccaucaaggucuucaccaccguggacaacaucaaccugcacacgcagguggucgacaugagcaugaccuacggccagcaguucggccccaccuaccuggacggggccgacgugaccaagaucaagccccacaacucccacgagggcaagacguucuacgugcucccgaacgacgacacccugcgcgucgaggccuucgaguacuaccacaccaccgaccccagcuuccuggggcgguacauguccgcccucaaccacacgaagaaguggaaguacccccaggugaacggccugaccagcaucaagugggccgacaacaacugcuaccuggcgaccgcccuccugacccugcagcagaucgagcucaaguucaaccccccggcccugcaggacgccuacuaccgcgcgcgggccggggaggccgccaacuucugcgcccugauccucgcguacugcaacaagacggugggcgagcugggcgacguccgcgagaccauguccuaccuguuccagcacgccaaccucgacagcugcaagcgggugcugaacgucgugugcaagaccugcgggcagcagcagaccacccugaagggcguggaggccgucauguacauggggacgcucuccuacgagcaguucaagaagggcgugcagauccccugcaccugcgggaagcaggccaccaaguaccuggugcagcaggagagccccuucgucaugauguccgcccccccggcgcaguacgagcugaagcacggcaccuucacgugcgccagcgaguacaccggcaacuaccagugcgggcacuacaagcacaucaccuccaaggagacccucuacugcaucgacggcgcccugcugacgaagagcagcgaguacaaggggcccaucaccgacguguucuacaaggagaacuccuacaccaccacgaucaagcccgugaccuacaagcucgacggcgucgugugcaccgagaucgaccccaagcuggacaacuacuacaagaaggacaacagcuacuucaccgagcagccgaucgaccuggugcccaaccagcccuaccccaacgccuccuucgacaacuucaaguucgucugcgacaacaucaaguucgccgacgaccucaaccagcugacgggguacaagaagccggcgagccgcgagcugaaggugaccuucuuccccgaccucaacggcgacguggucgccaucgacuacaagcacuacacccccuccuucaagaagggcgccaagcugcugcacaagcccaucguguggcacgugaacaacgccaccaacaaggcgacguacaagccgaacaccuggugcauccggugccucuggagcaccaagcccgucgagaccuccaacagcuucgacgugcugaaguccgaggacgcccaggggauggacaaccuggccugcgaggaccucaagcccgugagcgaggaggucguggagaaccccacgauccagaaggacgugcuggagugcaacgucaagaccaccgagguggugggcgacaucauccugaagccggccaacaacucccucaagaucaccgaggaggucgggcacacggaccugauggccgcguacguggacaacagcucccugaccaucaagaagcccaacgagcucagccgcgugcugggccugaagacccucgccacccacgggcuggccgccgucaacuccgugcccugggacacgaucgccaacuacgcgaagccguuccugaacaagguggucagcaccaccaccaacaucgugacgcgcugccucaaccgggugugcaccaacuacaugcccuacuucuucacccugcugcuccagcugugcaccuucacccgcuccacgaacagccggaucaaggccuccaugcccaccaccaucgccaagaacaccgucaagagcgugggcaaguucugccuggaggccagcuucaacuaccucaagucccccaacuucagcaagcugaucaacaucaucaucugguuccugcuccuguccgugugccugggcagccucaucuacuccacggccgcgcuggggguccugaugagcaaccucggcaugccguccuacugcaccggguaccgcgagggcuaccugaacagcaccaacgugaccaucgccacguacugcaccggcuccauccccugcagcgugugccuguccgggcucgacagccuggacaccuaccccucccuggagaccauccagaucacgaucagcuccuucaagugggaccucaccgccuucggccuggucgccgagugguuccuggccuacauccucuucacccgguucuucuacgugcuggggcuggcggccaucaugcagcucuucuucagcuacuucgccgugcacuucaucuccaacagcuggcugauguggcugaucaucaaccugguccagauggcccccaucuccgcgauggugcgcauguacaucuucuucgccagcuucuacuacguguggaagagcuacguccacgugguggacggcugcaacuccagcaccugcaugaugugcuacaagcggaaccgcgccacgcgggucgagugcaccaccaucgugaacgggguccgccgguccuucuacguguacgccaacggcggcaagggguucugcaagcuccacaacuggaacugcgugaacugcgacaccuucugcgccggcagcacguucaucuccgacgaggucgcgcgcgaccugagccugcaguucaagcggccgaucaaccccaccgaccaguccagcuacaucguggacuccgugaccgucaagaacgggagcauccaccucuacuucgacaaggccggccagaagaccuacgagcgccacucccugagccacuucgugaaccuggacaaccuccgggccaacaacacgaaggggucccugcccaucaacgugaucgucuucgacggcaagagcaagugcgaggaguccagcgccaaguccgccagcguguacuacucccagcugaugugccagcccauccuccugcuggaccaggcgcucgugagcgacgucggcgacagcgccgagguggccgugaagauguucgacgccuacgucaacaccuucuccagcaccuucaacgugccgauggagaagcugaagacccugguggccacggcggaggccgagcucgccaagaacgucucccuggacaacgugcugagcaccuucaucuccgccgcgcgccagggguucguggacagcgacgucgagaccaaggacgugguggagugccucaagcugucccaccagagcgacaucgaggucaccggcgacuccugcaacaacuacaugcugacguacaacaagguggagaacaugaccccccgggaccucggggccugcaucgacugcagcgcccgccacaucaacgcccagguggccaagucccacaacaucgcgcugaucuggaacgucaaggacuucaugagccuguccgagcagcuccggaagcagauccgcagcgccgccaagaagaacaaccugcccuucaagcugaccugcgccaccacgcgccagguggugaacgucgugaccaccaagguggcccucaagggcgggugaggacuaguuauaagacugacuagcccgaugggccucccaacgggcccuccuccccuccuugcaccgagauuaauaaaaaaaaaaaaaaaaaaaaaaaaaaaaaaaaaaaaaaaaaaaaaaaaaaaaaaaaaaaaaaaaugcaucccccccccccccccccccccccccccccccaaaggcucuuuucagagccaccagaauu

SEQ ID NO: 21486 - RNA, 6058 nt, Artificial Sequence
  SARS-CoV-2__MT846012.1__non-structural protein 3 (NSP3) mRNA gc
aggagaaagcuuaccauggcccccaccaaggugaccuucggcgacgacacggucaucgaggugcagggguacaagagcgugaacaucaccuucgagcuggacgagcgcaucgacaagguccucaacgagaagugcuccgccuacaccguggagcugggcaccgaggugaacgaguucgcgugcgucguggccgacgccgugaucaagacgcugcagccggucagcgagcuccugaccccccuggggaucgaccucgacgagugguccauggccaccuacuaccuguucgacgagagcggcgaguucaagcuggccucccacauguacugcagcuucuacccccccgacgaggacgaggaggagggggacugcgaggaggaggaguucgagccguccacccaguacgaguacggcacggaggacgacuaccagggcaagccccucgaguucggggcgaccagcgccgcccugcagcuggaggaggagcaggaggaggacuggcucgacgacgacucccagcagaccgugggccagcaggacgggagcgaggacaaccacaccacgaccauccagaccaucguggagguccagccccagcuggagauggagcugacccccguggugcagacgaucgaggucaacuccuucagcggcuaccucaagcugaccgacaacguguacaucaagaacgccgacaucguggaggaggcgaagaaggucaagccgaccgugguggucaacgccgccaacguguaccugaagcacgggggcggcguggccggggcccucaacaaggcgaccaacaacgccaugcaggucgaguccgacgacuacaucgccacgaacggcccccugaagguggggggcagcugcguccuguccggccacaaccucgccaagcacugccugcacgugguggggcccaacgucaacaagggcgaggacauccagcugcucaagagcgccuacgagaacuucaaccagcacgaggugcugcuggcgccccuccuguccgccgggaucuucggcgccgacccgauccacagccugcgggugugcgucgacaccgugcgcaccaacguguaccucgccgucuucgacaagaaccuguacgacaagcugguguccagcuuccucgagaugaagagcgagaagcagguggagcagaagaucgccgagauccccaaggaggaggucaagcccuucaucaccgaguccaagcccagcguggagcagcggaagcaggacgacaagaagaucaaggcgugcguggaggaggucacgaccacccuggaggagaccaaguuccugacggagaaccuccugcuguacaucgacaucaacgggaaccuccacccggacuccgccacccuggugagcgacaucgacaucaccuuccugaagaaggacgcccccuacaucgugggcgacgucgugcaggagggcgugcucaccgccgucgugauccccacgaagaaggccgggggcaccaccgagaugcuggcgaaggcccugcgcaaggugcccaccgacaacuacaucacgaccuacccggggcagggccucaacggguacaccgucgaggaggccaagaccgugcugaagaagugcaaguccgccuucuacauccugcccagcaucaucuccaacgagaagcaggagauccucggcaccgugagcuggaaccugcgggagaugcuggcgcacgccgaggagacgcgcaagcugaugcccgucugcguggagaccaaggccaucguguccaccauccagcggaaguacaagggcaucaagauccaggagggggucguggacuacggcgcccgcuucuacuucuacaccagcaagacgaccguggccucccucaucaacacccugaacgaccugaacgagacccucgucacgaugccccugggguacgugacccacggccugaaccucgaggaggcggcccgguacaugcgcagccugaaggugccggccaccgucuccgugagcucccccgacgccgugaccgccuacaacggguaccugacgagcuccagcaagacccccgaggagcacuucaucgagaccaucucccucgcgggcagcuacaaggacuggagcuacuccggccagagcacccagcuggggaucgaguuccugaagcggggcgacaaguccgucuacuacacgagcaaccccaccaccuuccaccucgacggggaggugaucaccuucgacaaccugaagacgcugcucucccugcgcgaggugcggaccaucaaggucuucaccaccguggacaacaucaaccugcacacgcagguggucgacaugagcaugaccuacggccagcaguucggcccgaccuaccucgacggggccgacgugaccaagaucaagccccacaacucccacgagggcaagacguucuacgugcugcccaacgacgacacccugcgcgucgaggccuucgaguacuaccacaccaccgacccgagcuuccucgggcgguacauguccgcccugaaccacacgaagaaguggaaguacccccaggugaacggccugaccagcaucaagugggccgacaacaacugcuaccucgcgaccgcccugcugacccuccagcagaucgagcugaaguucaacccccccgcccugcaggacgccuacuaccgcgcgcgggccggggaggccgccaacuucugcgcccucauccuggcguacugcaacaagacggugggcgagcugggcgacguccgcgagaccauguccuaccucuuccagcacgccaaccuggacagcugcaagcgggugcugaacgucgugugcaagaccugcgggcagcagcagaccacccucaagggcguggaggccgucauguacauggggacgcuguccuacgagcaguucaagaagggcgugcagaucccgugcaccugcgggaagcaggccaccaaguaccuggugcagcaggagagccccuucgucaugauguccgccccccccgcgcaguacgagcucaagcacggcaccuucacgugcgccagcgaguacaccggcaacuaccagugcgggcacuacaagcacaucaccuccaaggagacccuguacugcaucgacggcgcccugcucacgaagagcagcgaguacaaggggccgaucaccgacguguucuacaaggagaacuccuacaccaccacgaucaagcccgugaccuacaagcuggacggcgucgugugcaccgagaucgaccccaagcuggacaacuacuacaagaaggacaacagcuacuucaccgagcagcccaucgaccucgugccgaaccagcccuaccccaacgccuccuucgacaacuucaaguucgucugcgacaacaucaaguucgccgacgaccugaaccagcugacgggguacaagaagcccgcgagccgcgagcucaaggugaccuucuucccggaccugaacggcgacguggucgccaucgacuacaagcacuacacccccuccuucaagaagggcgccaagcugcuccacaagcccaucguguggcacgugaacaacgccaccaacaaggcgacguacaagcccaacaccuggugcauccggugccuguggagcaccaagccggucgagaccuccaacagcuucgacgugcugaaguccgaggacgcccaggggauggacaaccucgccugcgaggaccugaagcccgugagcgaggaggucguggagaaccccacgauccagaaggacgugcuggagugcaacgucaagaccaccgagguggugggcgacaucauccucaagcccgccaacaacucccugaagaucaccgaggaggucgggcacacggaccugauggccgcguacguggacaacagcucccucaccaucaagaagccgaacgagcugagccgcgugcugggccucaagacccuggccacccacgggcuggccgccgucaacuccgugcccugggacacgaucgccaacuacgcgaagcccuuccucaacaagguggucagcaccaccaccaacaucgugacgcgcugccugaaccgggugugcaccaacuacaugccguacuucuucacccugcuccugcagcugugcaccuucacccgcuccacgaacagccggaucaaggccuccaugcccaccaccaucgccaagaacaccgucaagagcgugggcaaguucugccucgaggccagcuucaacuaccugaagucccccaacuucagcaagcugaucaacaucaucaucugguuccuccugcuguccgugugccucggcagccugaucuacuccacggccgcgcuggggguccucaugagcaaccugggcaugcccuccuacugcaccggguaccgcgagggcuaccugaacagcaccaacgugaccaucgccacguacugcaccggcuccaucccgugcagcgugugccucuccgggcuggacagccuggacaccuaccccucccucgagaccauccagaucacgaucagcuccuucaagugggaccugaccgccuucggccuggucgccgagugguuccucgccuacauccuguucacccgguucuucuacgugcuggggcucgcggccaucaugcagcuguucuucagcuacuucgccgugcacuucaucuccaacagcuggcugauguggcugaucaucaaccucguccagauggcccccaucuccgcgauggugcgcauguacaucuucuucgccagcuucuacuacguguggaagagcuacguccacgugguggacggcugcaacuccagcaccugcaugaugugcuacaagcggaaccgcgccacgcgggucgagugcaccaccaucgugaacgggguccgccgguccuucuacguguacgccaacggcggcaagggguucugcaagcugcacaacuggaacugcgugaacugcgacaccuucugcgccggcagcacguucaucuccgacgaggucgcgcgcgaccugagccuccaguucaagcggcccaucaacccgaccgaccaguccagcuacaucguggacuccgugaccgucaagaacgggagcauccaccuguacuucgacaaggccggccagaagaccuacgagcgccacucccugagccacuucgugaaccucgacaaccugcgggccaacaacacgaaggggucccugcccaucaacgugaucgucuucgacggcaagagcaagugcgaggaguccagcgccaaguccgccagcguguacuacucccagcucaugugccagcccauccugcugcucgaccaggcgcuggugagcgacgucggcgacagcgccgagguggccgugaagauguucgacgccuacgucaacaccuucuccagcaccuucaacgugcccauggagaagcugaagacccucguggccacggcggaggccgagcuggccaagaacgucucccuggacaacgugcucagcaccuucaucuccgccgcgcgccagggguucguggacagcgacgucgagaccaaggacgugguggagugccugaagcugucccaccagagcgacaucgaggucaccggcgacuccugcaacaacuacaugcucacguacaacaagguggagaacaugaccccgcgggaccugggggccugcaucgacugcagcgcccgccacaucaacgcccagguggccaagucccacaacaucgcgcugaucuggaacgucaaggacuucaugagccucuccgagcagcugcggaagcagauccgcagcgccgccaagaagaacaaccugcccuucaagcucaccugcgccaccacgcgccagguggugaacgucgugaccaccaagaucgcccugaagggcgggugaggacuaguuauaagacugacuagcccgaugggccucccaacgggcccuccuccccuccuugcaccgagauuaauaaaaaaaaaaaaaaaaaaaaaaaaaaaaaaaaaaaaaaaaaaaaaaaaaaaaaaaaaaaaaaaaugcaucccccccccccccccccccccccccccccccaaaggcucuuuucagagccaccagaauu

SEQ ID NO: 21487 - RNA, 6058 nt, Artificial Sequence
  SARS-CoV-2__MT846413.1__non-structural protein 3 (NSP3) mRNA gc
aggagaaagcuuaccauggcccccaccaaggugaccuucggcgacgacacggucaucgaggugcagggguacaagagcgugaacaucaccuucgagcuggacgagcgcaucgacaagguccucaacgagaagugcuccgccuacaccguggagcugggcaccgaggugaacgaguucgcgugcgucguggccgacgccgugaucaagacgcugcagccggucagcgagcuccugaccccccuggggaucgaccucgacgagugguccauggccaccuacuaccuguucgacgagagcggcgaguucaagcuggccucccacauguacugcagcuucuacccccccgacgaggacgaggaggagggggacugcgaggaggaggaguucgagccguccacccaguacgaguacggcacggaggacgacuaccagggcaagccccucgaguucggggcgaccagcgccgcccugcagcccgaggaggagcaggaggaggacuggcuggacgacgacucccagcagaccgugggccagcaggacgggagcgaggacaaccagaccacgaccauccagaccaucguggagguccagccccagcucgagauggagcugaccccgguggugcagacgaucgaggucaacuccuucagcggcuaccugaagcucaccgacaacguguacaucaagaacgccgacaucguggaggaggcgaagaaggucaagcccaccgugguggucaacgccgccaacguguaccugaagcacgggggcggcguggccggggcccugaacaaggcgaccaacaacgccaugcaggucgaguccgacgacuacaucgccacgaacggcccccucaagguggggggcagcugcguccuguccggccacaaccuggccaagcacugccuccacgugguggggcccaacgucaacaagggcgaggacauccagcugcugaagagcgccuacgagaacuucaaccagcacgaggugcuccuggcgccgcugcucuccgccgggaucuucggcgccgaccccauccacagccugcgggugugcgucgacaccgugcgcaccaacguguaccuggccgucuucgacaagaaccucuacgacaagcugguguccagcuuccuggagaugaagagcgagaagcagguggagcagaagaucgccgagauccccaaggaggaggucaagcccuucaucaccgaguccaagccgagcguggagcagcggaagcaggacgacaagaagaucaaggcgugcguggaggaggucacgaccacccucgaggagaccaaguuccugacggagaaccugcuccuguacaucgacaucaacgggaaccugcaccccgacuccgccacccucgugagcgacaucgacaucaccuuccugaagaaggacgcccccuacaucgccggcgacgugguccaggagggcgugcugaccgccguggucauccccacgaagaaggcggggggcaccaccgagaugcucgccaaggcccugcgcaaggugccgaccgacaacuacaucacgaccuaccccgggcagggccugaacggguacaccguggaggaggccaagaccguccucaagaagugcaaguccgcguucuacauccugcccagcaucaucuccaacgagaagcaggagauccugggcaccgugagcuggaaccuccgggagaugcuggcccacgccgaggagacgcgcaagcugaugcccgugugcgucgagaccaaggccaucguguccaccauccagcggaaguacaagggcaucaagauccaggaggggguggucgacuacggcgcccgcuucuacuucuacaccagcaagacgaccguggcgucccugaucaacacccucaacgaccugaacgagacccuggugacgaugccgcucggguacgucacccacggccugaaccuggaggaggccgcccgguacaugcgcagccucaaggugcccgccaccguguccgucagcucccccgacgccgugaccgcguacaacggguaccugacgagcuccagcaagacccccgaggagcacuucaucgagaccaucucccuggccggcagcuacaaggacuggagcuacuccggccagagcacccagcucgggaucgaguuccugaagcggggcgacaaguccguguacuacacgagcaacccgaccaccuuccaccuggacggggaggucaucaccuucgacaaccucaagacgcugcugucccuccgcgaggugcggaccaucaagguguucaccaccgucgacaacaucaaccugcacacgcaggugguggacaugagcaugaccuacggccagcaguucggccccaccuaccuggacggggccgacgucaccaagaucaagccccacaacucccacgagggcaagacguucuacgugcucccgaacgacgacacccugcgcguggaggccuucgaguacuaccacaccaccgaccccagcuuccuggggcgguacauguccgcccucaaccacacgaagaaguggaaguacccccaggucaacggccugaccagcaucaagugggcggacaacaacugcuaccuggccaccgcccuccugacccugcagcagaucgagcucaaguucaaccccccggcccugcaggacgcguacuaccgcgcccgggccggggaggccgccaacuucugcgcgcugauccucgccuacugcaacaagacggugggcgagcugggcgacgugcgcgagaccauguccuaccuguuccagcacgccaaccucgacagcugcaagcggguccugaacguggucugcaagaccugcgggcagcagcagaccacccugaagggcguggaggccgugauguacauggggacgcucuccuacgagcaguucaagaagggcguccagauccccugcaccugcgggaagcaggccaccaaguaccuggugcagcaggagagccccuucgugaugauguccgcgcccccggcccaguacgagcugaagcacggcaccuucacgugcgccagcgaguacaccggcaacuaccagugcgggcacuacaagcacaucaccuccaaggagacccucuacugcaucgacggcgcccugcugacgaagagcagcgaguacaaggggcccaucaccgacgucuucuacaaggagaacuccuacaccaccacgaucaagcccgugaccuacaagcucgacggcguggucugcaccgagaucgaccccaagcuggacaacuacuacaagaaggacaacagcuacuucaccgagcagccgaucgaccuggugcccaaccagcccuaccccaacgccuccuucgacaacuucaaguucgugugcgacaacaucaaguucgcggacgaccucaaccagcugacgggguacaagaagccggccagccgcgagcugaaggucaccuucuuccccgaccucaacggcgacgugguggccaucgacuacaagcacuacacccccuccuucaagaagggcgccaagcugcugcacaagcccaucgucuggcacgugaacaacgcgaccaacaaggccacguacaagccgaacaccuggugcauccggugccucuggagcaccaagcccguggagaccuccaacagcuucgacguccugaaguccgaggacgcccaggggauggacaaccuggccugcgaggaccucaagcccgugagcgaggagguggucgagaaccccacgauccagaaggacgugcuggagugcaacgugaagaccaccgaggucgugggcgacaucauccugaagccggccaacaacucccucaagaucaccgaggagguggggcacacggaccugauggcggccuacgucgacaacagcucccugaccaucaagaagcccaacgagcucagccgcgugcugggccugaagacccucgccacccacgggcuggccgccgugaacuccguccccugggacacgaucgcgaacuacgccaagccguuccugaacaagguggugagcaccaccaccaacaucgucacgcgcugccucaaccgggugugcaccaacuacaugcccuacuucuucacccugcugcuccagcugugcaccuucacccgcuccacgaacagccggaucaaggccuccaugcccaccaccaucgccaagaacaccgugaagagcgucggcaaguucugccuggaggccagcuucaacuaccucaagucccccaacuucagcaagcugaucaacaucaucaucugguuccugcuccuguccgugugccugggcagccucaucuacuccacggcggcccugggggugcugaugagcaaccucggcaugccguccuacugcaccggguaccgcgagggcuaccugaacagcaccaacgucaccaucgccacguacugcaccggcuccauccccugcagcgugugccuguccgggcucgacagccuggacaccuaccccucccuggagaccauccagaucacgaucagcuccuucaagugggaccucaccgccuucggccugguggccgagugguuccuggcguacauccucuucacccgguucuucuacguccuggggcuggccgccaucaugcagcucuucuucagcuacuucgccgugcacuucaucuccaacagcuggcugauguggcugaucaucaaccuggugcagauggcgcccaucuccgccaugguccgcauguacaucuucuucgccagcuucuacuacguguggaagagcuacgugcacgucguggacggcugcaacuccagcaccugcaugaugugcuacaagcggaaccgcgccacgcggguggagugcaccaccaucgucaacggggugcgccgguccuucuacgucuacgccaacggcggcaagggguucugcaagcuccacaacuggaacugcgugaacugcgacaccuucugcgcgggcagcacguucaucuccgacgagguggcccgcgaccugagccugcaguucaagcggccgaucaaccccaccgaccaguccagcuacaucgucgacuccgugaccgugaagaacgggagcauccaccucuacuucgacaaggccggccagaagaccuacgagcgccacucccugagccacuucgucaaccuggacaaccuccgggccaacaacacgaaggggucccugcccaucaacgugaucguguucgacggcaagagcaagugcgaggaguccagcgccaaguccgcgagcgucuacuacucccagcugaugugccagcccauccuccugcuggaccaggcccucgugagcgacgugggcgacagcgccgaggucgccgugaagauguucgacgccuacgugaacaccuucuccagcaccuucaacgucccgauggagaagcugaagacccugguggcgacggccgaggccgagcucgccaagaacgugucccuggacaacguccugagcaccuucaucuccgcggcccgccagggguucguggacagcgacguggagaccaaggacgucguggagugccucaagcugucccaccagagcgacaucgaggugaccggcgacuccugcaacaacuacaugcugacguacaacaaggucgagaacaugaccccccgggaccucggggccugcaucgacugcagcgcccgccacaucaacgcccagguggcgaagucccacaacaucgcccugaucuggaacgugaaggacuucaugagccuguccgagcagcuccggaagcagauccgcagcgccgccaagaagaacaaccugcccuucaagcugaccugcgccaccacgcgccaggucgugaacguggucaccaccaagaucgcgcucaagggcgggugaggacuaguuauaagacugacuagcccgaugggccucccaacgggcccuccuccccuccuugcaccgagauuaauaaaaaaaaaaaaaaaaaaaaaaaaaaaaaaaaaaaaaaaaaaaaaaaaaaaaaaaaaaaaaaaaugcaucccccccccccccccccccccccccccccccaaaggcucuuuucagagccaccagaauu

SEQ ID NO: 21488 - RNA, 6058 nt, Artificial Sequence
  SARS-CoV-2__MT846428.1__non-structural protein 3 (NSP3) mRNA gc
aggagaaagcuuaccauggcccccaccaaggugaccuucggcgacgacacggucaucgaggugcagggguacaagagcgugaacaucaccuucgagcuggacgagcgcaucgacaagguccucaacgagaagugcuccgccuacaccguggagcugggcaccgaggugaacgaguucgcgugcgucguggccgacgccgugaucaagacgcugcagccggucagcgagcuccugaccccccuggggaucgaccucgacgagugguccauggccaccuacuaccuguucgacgagagcggcgaguucaagcuggccucccacauguacugcagcuucuacccccccgacgaggacgaggaggagggggacugcgaggaggaggaguucgagccguccacccaguacgaguacggcacggaggacgacuaccagggcaagccccucgaguucggggcgaccagcgccgcccugcagcccgaggaggagcaggaggaggacuggcuggacgacgacucccagcagaccgugggccagcaggacgggagcgaggacaaccagaccacgaccauccagaccaucguggagguccagccccagcucgagauggagcugaccccgguggugcagacgaucgaggucaacuccuucagcggcuaccugaagcucaccgacaacguguacaucaagaacgccgacaucguggaggaggcgaagaaggucaagcccaccgugguggucaacgccgccaacguguaccugaagcacgggggcggcguggccggggcccugaacaaggcgaccaacaacgccaugcaggucgaguccgacgacuacaucgccacgaacggcccccucaagguggggggcagcugcguccuguccggccacaaccuggccaagcacugccuccacgugguggggcccaacgucaacaagggcgaggacauccagcugcugaagagcgccuacgagaacuucaaccagcacgaggugcuccuggcgccgcugcucuccgccgggaucuucggcgccgaccccauccacagccugcgggugugcgucgacaccgugcgcaccaacguguaccuggccgucuucgacaagaaccucuacgacaagcugguguccagcuuccuggagaugaagagcgagaagcagguggagcagaagaucgccgagauccccaaggaggaggucaagcccuucaucaccgaguccaagccgagcguggagcagcggaagcaggacgacaagaagaucaaggcgugcguggaggaggucacgaccacccucgaggagaccaaguuccugacggagaaccugcuccuguacaucgacaucaacgggaaccugcaccccgacuccgccacccucgugagcgacaucgacaucaccuuccugaagaaggacgcccccuacaucgugggcgacgucgugcaggagggcgugcugaccgccgucgugauccccacgaagaaggccgggggcaccaccgagaugcucgcgaaggcccugcgcaaggugccgaccgacaacuacaucacgaccuaccccgggcagggccugaacggguacaccgucgaggaggccaagaccgugcucaagaagugcaaguccgccuucuacauccugcccagcaucaucuccaacgagaagcaggagauccugggcaccgugagcuggaaccuccgggagaugcuggcgcacgccgaggagacgcgcaagcugaugcccgucugcguggagaccaaggccaucguguccaccauccagcggaaguacaagggcaucaagauccaggagggggucguggacuacggcgcccgcuucuacuucuacaccagcaagacgaccguggccucccugaucaacacccucaacgaccugaacgagacccuggucacgaugccgcucggguacgugacccacggccugaaccuggaggaggcggcccgguacaugcgcagccucaaggugcccgccaccgucuccgugagcucccccgacgccgugaccgccuacaacggguaccugacgagcuccagcaagacccccgaggagcacuucaucgagaccaucucccuggcgggcagcuacaaggacuggagcuacuccggccagagcacccagcucgggaucgaguuccugaagcggggcgacaaguccgucuacuacacgagcaacccgaccaccuuccaccuggacggggaggugaucaccuucgacaaccucaagacgcugcugucccuccgcgaggugcggaccaucaaggucuucaccaccguggacaacaucaaccugcacacgcagguggucgacaugagcaugaccuacggccagcaguucggccccaccuaccuggacggggccgacgugaccaagaucaagccccacaacucccacgagggcaagacguucuacgugcucccgaacgacgacacccugcgcgucgaggccuucgaguacuaccacaccaccgaccccagcuuccuggggcgguacauguccgcccucaaccacacgaagaaguggaaguacccccaggugaacggccugaccagcaucaagugggccgacaacaacugcuaccuggcgaccgcccuccugacccugcagcagaucgagcucaaguucaaccccccggcccugcaggacgccuacuaccgcgcgcgggccggggaggccgccaacuucugcgcccugauccucgcguacugcaacaagacggugggcgagcugggcgacguccgcgagaccauguccuaccuguuccagcacgccaaccucgacagcugcaagcgggugcugaacgucgugugcaagaccugcgggcagcagcagaccacccugaagggcguggaggccgucauguacauggggacgcucuccuacgagcaguucaagaagggcgugcagauccccugcaccugcgggaagcaggccaccaaguaccuggugcagcaggagagccccuucgucaugauguccgcccccccggcgcaguacgagcugaagcacggcaccuucacgugcgccagcgaguacaccggcaacuaccagugcgggcacuacaagcacaucaccuccaaggagacccucuacugcaucgacggcgcccugcugacgaagagcagcgaguacaaggggcccaucaccgacguguucuacaaggagaacuccuacaccaccacgaucaagcccgugaccuacaagcucgacggcgucgugugcaccgagaucgaccccaagcuggacaacuacuacaagaaggacaacagcuacuucaccgagcagccgaucgaccuggugcccaaccagcccuaccccaacgccuccuucgacaacuucaaguucgucugcgacaacaucaaguucgccgacgaccucaaccagcugacgggguacaagaagccggcgagccgcgagcugaaggugaccuucuuccccgaccucaacggcgacguggucgccaucgacuacaagcacuacacccccuccuucaagaagggcgccaagcugcugcacaagcccaucguguggcacgugaacaacgccaccaacaaggcgacguacaagccgaacaccuggugcacccggugccucuggagcaccaagcccgucgagacguccaacagcuucgacgugcugaaguccgaggacgcccaggggauggacaaccuggccugcgaggaccucaagcccgugagcgaggaggucguggagaaccccaccauccagaaggacgugcuggagugcaacgucaagaccaccgagguggugggcgacaucauccugaagccggccaacaacucccucaagaucacggaggaggucgggcacaccgaccugauggccgcguacguggacaacagcucccugaccaucaagaagcccaacgagcucagccgcgugcugggccugaagacccucgccacgcacgggcuggccgccgucaacuccgugcccugggacaccaucgccaacuacgcgaagccguuccugaacaagguggucagcaccaccacgaacaucgugacccgcugccucaaccgggugugcaccaacuacaugcccuacuucuucacccugcugcuccagcugugcaccuucacgcgcuccaccaacagccggaucaaggccuccaugcccaccaccaucgccaagaacacggucaagagcgugggcaaguucugccuggaggccagcuucaacuaccucaagucccccaacuucagcaagcugaucaacaucaucaucugguuccugcuccuguccgugugccugggcagccucaucuacuccaccgccgcgcuggggguccugaugagcaaccucggcaugccguccuacugcaccggguaccgcgagggcuaccugaacagcaccaacgugacgaucgccaccuacugcaccggcuccauccccugcagcgugugccuguccgggcucgacagccuggacaccuaccccucccuggagacgauccagaucaccaucagcuccuucaagugggaccucaccgccuucggccuggucgccgagugguuccuggccuacauccucuucacccgguucuucuacgugcuggggcuggcggccaucaugcagcucuucuucagcuacuucgccgugcacuucaucuccaacagcuggcugauguggcugaucaucaaccugguccagauggcccccaucuccgcgauggugcgcauguacaucuucuucgccagcuucuacuacguguggaagagcuacguccacgugguggacggcugcaacuccagcacgugcaugaugugcuacaagcggaaccgcgccacccgggucgagugcaccaccaucgugaacgggguccgccgguccuucuacguguacgccaacggcggcaagggguucugcaagcuccacaacuggaacugcgugaacugcgacacguucugcgccggcagcaccuucaucuccgacgaggucgcgcgcgaccugagccugcaguucaagcggccgaucaaccccaccgaccaguccagcuacaucguggacuccgugaccgucaagaacgggagcauccaccucuacuucgacaaggccggccagaagacguacgagcgccacucccugagccacuucgugaaccuggacaaccuccgggccaacaacaccaaggggucccugcccaucaacgugaucgucuucgacggcaagagcaagugcgaggaguccagcgccaaguccgccagcguguacuacucccagcugaugugccagcccauccuccugcuggaccaggcgcucgugagcgacgucggcgacagcgccgagguggccgugaagauguucgacgccuacgucaacaccuucuccagcaccuucaacgugccgauggagaagcugaagacgcugguggccaccgcggaggccgagcucgccaagaacgucucccuggacaacgugcugagcaccuucaucuccgccgcgcgccagggguucguggacagcgacgucgagaccaaggacgugguggagugccucaagcugucccaccagagcgacaucgaggucacgggcgacuccugcaacaacuacaugcugaccuacaacaagguggagaacaugaccccccgggaccucggggccugcaucgacugcagcgcccgccacaucaacgcccagguggccaagucccacaacaucgcgcugaucuggaacgucaaggacuucaugagccuguccgagcagcuccggaagcagauccgcagcgccgccaagaagaacaaccugcccuucaagcugaccugcgccacgacccgccagguggugaacgucgugaccaccaagaucgcccucaagggcgggugaggacuaguuauaagacugacuagcccgaugggccucccaacgggcccuccuccccuccuugcaccgagauuaauaaaaaaaaaaaaaaaaaaaaaaaaaaaaaaaaaaaaaaaaaaaaaaaaaaaaaaaaaaaaaaaaugcaucccccccccccccccccccccccccccccccaaaggcucuuuucagagccaccagaauu

SEQ ID NO: 21489 - RNA, 6058 nt, Artificial Sequence
  SARS-CoV-2__MT846430.1__non-structural protein 3 (NSP3) mRNA gc
aggagaaagcuuaccauggcccccaccaaggugaccuucggcgacgacacggucaucgaggugcagggguacaagagcgugaacaucaccuucgagcuggacgagcgcaucgacaagguccucaacgagaagugcuccgccuacaccguggagcugggcaccgaggugaacgaguucgcgugcgucguggccgacgccgugaucaagacgcugcagccggucagcgagcuccugaccccccuggggaucgaccucgacgagugguccauggccaccuacuaccuguucgacgagagcggcgaguucaagcuggccucccacauguacugcagcuucuacccccccgacgaggacgaggaggagggggacugcgaggaggaggaguucgagccguccacccaguacgaguacggcacggaggacgacuaccagggcaagccccucgaguucggggcgaccagcgccgcccugcagcccgaggaggagcaggaggaggacuggcuggacgacgacucccagcagaccgugggccagcaggacgggagcgaggacaaccagaccacgaccauccagaccaucguggagguccagccccagcucgagauggagcugaccccgguggugcagacgaucgaggucaacuccuucagcggcuaccugaagcucaccgacaacguguacaucaagaacgccgacaucguggaggaggcgaagaaggucaagcccaccgugguggucaacgccgccaacguguaccugaagcacgggggcggcguggccggggcccugaacaaggcgaccaacaacgccaugcaggucgaguccgacgacuacaucgccacgaacggcccccucaagguggggggcagcugcguccuguccggccacaaccuggccaagcacugccuccacgugguggggcccaacgucaacaagggcgaggacauccagcugcugaagagcgccuacgagaacuucaaccagcacgaggugcuccuggcgccgcugcucuccgccgggaucuucggcgccgaccccauccacagccugcgggugugcgucgacaccgugcgcaccaacguguaccuggccgucuucgacaagaaccucuacgacaagcugguguccagcuuccuggagaugaagagcgagaagcagguggagcagaagaucgccgagauccccaaggaggaggucaagcccuucaucaccgaguccaagccgagcguggagcagcggaagcaggacgacaagaagaucaaggcgugcguggaggaggucacgaccacccucgaggagaucaaguuccugaccgagaaccugcuccuguacaucgacaucaacgggaaccugcaccccgacuccgccacgcucgugagcgacaucgacaucaccuuccugaagaaggacgcccccuacaucgugggcgacgucgugcaggagggcgugcugaccgccgucgugauccccaccaagaaggccgggggcacgaccgagaugcucgcgaaggcccugcgcaaggugccgaccgacaacuacaucaccacguaccccgggcagggccugaacggguacaccgucgaggaggccaagaccgugcucaagaagugcaaguccgccuucuacauccugcccagcaucaucuccaacgagaagcaggagauccugggcaccgugagcuggaaccuccgggagaugcuggcgcacgccgaggagacccgcaagcugaugcccgucugcguggagacgaaggccaucguguccaccauccagcggaaguacaagggcaucaagauccaggagggggucguggacuacggcgcccgcuucuacuucuacaccagcaagaccacgguggccucccugaucaacacccucaacgaccugaacgagacccuggucaccaugccgcucggguacgugacgcacggccugaaccuggaggaggcggcccgguacaugcgcagccucaaggugcccgccaccgucuccgugagcucccccgacgccgugaccgccuacaacggguaccugaccagcuccagcaagacgcccgaggagcacuucaucgagaccaucucccuggcgggcagcuacaaggacuggagcuacuccggccagagcacccagcucgggaucgaguuccugaagcggggcgacaaguccgucuacuacaccagcaacccgacgaccuuccaccuggacggggaggugaucaccuucgacaaccucaagacccugcugucccuccgcgaggugcggacgaucaaggucuucaccaccguggacaacaucaaccugcacacccagguggucgacaugagcaugacguacggccagcaguucggccccaccuaccuggacggggccgacgugaccaagaucaagccccacaacucccacgagggcaagaccuucuacgugcucccgaacgacgacacgcugcgcgucgaggccuucgaguacuaccacaccaccgaccccagcuuccuggggcgguacauguccgcccucaaccacaccaagaaguggaaguacccccaggugaacggccugacgagcaucaagugggccgacaacaacugcuaccuggcgaccgcccuccugacccugcagcagaucgagcucaaguucaaccccccggcccugcaggacgccuacuaccgcgcgcgggccggggaggccgccaacuucugcgcccugauccucgcguacugcaacaagaccgugggcgagcugggcgacguccgcgagacgauguccuaccuguuccagcacgccaaccucgacagcugcaagcgggugcugaacgucgugugcaagaccugcgggcagcagcagaccacccugaagggcguggaggccgucauguacauggggacccucuccuacgagcaguucaagaagggcgugcagauccccugcacgugcgggaagcaggccaccaaguaccuggugcagcaggagagccccuucgucaugauguccgcccccccggcgcaguacgagcugaagcacggcaccuucaccugcgccagcgaguacacgggcaacuaccagugcgggcacuacaagcacaucaccuccaaggagacccucuacugcaucgacggcgcccugcugaccaagagcagcgaguacaaggggcccaucacggacguguucuacaaggagaacuccuacaccaccaccaucaagcccgugacguacaagcucgacggcgucgugugcaccgagaucgaccccaagcuggacaacuacuacaagaaggacaacagcuacuucaccgagcagccgaucgaccuggugcccaaccagcccuaccccaacgccuccuucgacaacuucaaguucgucugcgacaacaucaaguucgccgacgaccucaaccagcugaccggguacaagaagccggcgagccgcgagcugaaggugacguucuuccccgaccucaacggcgacguggucgccaucgacuacaagcacuacacccccuccuucaagaagggcgccaagcugcugcacaagcccaucguguggcacgugaacaacgccaccaacaaggcgaccuacaagccgaacacguggugcauccggugccucuggagcaccaagcccgucgagaccuccaacagcuucgacgugcugaaguccgaggacgcccaggggauggacaaccuggccugcgaggaccucaagcccgugagcgaggaggucguggagaaccccaccauccagaaggacgugcuggagugcaacgucaagacgaccgagguggugggcgacaucauccugaagccggccaacaacucccucaagaucaccgaggaggucgggcacaucgaccugauggccgcguacguggacaacagcucccugaccaucaagaagcccaacgagcucagccgcgugcugggccugaagacgcucgccacccacgggcuggccgccgucaacuccgugcccugggacaccaucgccaacuacgcgaagccguuccugaacaagguggucagcaccacgaccaacaucgugacccgcugccucaaccgggugugcaccaacuacaugcccuacuucuucacgcugcugcuccagcugugcaccuucacccgcuccaccaacagccggaucaaggccuccaugcccaccacgaucgccaagaacaccgucaagagcgugggcaaguucugccuggaggccagcuucaacuaccucaagucccccaacuucagcaagcugaucaacaucaucaucugguuccugcuccuguccgugugccugggcagccucaucuacuccaccgccgcgcuggggguccugaugagcaaccucggcaugccguccuacugcaccggguaccgcgagggcuaccugaacagcacgaacgugaccaucgccaccuacugcaccggcuccauccccugcagcgugugccuguccgggcucgacagccuggacacguaccccucccuggagaccauccagaucaccaucagcuccuucaagugggaccucaccgccuucggccuggucgccgagugguuccuggccuacauccucuucacgcgguucuucuacgugcuggggcuggcggccaucaugcagcucuucuucagcuacuucgccgugcacuucaucuccaacagcuggcugauguggcugaucaucaaccugguccagauggcccccaucuccgcgauggugcgcauguacaucuucuucgccagcuucuacuacguguggaagagcuacguccacgugguggacggcugcaacuccagcaccugcaugaugugcuacaagcggaaccgcgccacccgggucgagugcaccacgaucgugaacgggguccgccgguccuucuacguguacgccaacggcggcaagggguucugcaagcuccacaacuggaacugcgugaacugcgacaccuucugcgccggcagcaccuucaucuccgacgaggucgcgcgcgaccugagccugcaguucaagcggccgaucaaccccaccgaccaguccagcuacaucguggacuccgugacggucaagaacgggagcauccaccucuacuucgacaaggccggccagaagaccuacgagcgccacucccugagccacuucgugaaccuggacaaccuccgggccaacaacaccaaggggucccugcccaucaacgugaucgucuucgacggcaagagcaagugcgaggaguccagcgccaaguccgccagcguguacuacucccagcugaugugccagcccauccuccugcuggaccaggcgcucgugagcgacgucggcgacagcgccgagguggccgugaagauguucgacgccuacgucaacaccuucuccagcacguucaacgugccgauggagaagcugaagacccugguggccaccgcggaggccgagcucgccaagaacgucucccuggacaacgugcugagcaccuucaucuccgccgcgcgccagggguucguggacagcgacgucgagacgaaggacgugguggagugccucaagcugucccaccagagcgacaucgaggucaccggcgacuccugcaacaacuacaugcugaccuacaacaagguggagaacaugaccccccgggaccucggggccugcaucgacugcagcgcccgccacaucaacgcccagguggccaagucccacaacaucgcgcugaucuggaacgucaaggacuucaugagccuguccgagcagcuccggaagcagauccgcagcgccgccaagaagaacaaccugcccuucaagcugacgugcgccaccacccgccagguggugaacgucgugaccacgaagaucgcccucaagggcgggugaggacuaguuauaagacugacuagcccgaugggccucccaacgggcccuccuccccuccuugcaccgagauuaauaaaaaaaaaaaaaaaaaaaaaaaaaaaaaaaaaaaaaaaaaaaaaaaaaaaaaaaaaaaaaaaaugcaucccccccccccccccccccccccccccccccaaaggcucuuuucagagccaccagaauu

SEQ ID NO: 21490 - RNA, 6058 nt, Artificial Sequence
  SARS-CoV-2__MT846469.1__non-structural protein 3 (NSP3) mRNA gc
aggagaaagcuuaccauggcccccaccaaggugaccuucggcgacgacacggucaucgaggugcagggguacaagagcgugaacaucaccuucgagcuggacgagcgcaucgacaagguccucaacgagaagugcuccgccuacaccguggagcugggcaccgaggugaacgaguucgcgugcgucguggccgacgccgugaucaagacgcugcagccggucagcgagcuccugaccccccuggggaucgaccucgacgagugguccauggccaccuacuaccuguucgacgagagcggcgaguucaagcuggccucccacauguacugcagcuucuacccccccgacgaggacgaggaggagggggacugcgaggaggaggaguucgagccguccacccaguacgaguacggcacggaggacgacuaccagggcaagccccucgaguucggggcgaccagcgccgcccugcagcccgaggaggagcaggaggaggacuggcuggacgacgacucccagcagaccgugggccagcaggacgggagcgaggacaaccagaccacgaccauccagaccaucguggagguccagccccagcucgagauggagcugaccccgguggugcagacgaucgaggucaacuccuucagcggcuaccugaagcucaccgacaacguguacaucaagaacgccgacaucguggaggaggcgaagaaggucaagcccaccgugguggucaacgccgccaacguguaccugaagcacgggggcggcguggccggggcccugaacaaggcgaccaacaacgccaugcaggucgaguccgacgacuacaucgccacgaacggcccccucaagguggggggcagcugcguccuguccggccacaaccuggccaagcacugccuccacgugguggggcccaacgucaacaagggcgaggacauccagcugcugaagagcgccuacgagaacuucaaccagcacgaggugcuccuggcgccgcugcucuccgccgggaucuucggcgccgaccccauccacagccugcgggugugcgucgacaccgugcgcaccaacguguaccuggccgucuucgacaagaaccucuacgacaagcugguguccagcuuccuggagaugaagagcgagaagcagguggagcagaagaucgccgagauccccaaggaggaggucaagcccuucaucaccgaguccaagccgagcguggagcagcggaagcaggacgacaagaagaucaaggcgugcguggaggaggucacgaccacccucgaggagaccaaguuccugacggagaaccugcuccuguacaucgacaucaacgggaaccugcaccccgacuccgccacccucgugagcgacaucgacaucaccuuccugaagaaggacgcccccuacaucgugggcgacgucgugcaggagggcgugcugaccgccgucgugauccccacgaagaaggccgggggcaccaccgagaugcucgcgaaggcccugcgcaaggugccgaccgacaacuacaucacgaccuaccccgggcagggccugaacggguacaccgucgaggaggccaagaccgugcucaagaagugcaaguccgccuucuacauccugcccagcaucaucuccaacgagaagcaggagauccugggcaccgugagcuggucccuccgggagaugcuggcgcacgccgaggagacgcgcaagcugaugcccgucugcguggagaccaaggccaucgugagcaccauccagcggaaguacaagggcaucaagauccaggagggggucguggacuacggcgcccgcuucuacuucuacaccuccaagacgaccguggccagccugaucaacacccucaacgaccugaacgagacccuggucacgaugccgcucggguacgugacccacggccugaaccuggaggaggcggcccgguacaugcgcucccucaaggugcccgccaccgucagcguguccagccccgacgccgugaccgccuacaacggguaccugacguccagcuccaagacccccgaggagcacuucaucgagaccaucagccuggcgggcagcuacaaggacugguccuacagcggccaguccacccagcucgggaucgaguuccugaagcggggcgacaagagcgucuacuacacguccaacccgaccaccuuccaccuggacggggaggugaucaccuucgacaaccucaagacgcugcugagccuccgcgaggugcggaccaucaaggucuucaccaccguggacaacaucaaccugcacacgcagguggucgacauguccaugaccuacggccagcaguucggccccaccuaccuggacggggccgacgugaccaagaucaagccccacaacagccacgagggcaagacguucuacgugcucccgaacgacgacacccugcgcgucgaggccuucgaguacuaccacaccaccgaccccuccuuccuggggcgguacaugagcgcccucaaccacacgaagaaguggaaguacccccaggugaacggccugaccuccaucaagugggccgacaacaacugcuaccuggcgaccgcccuccugacccugcagcagaucgagcucaaguucaaccccccggcccugcaggacgccuacuaccgcgcgcgggccggggaggccgccaacuucugcgcccugauccucgcguacugcaacaagacggugggcgagcugggcgacguccgcgagaccaugagcuaccuguuccagcacgccaaccucgacuccugcaagcgggugcugaacgucgugugcaagaccugcgggcagcagcagaccacccugaagggcguggaggccgucauguacauggggacgcucagcuacgagcaguucaagaagggcgugcagauccccugcaccugcgggaagcaggccaccaaguaccuggugcagcaggagucccccuucgucaugaugagcgcccccccggcgcaguacgagcugaagcacggcaccuucacgugcgccuccgaguacaccggcaacuaccagugcgggcacuacaagcacaucaccagcaaggagacccucuacugcaucgacggcgcccugcugacgaagagcuccgaguacaaggggcccaucaccgacguguucuacaaggagaacagcuacaccaccacgaucaagcccgugaccuacaagcucgacggcgucgugugcaccgagaucgaccccaagcuggacaacuacuacaagaaggacaacuccuacuucaccgagcagccgaucgaccuggugcccaaccagcccuaccccaacgccagcuucgacaacuucaaguucgucugcgacaacaucaaguucgccgacgaccucaaccagcugacgggguacaagaagccggcgucccgcgagcugaaggugaccuucuuccccgaccucaacggcgacguggucgccaucgacuacaagcacuacacccccagcuucaagaagggcgccaagcugcugcacaagcccaucguguggcacgugaacaacgccaccaacaaggcgacguacaagccgaacaccuggugcauccggugccucugguccaccaagcccgucgagaccagcaacuccuucgacgugcugaagagcgaggacgcccaggggauggacaaccuggccugcgaggaccucaagcccguguccgaggaggucguggagaaccccacgauccagaaggacgugcuggagugcaacgucaagaccaccgagguggugggcgacaucauccugaagccggccaacaacagccucaagaucaccgaggaggucgggcacacggaccugauggccgcguacguggacaacuccagccugaccaucaagaagcccaacgagcucucccgcgugcugggccugaagacccucgccacccacgggcuggccgccgucaacagcgugcccugggacacgaucgccaacuacgcgaagccguuccugaacaagguggucuccaccaccaccaacaucgugacgcgcugccucaaccgggugugcaccaacuacaugcccuacuucuucacccugcugcuccagcugugcaccuucacccgcagcacgaacucccggaucaaggccagcaugcccaccaccaucgccaagaacaccgucaagagcgugggcaaguucugccuggaggccuccuucaacuaccucaagagccccaacuucuccaagcugaucaacaucaucaucugguuccugcuccugagcgugugccugggcucccucaucuacagcacggccgcgcuggggguccugauguccaaccucggcaugccgagcuacugcaccggguaccgcgagggcuaccugaacuccaccaacgugaccaucgccacguacugcaucggcagcauccccugcuccgugugccugagcgggcucgacucccuggacaccuaccccagccuggagaccauccagaucaccaucuccagcuucaagugggaccucacggccuucggccuggucgccgagugguuccuggccuacauccucuucacccgguucuucuacgugcuggggcuggcggccaucaugcagcucuucuucuccuacuucgccgugcacuucaucagcaacuccuggcugauguggcugaucaucaaccugguccagauggcccccaucagcgcgauggugcgcauguacaucuucuucgccagcuucuacuacguguggaaguccuacguccacgugguggacggcugcaacagcuccaccugcaugaugugcuacaagcggaaccgcgccacccgggucgagugcacgaccaucgugaacgggguccgccggagcuucuacguguacgccaacggcggcaagggguucugcaagcuccacaacuggaacugcgugaacugcgacaccuucugcgccggcuccaccuucaucagcgacgaggucgcgcgcgaccugucccugcaguucaagcggccgaucaaccccacggaccagagcuccuacaucguggacagcgugaccgucaagaacggguccauccaccucuacuucgacaaggccggccagaagaccuacgagcgccacagccugucccacuucgugaaccuggacaaccuccgggccaacaacaccaaggggagccugcccaucaacgugaucgucuucgacggcaaguccaagugcgaggagagcuccgccaagagcgccuccguguacuacagccagcugaugugccagcccauccuccugcuggaccaggcgcucgugagcgacgucggcgacuccgccgagguggccgugaagauguucgacgccuacgucaacacguucagcuccaccuucaacgugccgauggagaagcugaagacccugguggccaccgcggaggccgagcucgccaagaacgucagccuggacaacgugcuguccacguucaucagcgccgcgcgccagggguucguggacuccgacgucgagaccaaggacgugguggagugccucaagcugagccaccaguccgacaucgaggucaccggcgacagcugcaacaacuacaugcugaccuacaacaagguggagaacaugacgccccgggaccucggggccugcaucgacugcuccgcccgccacaucaacgcccagguggccaagagccacaacaucgcgcugaucuggaacgucaaggacuucaugucccugagcgagcagcuccggaagcagauccgcuccgccgccaagaagaacaaccugcccuucaagcugaccugcgccaccacccgccagguggugaacgucgugacgaccaagaucgcccucaagggcgggugaggacuaguuauaagacugacuagcccgaugggccucccaacgggcccuccuccccuccuugcaccgagauuaauaaaaaaaaaaaaaaaaaaaaaaaaaaaaaaaaaaaaaaaaaaaaaaaaaaaaaaaaaaaaaaaaugcaucccccccccccccccccccccccccccccccaaaggcucuuuucagagccaccagaauu

SEQ ID NO: 21491 - RNA, 6058 nt, Artificial Sequence
  SARS-CoV-2__MT846483.1__non-structural protein 3 (NSP3) mRNA gc
aggagaaagcuuaccauggcccccaccaaggugaccuucggcgacgacacggucaucgaggugcagggguacaagagcgugaacaucaccuucgagcuggacgagcgcaucgacaagguccucaacgagaagugcuccgccuacaccguggagcugggcaccgaggugaacgaguucgcgugcgucguggccgacgccgugaucaagacgcugcagccggucagcgagcuccugaccccccuggggaucgaccucgacgagugguccauggccaccuacuaccuguucgacgagagcggcgaguucaagcuggccucccacauguacugcagcuucuacccccccgacgaggacgaggaggagggggacugcgaggaggaggaguucgagccguccacccaguacgaguacggcacggaggacgacuaccagggcaagccccucgaguucggggcgaccagcgccgcccugcagcccgaggaggagcaggaggaggacuggcuggacgacgacucccagcagaccgugggccagcaggacgggagcgaggacaaccagaccacgaccauccagaccaucguggagguccagccccagcucgagauggagcugaccccgguggugcagacgaucgaggucaacuccuucagcggcuaccugaagcucaccgacaacguguacaucaagaacgccgacaucguggaggaggucaagaaggugaagcccaccguggucgugaacgcggccaacguguaccugaagcacgggggcggcgucgccggggcccugaacaaggccaccaacaacgcgaugcagguggaguccgacgacuacaucgccacgaacggcccccucaaggucgggggcagcugcgugcuguccggccacaaccuggccaagcacugccuccacguggucgggcccaacgugaacaagggcgaggacauccagcugcugaagagcgccuacgagaacuucaaccagcacgaggugcuccuggccccgcugcucuccgcggggaucuucggcgccgaccccauccacagccugcgggucugcguggacaccgugcgcaccaacgucuaccuggccguguucgacaagaaccucuacgacaagcugguguccagcuuccuggagaugaagagcgagaagcaggucgagcagaagaucgccgagauccccaaggaggaggugaagcccuucaucaccgaguccaagccgagcguggagcagcggaagcaggacgacaagaagaucaaggccugcgucgaggaggugacgaccacccucgaggagaccaaguuccugacggagaaccugcuccuguacaucgacaucaacgggaaccugcaccccgacuccgcgacccucgugagcgacaucgacaucaccuuccugaagaaggacgcccccuacaucgucggcgacguggugcaggagggcguccugaccgccguggugauccccacgaagaaggccgggggcaccaccgagaugcucgccaaggcgcugcgcaaggucccgaccgacaacuacaucacgaccuaccccgggcagggccugaacggguacaccguggaggaggccaagaccgugcucaagaagugcaaguccgccuucuacauccugcccagcaucaucuccaacgagaagcaggagauccugggcaccgucagcuggaaccuccgggagaugcuggcccacgcggaggagacgcgcaagcugaugcccgugugcguggagaccaaggccaucgucuccaccauccagcggaaguacaagggcaucaagauccaggagggggugguggacuacggcgcccgcuucuacuucuacaccagcaagacgaccgucgccucccugaucaacacccucaacgaccugaacgagacccuggugacgaugccgcucggguacgugacccacggccugaaccuggaggaggccgcgcgguacaugcgcagccucaagguccccgccaccguguccgugagcucccccgacgccgucaccgccuacaacggguaccugacgagcuccagcaagacccccgaggagcacuucaucgagaccaucucccuggccggcagcuacaaggacuggagcuacuccggccagagcacccagcucgggaucgaguuccugaagcggggcgacaaguccguguacuacacgagcaacccgaccaccuuccaccuggacggggaggugaucaccuucgacaaccucaagacgcugcugucccuccgcgagguccggaccaucaagguguucaccaccguggacaacaucaaccugcacacgcaggucguggacaugagcaugaccuacggccagcaguucggccccaccuaccuggacggggcggacgugaccaagaucaagccccacaacucccacgagggcaagacguucuacguccucccgaacgacgacacccugcgcguggaggccuucgaguacuaccacaccaccgaccccagcuuccuggggcgguacauguccgcccucaaccacacgaagaaguggaaguacccccaggugaacggccugaccagcaucaagugggccgacaacaacugcuaccuggccaccgcgcuccugacccugcagcagaucgagcucaaguucaaccccccggcccugcaggacgccuacuaccgcgcccgggcgggggaggccgccaacuucugcgcccugauccucgccuacugcaacaagacggucggcgagcugggcgacgugcgcgagaccauguccuaccuguuccagcacgcgaaccucgacagcugcaagcggguccugaacguggugugcaagaccugcgggcagcagcagaucacccugaagggcgucgaggccgugauguacauggggacccucuccuacgagcaguucaagaagggcgugcagauccccugcacgugcgggaagcaggccaccaaguaccugguccagcaggagagccccuucgugaugauguccgcccccccggcccaguacgagcugaagcacggcaccuucaccugcgcgagcgaguacacgggcaacuaccagugcgggcacuacaagcacaucaccuccaaggagacccucuacugcaucgacggcgcccugcugaccaagagcagcgaguacaaggggcccaucacggacguguucuacaaggagaacuccuacaccaccaccaucaagcccgucacguacaagcucgacggcguggugugcaccgagaucgaccccaagcuggacaacuacuacaagaaggacaacagcuacuucaccgagcagccgaucgaccugguccccaaccagcccuaccccaacgccuccuucgacaacuucaaguucgugugcgacaacaucaaguucgccgacgaccucaaccagcugaccggguacaagaagccggccagccgcgagcugaaggugacguucuuccccgaccucaacggcgacgucguggcgaucgacuacaagcacuacacccccuccuucaagaagggcgccaagcugcugcacaagcccaucguguggcacgucaacaacgccaccaacaaggccaccuacaagccgaacacguggugcauccggugccucuggagcaccaagcccguggagaccuccaacagcuucgacgugcugaaguccgaggacgcgcaggggauggacaaccuggccugcgaggaccucaagcccgucagcgaggaggugguggagaaccccaccauccagaaggacguccuggagugcaacgugaagacgaccgagguggucggcgacaucauccugaagccggccaacaacucccucaagaucaccgaggagguggggcacaccgaccugauggccgccuacguggacaacagcucccugacgaucaagaagcccaacgagcucagccgcguccugggccugaagacccucgcgacccacgggcuggccgccgugaacuccgugcccugggacaccaucgccaacuacgccaagccguuccugaacaaggucgugagcacgaccaccaacaucgugacccgcugccucaaccgggucugcacgaacuacaugcccuacuucuucacccugcugcuccagcugugcaccuucacccgcuccaccaacagccggaucaaggcguccaugcccacgaccaucgccaagaacaccgugaagagcgugggcaaguucugccuggaggccagcuucaacuaccucaagucccccaacuucagcaagcugaucaacaucaucaucugguuccugcuccuguccgucugccugggcagccucaucuacuccaccgccgcccugggggugcugaugagcaaccucggcaugccguccuacugcacgggguaccgcgagggcuaccugaacagcaccaacgugaccaucgcgaccuacugcacgggcuccauccccugcagcgucugccuguccgggcucgacagccuggacaccuaccccucccuggagaccauccagaucaccaucagcuccuucaagugggaccucacggccuucggccugguggccgagugguuccuggccuacauccucuucacccgguucuucuacgugcuggggcuggccgcgaucaugcagcucuucuucagcuacuucgccguccacuucaucuccaacagcuggcugauguggcugaucaucaaccuggugcagauggcccccaucuccgccauggugcgcauguacaucuucuucgcgagcuucuacuacgucuggaagagcuacgugcacguggucgacggcugcaacuccagcaccugcaugaugugcuacaagcggaaccgcgccacccggguggagugcacgaccaucgucaacggggugcgccgguccuucuacguguacgccaacggcggcaagggguucugcaagcuccacaacuggaacugcgucaacugcgacaccuucugcgccggcagcaccuucaucuccgacgagguggcccgcgaccugagccugcaguucaagcggccgaucaaccccacggaccaguccagcuacaucguggacuccgucaccgugaagaacgggagcauccaccucuacuucgacaaggcgggccagaagaccuacgagcgccacucccugagccacuucgugaaccuggacaaccuccgggccaacaacaccaaggggucccugcccaucaacgucaucguguucgacggcaagagcaagugcgaggaguccagcgccaaguccgccagcguguacuacucccagcugaugugccagcccauccuccugcuggaccaggcccucgucagcgacgugggcgacagcgcggagguggccgucaagauguucgacgccuacgugaacacguucuccagcaccuucaacgugccgauggagaagcugaagacccuggucgccaccgccgaggcggagcucgccaagaacgugucccuggacaacgugcugagcacguucaucuccgccgcccgccagggguucgucgacagcgacguggagaccaaggacguggucgagugccucaagcugucccaccagagcgacaucgaggugaccggcgacuccugcaacaacuacaugcugaccuacaacaagguggagaacaugacgccccgggaccucggggcgugcaucgacugcagcgcccgccacaucaacgcccaggucgccaagucccacaacaucgcccugaucuggaacgugaaggacuucaugagccuguccgagcagcuccggaagcagauccgcagcgcggccaagaagaacaaccugcccuucaagcugaccugcgccaccacccgccagguggucaacguggugacgaccaagaucgcccucaagggcgggugaggacuaguuauaagacugacuagcccgaugggccucccaacgggcccuccuccccuccuugcaccgagauuaauaaaaaaaaaaaaaaaaaaaaaaaaaaaaaaaaaaaaaaaaaaaaaaaaaaaaaaaaaaaaaaaaugcaucccccccccccccccccccccccccccccccaaaggcucuuuucagagccaccagaauu

SEQ ID NO: 21492 - RNA, 6058 nt, Artificial Sequence
  SARS-CoV-2__MT846505.1__non-structural protein 3 (NSP3) mRNA gc
aggagaaagcuuaccauggcccccaccaaggugaccuucggcgacgacacggucaucgaggugcagggguacaagagcgugaacaucaccuucgagcuggacgagcgcaucgacaagguccucaacgagaagugcuccgccuacaccguggagcugggcaccgaggugaacgaguucgcgugcgucguggccgacgccgugaucaagacgcugcagccggucagcgagcuccugaccccccuggggaucgaccucgacgagugguccauggccaccuacuaccuguucgacgagagcggcgaguucaagcuggccucccacauguacugcagcuucuacccccccgacgaggacgaggaggagggggacugcgaggaggaggaguucgagccguccacccaguacgaguacggcacggaggacgacuaccagggcaagccccucgaguucggggcgaccagcgccgcccugcagcccgaggaggagcaggaggaggacuggcuggacgacgacucccagcagaccgugggccagcaggacgggagcgaggacaaccagaccacgaccauccagaccaucguggagguccagccccagcucgagauggagcugaccccgguggugcagacgaucgaggucaacuccuucagcggcuaccugaagcucaccgacaacguguacaucaagaacgccgacaucguggaggaggcgaagaaggucaagcccaccgugguggucaacgccgccaacguguaccugaagcacgggggcggcguggccggggcccugaacaaggcgaccaacaacgccaugcaggucgaguccgacgacuacaucgccacgaacggcccccucaagguggggggcagcugcguccuguccggccacaaccuggccaagcacugccuccacgugguggggcccaacgucaacaagggcgaggacauccagcugcugaagagcgccuacgagaacuucaaccagcacgaggugcuccuggcgccgcugcucuccgccgggaucuucggcgccgaccccauccacagccugcgggugugcgucgacaccgugcgcaccaacguguaccuggccgucuucgacaagaaccucuacgacaagcugguguccagcuuccuggagaugaagagcgagaagcagguggagcagaagaucgccgagauccccaaggaggaggucaagcccuucaucaccgaguccaagccgagcguggagcagcggaagcaggacgacaagaagaucaaggcgugcguggaggaggucacgaccacccucgaggagaccaaguuccugacggagaaccugcuccuguacaucgacaucaacgggaaccugcaccccgacuccgccacccucgugagcgacaucgacaucaccuuccugaagaaggacgcccccuacaucgugggcgacgucgugcaggagggcgugcugaccgccgucgugauccccacgaagaaggccgggggcaccaccgagaugcucgcgaaggcccugcgcaaggugccgaccgacaacuacaucacgaccuaccccgggcagggccugaacggguacaccgucgaggaggccaagaccgugcucaagaagugcaaguccgccuucuacauccugcccagcaucaucuccaacgagaagcaggagauccugggcaccgugagcuggaaccuccgggagaugcuggcgcacgccgaggagacgcgcaagcugaugcccgucugcguggagaccaaggccaucguguccaccauccagcggaaguacaagggcaucaagauccaggagggggucguggacuacggcgcccgcuucuacuucuacaccagcaagacgaccguggccucccugaucaacacccucaacgaccugaacgagacccuggucacgaugccgcucggguacgugacccacggccugaaccuggaggaggcggcccgguacaugcgcagccucaaggugcccgccaccgucuccgugagcucccccgacgccgugaccgccuacaacggguaccugacgagcuccagcaagacccccgaggagcacuucaucgagaccaucucccuggcgggcagcuacaaggacuggagcuacuccggccagagcacccagcucgggaucgaguuccugaagcggggcgacaaguccgucuacuacacgagcaacccgaccaccuuccaccuggacggggaggugaucaccuucgacaaccucaagacgcugcugucccuccgcgaggugcggaccaucaaggucuucaccaccguggacaacaucaaccugcacacgcagguggucgacaugagcaugaccuacggccagcaguucggccccaccuaccuggacggggccgacgugaccaagaucaagccccacaacucccacgagggcaagacguucuacgugcucccgaacgacgacacccugcgcgucgaggccuucgaguacuaccacaccaccgaccccagcuuccuggggcgguacauguccgcccucaaccacacgaagaaguggaaguacccccaggugaacggccugaccagcaucaagugggccgacaacaacugcuaccuggcgaccgugcuccugacccugcagcagaucgagcucaaguucaaccccccggcccugcaggacgccuacuaccgcgcccgggcgggggaggccgccaacuucugcgcccugauccucgccuacugcaacaagacggucggcgagcugggcgacgugcgcgagaccauguccuaccuguuccagcacgcgaaccucgacagcugcaagcggguccugaacguggugugcaagaccugcgggcagcagcagaccacccugaagggcgucgaggccgugauguacauggggacgcucuccuacgagcaguucaagaagggcgugcagauccccugcaccugcgggaagcaggccaccaaguaccugguccagcaggagagccccuucgugaugauguccgcccccccggcccaguacgagcugaagcacggcaccuucacgugcgcgagcgaguacaccggcaacuaccagugcgggcacuacaagcacaucaccuccaaggagacccucuacugcaucgacggcgcccugcugacgaagagcagcgaguacaaggggcccaucaccgacguguucuacaaggagaacuccuacaccaccacgaucaagcccgucaccuacaagcucgacggcguggugugcaccgagaucgaccccaagcuggacaacuacuacaagaaggacaacagcuacuucaccgagcagccgaucgaccugguccccaaccagcccuaccccaacgccuccuucgacaacuucaaguucgugugcgacaacaucaaguucgccgacgaccucaaccagcugacgggguacaagaagccggccagccgcgagcugaaggugaccuucuuccccgaccucaacggcgacgucguggcgaucgacuacaagcacuacacccccuccuucaagaagggcgccaagcugcugcacaagcccaucguguggcacgucaacaacgccaccaacaaggccacguacaagccgaacaccuggugcauccggugccucuggagcaccaagcccguggagaccuccaacagcuucgacgugcugaaguccgaggacgcgcaggggauggacaaccuggccugcgaggaccucaagcccgucagcgaggaggugguggagaaccccacgauccagaaggacguccuggagugcaacgugaagaccaccgagguggucggcgacaucauccugaagccggccaacaacucccucaagaucaccgaggagguggggcacacggaccugauggccgccuacguggacaacagcucccugaccaucaagaagcccaacgagcucagccgcguccugggccugaagacccucgcgacccacgggcuggccgccgugaacuccgugcccugggacacgaucgccaacuacgccaagccguuccugaacaaggucgugagcaccaccaccaacaucgugacgcgcugccucaaccgggucugcaccaacuacaugcccuacuucuucacccugcugcuccagcugugcaccuucacccgcuccacgaacagccggaucaaggcguccaugcccaccaccaucgccaagaacaccgugaagagcgugggcaaguucugccuggaggccagcuucaacuaccucaagucccccaacuucagcaagcugaucaacaucaucaucugguuccugcuccuguccgucugccugggcagccucaucuacuccacggccgcccugggggugcugaugagcaaccucggcaugccguccuacugcaccggguaccgcgagggcuaccugaacagcaccaacgugaccaucgcgacguacugcaccggcuccauccccugcagcgucugccuguccgggcucgacagccuggacaccuaccccucccuggagaccauccagaucacgaucagcuccuucaagugggaccucaccgccuucggccugguggccgagugguuccuggccuacauccucuucacccgguucuucuacgugcuggggcuggccgcgaucaugcagcucuucuucagcuacuucgccguccacuucaucuccaacagcuggcugauguggcugaucaucaaccuggugcagauggcccccaucuccgccauggugcgcauguacaucuucuucgcgagcuucuacuacgucuggaagagcuacgugcacguggucgacggcugcaacuccagcaccugcaugaugugcuacaagcggaaccgcgccacgcggguggagugcaccaccaucgucaacggggugcgccgguccuucuacguguacgccaacggcggcaagggguucugcaagcuccacaacuggaacugcgucaacugcgacaccuucugcgccggcagcacguucaucuccgacgagguggcccgcgaccugagccugcaguucaagcggccgaucaaccccaccgaccaguccagcuacaucguggacuccgucaccgugaagaacgggagcauccaccucuacuucgacaaggcgggccagaagaccuacgagcgccacucccugagccacuucgugaaccuggacaaccuccgggccaacaacacgaaggggucccugcccaucaacgucaucguguucgacggcaagagcaagugcgaggaguccagcgccaaguccgccagcguguacuacucccagcugaugugccagcccauccuccugcuggaccaggcccucgucagcgacgugggcgacagcgcggagguggccgucaagauguucgacgccuacgugaacaccuucuccagcaccuucaacgugccgauggagaagcugaagacccuggucgccacggccgaggcggagcucgccaagaacgugucccuggacaacgugcugagcaccuucaucuccgccgcccgccagggguucgucgacagcgacguggagaccaaggacguggucgagugccucaagcugucccaccagagcgacaucgaggugaccggcgacuccugcaacaacuacaugcugacguacaacaagguggagaacaugaccccccgggaccucggggcgugcaucgacugcagcgcccgccacaucaacgcccaggucgccaagucccacaacaucgcccugaucuggaacgugaaggacuucaugagccuguccgagcagcuccggaagcagauccgcagcgcggccaagaagaacaaccugcccuucaagcugaccugcgccaccacgcgccagguggucaacguggugaccaccaagaucgcccucaagggcgggugaggacuaguuauaagacugacuagcccgaugggccucccaacgggcccuccuccccuccuugcaccgagauuaauaaaaaaaaaaaaaaaaaaaaaaaaaaaaaaaaaaaaaaaaaaaaaaaaaaaaaaaaaaaaaaaaugcaucccccccccccccccccccccccccccccccaaaggcucuuuucagagccaccagaauu

SEQ ID NO: 21493 - RNA, 6058 nt, Artificial Sequence
  SARS-CoV-2__MT846507.1__non-structural protein 3 (NSP3) mRNA gc
aggagaaagcuuaccauggcccccaccaaggugaccuucggcgacgacacggucaucgaggugcagggguacaagagcgugaacaucaccuucgagcuggacgagcgcaucgacaagguccucaacgagaagugcuccgccuacaccguggagcugggcaccgaggugaacgaguucgcgugcgucguggccgacgccgugaucaagacgcugcagccggucagcgagcuccugaccccccuggggaucgaccucgacgagugguccauggccaccuacuaccuguucgacgagagcggcgaguucaagcuggccucccacauguacugcagcuucuacccccccgacgaggacgaggaggagggggacugcgaggaggaggaguucgagccguccacccaguacgaguacggcacggaggacgacuaccagggcaagccccucgaguucggggcgaccagcgccgcccugcagcccgaggaggagcaggaggaggacuggcuggacgacgacucccagcagaccgugggccagcaggacgggagcgaggacaaccagaccacgaccauccagaccaucguggagguccagccccagcucgagauggagcugaccccgguggugcagacgaucgaggucaacuccuucagcggcuaccugaagcucaccgacaacguguacaucaagaacgccgacaucguggaggaggcgaagaaggucaagcccaccgugguggucaacgccgccaacguguaccugaagcacgggggcggcguggccggggcccugaacaaggcgaccaacaacgccaugcaggucgaguccgacgacuacaucgccacgaacggcccccucaagguggggggcagcugcguccuguccggccacaaccuggccaagcacugccuccacgugguggggcccaacgucaacaagggcgaggacauccagcugcugaagagcgccuacgagaacuucaaccagcacgaggugcuccuggcgccgcugcucuccgccgggaucuucggcgccgaccccauccacagccugcgggugugcgucgacaccgugcgcaccaacguguaccuggccgucuucgacaagaaccucuacgacaagcugguguccagcuuccuggagaugaagagcgagaagcagguggagcagaacaucgccgagauccccaaggaggaggucaagcccuucaucaccgaguccaagccgagcguggagcagcggaagcaggacgacaagaagaucaaggcgugcguggaggaggucacgaccacccucgaggagaccaaguuccugacggagaaccugcuccuguacaucgacaucaacgggaaccugcaccccgacuccgccacccucgugagcgacaucgacaucaccuuccugaagaaggacgcccccuacaucgugggcgacgucgugcaggagggcgugcugaccgccgucgugauccccacgaagaaggccgggggcaccaccgagaugcucgcgaaggcccugcgcaagguguccaccgacaacuacaucacgaccuacccggggcagggccugaacggguacaccgucgaggaggccaagaccgugcucaagaagugcaagagcgccuucuacauccugcccuccaucaucagcaacgagaagcaggagauccugggcaccguguccuggaaccuccgggagaugcuggcgcacgccgaggagacgcgcaagcugaugcccgucugcguggagaccaaggccaucgugagcaccauccagcggaaguacaagggcaucaagauccaggagggggucguggacuacggcgcccgcuucuacuucuacaccuccaagacgaccguggccagccugaucaacacccucaacgaccugaacgagacccuggucacgaugccccucggguacgugacccacggccugaaccuggaggaggcggcccgguacaugcgcucccucaaggugccggccaccgucagcguguccagccccgacgccgugaccgccuacaacggguaccugacguccagcuccaagacccccgaggagcacuucaucgagaccaucagccuggcgggcagcuacaaggacugguccuacagcggccaguccacccagcucgggaucgaguuccugaagcggggcgacaagagcgucuacuacacguccaaccccaccaccuuccaccuggacggggaggugaucaccuucgacaaccucaagacgcugcugagccuccgcgaggugcggaccaucaaggucuucaccaccguggacaacaucaaccugcacacgcagguggucgacauguccaugaccuacggccagcaguucggcccgaccuaccuggacggggccgacgugaccaagaucaagccccacaacagccacgagggcaagacguucuacgugcuccccaacgacgacacccugcgcgucgaggccuucgaguacuaccacaccaccgacccguccuuccuggggcgguacaugagcgcccucaaccacacgaagaaguggaaguacccccaggugaacggccugaccuccaucaagugggccgacaacaacugcuaccuggcgaccgcccuccugacccugcagcagaucgagcucaaguucaacccccccgcccugcaggacgccuacuaccgcgcgcgggccggggaggccgccaacuucugcgcccugauccucgcguacugcaacaagacggugggcgagcugggcgacguccgcgagaccaugagcuaccuguuccagcacgccaaccucgacuccugcaagcgggugcugaacgucgugugcaagaccugcgggcagcagcagaccacccugaagggcguggaggccgucauguacauggggacgcucagcuacgagcaguucaagaagggcgugcagaucccgugcaccugcgggaagcaggccaccaaguaccuggugcagcaggaguccagcuucgucaugauguccgccccccccgcgcaguacgagcugaagcacggcaccuucacgugcgccagcgaguacaccggcaacuaccagugcgggcacuacaagcacaucaccagcaaggagacccucuacugcaucgacggcgcccugcugacgaaguccagcgaguacaaggggcccaucaccgacguguucuacaaggagaacuccuacaccaccacgaucaagccggugaccuacaagcucgacggcgucgugugcaccgagaucgaccccaagcuggacaacuacuacaagaaggacaacagcuacuucaccgagcagcccaucgaccuggugcccaaccagccguaccccaacgccuccuucgacaacuucaaguucgucugcgacaacaucaaguucgccgacgaccucaaccagcugacgggguacaagaagcccgcgagccgcgagcugaaggugaccuucuuccccgaccucaacggcgacguggucgccaucgacuacaagcacuacaccccguccuucaagaagggcgccaagcugcugcacaagcccaucguguggcacgugaacaacgccaccaacaaggcgacguacaagcccaacaccuggugcauccggugccucuggagcaccaagcccgucgagaccuccaacagcuucgacgugcugaaguccgaggacgcccaggggauggacaaccuggccugcgaggaccucaagccggugagcgaggaggucguggagaaccccacgauccagaaggacgugcuggagugcaacgucaagaccaccgagguggugggcgacaucauccugaagcccgccaacaacucccucaagaucaccgaggaggucgggcacacggaccugauggccgcguacguggacaacagcucccugaccaucaagaagcccaacgagcucagccgcgugcugggccugaagacccucgccacccacgggcuggccgccgucaacuccgugccgugggacacgaucgccaacuacgcgaagcccuuccugaacaagguggucagcaccaccaccaacaucgugacgcgcugccucaaccgggugugcaccaacuacaugcccuacuucuucacccugcugcuccagcugugcaccuucacccgcuccacgaacagccggaucaaggccagcaugccgaccaccaucgccaagaacaccgucaaguccgugggcaaguucugccuggaggccagcuucaacuaccucaagucccccaacuucagcaagcugaucaacaucaucaucugguuccugcuccuguccgugugccugggcagccucaucuacuccacggccgcgcuggggguccugaugagcaaccucggcaugcccuccuacugcaccggguaccgcgagggcuaccugaacagcaccaacgugaccaucgccacguacugcaccggcuccauccccugcagcgugugccuguccgggcucgacagccuggacaccuacccgucccuggagaccauccagaucacgaucagcuccuucaagugggaccucaccgccuucggccuggucgccgagugguuccuggccuacauccucuucacccgguucuucuacgugcuggggcuggcggccaucaugcagcucuucuucagcuacuucgccgugcacuucaucuccaacagcuggcugauguggcugaucaucaaccugguccagauggcccccaucagcgcgauggugcgcauguacaucuucuucgccuccuucuacuacguguggaagagcuacguccacgugguggacggcugcaacuccagcaccugcaugaugugcuacaagcggaaccgcgccacgcgggucgagugcaccaccaucgugaacgggguccgccgguccuucuacguguacgccaacggcggcaagggguucugcaagcuccacaacuggaacugcgugaacugcgacaccuucugcgccggcagcacguucaucuccgacgaggucgcgcgcgaccugagccugcaguucaagcggcccaucaaccccaccgaccaguccagcuacaucguggacuccgugaccgucaagaacgggagcauccaccucuacuucgacaaggccggccagaagaccuacgagcgccacucccugagccacuucgugaacuucgacaaccugcgggccaacaacacgaaggggucccucccgaucaacgugaucgucuucgacggcaagagcaagugcgaggaguccagcgccaaguccgccagcguguacuacagccagcugaugugccagcccauccugcuccuggaccaggcgcugguguccgacgucggcgacagcgccgagguggccgugaagauguucgacgccuacgucaacaccuucuccagcaccuucaacgugcccauggagaagcucaagacccugguggccacggcggaggccgagcuggccaagaacgucucccucgacaacgugcugagcaccuucaucuccgccgcgcgccagggguucguggacagcgacgucgagaccaaggacgugguggagugccugaagcucucccaccagagcgacaucgaggucaccggcgacuccugcaacaacuacaugcugacguacaacaagguggagaacaugaccccccgggaccugggggccugcaucgacugcagcgcccgccacaucaacgcccagguggccaagucccacaacaucgcgcucaucuggaacgucaaggacuucaugagccuguccgagcagcugcggaagcagauccgcagcgccgccaagaagaacaaccucccguucaagcugaccugcgccaccacgcgccagguggugaacgucgugaccaccaagaucgcccugaagggcgggugaggacuaguuauaagacugacuagcccgaugggccucccaacgggcccuccuccccuccuugcaccgagauuaauaaaaaaaaaaaaaaaaaaaaaaaaaaaaaaaaaaaaaaaaaaaaaaaaaaaaaaaaaaaaaaaaugcaucccccccccccccccccccccccccccccccaaaggcucuuuucagagccaccagaauu

SEQ ID NO: 21494 - RNA, 6058 nt, Artificial Sequence
  SARS-CoV-2__MT846513.1__non-structural protein 3 (NSP3) mRNA gc
aggagaaagcuuaccauggcccccaccaaggugaccuucggcgacgacacggucaucgaggugcagggguacaagagcgugaacaucaccuucgagcuggacgagcgcaucgacaagguccucaacgagaagugcuccgccuacaccguggagcugggcaccgaggugaacgaguucgcgugcgucguggccgacgccgugaucaagacgcugcagccggucagcgagcuccugaccccccuggggaucgaccucgacgagugguccauggccaccuacuaccuguucgacgagagcggcgaguucaagcuggccucccacauguacugcagcuucuacccccccgacgaggacgaggaggagggggacugcgaggaggaggaguucgagccguccacccaguacgaguacggcacggaggacgacuaccagggcaagccccucgaguucggggcgaccagcgccgcccugcagcccgaggaggagcaggaggaggacuggcuggacgacgacucccagcagaccgugggccagcaggacgggagcgaggacaaccagaccacgaccauccagaccaucguggagguccagccccagcucgagauggagcugaccccgguggugcagacgaucgaggucaacuccuucagcggcuaccugaagcucaccgacaacguguacaucaagaacgccgacaucguggaggaggcgaagaaggucaagcccaccgugguggucaacgccgccaacguguaccugaagcacgggggcggcguggccggggcccugaacaaggcgaccaacaacgccaugcaggucgaguccgacgacuacaucgccacgaacggcccccucaagguggggggcagcugcguccuguccggccacaaccuggccaagcacugccuccacgugguggggcccaacgucaacaagggcgaggacauccagcugcugaagagcgccuacgagaacuucaaccagcacgaggugcuccuggcgccgcugcucuccgccgggaucuucggcgccgaccccauccacagccugcgggugugcgucgacaccgugcgcaccaacguguaccuggccgucuucgacaagaaccucuacgacaagcugguguccagcuuccuggagaugaagagcgagaagcagguggagcagaagaucgccgagauccccaaggaggaggucaagcccuucaucaccgaguccaagccgagcguggagcagcggaagcaggacgacaagaagaucaaggcgugcguggaggaggucacgaccacccucgaggagaccaaguuccugacggagaaccugcuccuguacaucgacaucaacgggaaccugcaccccgacuccgccacccucgugagcgacaucgacaucaccuuccugaagaaggacgcccccuacaucgugggcgacgucgugcaggagggcgugcugaccgccgucgugauccccacgaagaaggccgggggcaccaccgagaugcucgcgaaggcccugcgcaaggugccgaccgacaacuacaucacgaccuaccccgggcagggccugaacggguacaccgucgaggaggccaagaccgugcucaagaagugcaaguccgccuucuacauccugcccagcaucaucuccaacgagaagcaggagauccugggcaccgugagcuggaaccuccgggagaugcugacgcacgcggaggagacccgcaagcugaugcccgucugcguggagaccaaggccaucguguccaccauccagcggaaguacaagggcaucaagauccaggagggggucguggacuacggcgcccgcuucuacuucuacacgagcaagaccaccguggccucccugaucaacacccucaacgaccugaacgagacgcuggucaccaugccgcucggguacgugacccacggccugaaccuggaggaggccgcgcgguacaugcgcagccucaaggugcccgccaccgucuccgugagcucccccgacgccgugacggccuacaacggguaccugaccagcuccagcaagacccccgaggagcacuucaucgagaccaucucccuggccggcagcuacaaggacuggagcuacuccggccagagcacgcagcucgggaucgaguuccugaagcggggcgacaaguccgucuacuacaccagcaacccgaccaccuuccaccuggacggggaggugaucacguucgacaaccucaagacccugcugucccuccgcgaggugcggaccaucaaggucuucaccacgguggacaacaucaaccugcacacccagguggucgacaugagcaugaccuacggccagcaguucggccccaccuaccuggacggggcggacgugacgaagaucaagccccacaacucccacgagggcaagaccuucuacgugcucccgaacgacgacacccugcgcgucgaggccuucgaguacuaccacaccacggaccccagcuuccuggggcgguacauguccgcccucaaccacaccaagaaguggaaguacccccaggugaacggccugaccagcaucaagugggccgacaacaacugcuaccuggccaccgcgcuccugacgcugcagcagaucgagcucaaguucaaccccccggcccugcaggacgccuacuaccgcgcccgggcgggggaggccgccaacuucugcgcccugauccucgccuacugcaacaagaccgugggcgagcugggcgacguccgcgagaccauguccuaccuguuccagcacgcgaaccucgacagcugcaagcgggugcugaacgucgugugcaagaccugcgggcagcagcagaccacgcugaagggcguggaggccgucauguacauggggacccucuccuacgagcaguucaagaagggcgugcagauccccugcaccugcgggaagcaggccaccaaguaccuggugcagcaggagagccccuucgucaugauguccgcccccccggcccaguacgagcugaagcacggcacguucaccugcgcgagcgaguacaccggcaacuaccagugcgggcacuacaagcacaucaccuccaaggagacgcucuacugcaucgacggcgcccugcugaccaagagcagcgaguacaaggggcccaucaccgacguguucuacaaggagaacuccuacaccacgaccaucaagcccgugaccuacaagcucgacggcgucgugugcaccgagaucgaccccaagcuggacaacuacuacaagaaggacaacagcuacuucacggagcagccgaucgaccuggugcccaaccagcccuaccccaacgccuccuucgacaacuucaaguucgucugcgacaacaucaaguucgccgacgaccucaaccagcugaccggguacaagaagccggccagccgcgagcugaaggugaccuucuuccccgaccucaacggcgacguggucgcgaucgacuacaagcacuacacccccuccuucaagaagggcgccaagcugcugcacaagcccaucguguggcacgugaacaacgccacgaacaaggccaccuacaagccgaacaccuggugcauccggugccucuggagcaccaagcccgucgagacguccaacagcuucgacgugcugaaguccgaggacgcgcaggggauggacaaccuggccugcgaggaccucaagcccgugagcgaggaggucguggagaaccccaccauccagaaggacgugcuggagugcaacgucaagaccaccgagguggugggcgacaucauccugaagccggccaacaacucccucaagaucacggaggaggucgggcacaccgaccugauggccgccuacguggacaacagcucccugaccaucaagaagcccaacgagcucagccgcgugcugggccugaagacccucgcgacgcacgggcuggccgccgucaacuccgugcccugggacaccaucgccaacuacgccaagccguuccugaacaagguggucagcaccaccacgaacaucgugacccgcugccucaaccgggugugcaccaacuacaugcccuacuucuucacccugcugcuccagcugugcaccuucacgcgcuccaccaacagccggaucaaggcguccaugcccaccaccaucgccaagaacacggucaagagcgugggcaaguucugccuggaggccagcuucaacuaccucaagucccccaacuucagcaagcugaucaacaucaucaucugguuccugcuccuguccgugugccugggcagccucaucuacuccaccgccgcccuggggguccugaugagcaaccucggcaugccguccuacugcaccggguaccgcgagggcuaccugaacagcaccaacgugacgaucgcgaccuacugcaccggcuccauccccugcagcgugugccuguccgggcucgacagccuggacaccuaccccucccuggagacgauccagaucaccaucagcuccuucaagugggaccucaccgccuucggccuggucgccgagugguuccuggccuacauccucuucacccgguucuucuacgugcuggggcuggccgcgaucaugcagcucuucuucagcuacuucgccgugcacuucaucuccaacagcuggcugauguggcugaucaucaaccugguccagauggcccccaucuccgccauggugcgcauguacaucuucuucgcgagcuucuacuacguguggaagagcuacguccacgugguggacggcugcaacuccagcacgugcaugaugugcuacaagcggaaccgcgccacccgggucgagugcaccaccaucgugaacgggguccgccgguccuucuacguguacgccaacggcggcaagggguucugcaagcuccacaacuggaacugcgugaacugcgacacguucuacgccggcagcaccuucaucuccgacgaggucgcccgcgaccugagccugcaguucaagcggccgaucaaccccaccgaccaguccagcuacaucguggacuccgugaccgucaagaacgggagcauccaccucuacuucgacaaggcgggccagaagacguacgagcgccacucccugagccacuucgugaaccuggacaaccuccgggccaacaacaccaaggggucccugcccaucaacgugaucgucuucgacggcaagagcaagugcgaggaguccagcgccaaguccgccagcguguacuacucccagcugaugugccagcccauccuccugcuggaccaggcccucgugagcgacgucggcgacagcgcggagguggccgugaagauguucgacgccuacgucaacaccuucuccagcaccuucaacgugccgauggagaagcugaagacgcugguggccaccgccgaggcggagcucgccaagaacgucucccuggacaacgugcugagcaccuucaucuccgccgcccgccagggguucguggacagcgacgucgagaccaaggacgugguggagugccucaagcugucccaccagagcgacaucgaggucacgggcgacuccugcaacaacuacaugcugaccuacaacaagguggagaacaugaccccccgggaccucggggcgugcaucgacugcagcgcccgccacaucaacgcccagguggccaagucccacaacaucgcccugaucuggaacgucaaggacuucaugagccuguccgagcagcuccggaagcagauccgcagcgcggccaagaagaacaaccugcccuucaagcugaccugcgccacgacccgccagguggugaacgucgugaccaccaagaucgcccucaagggcgggugaggacuaguuauaagacugacuagcccgaugggccucccaacgggcccuccuccccuccuugcaccgagauuaauaaaaaaaaaaaaaaaaaaaaaaaaaaaaaaaaaaaaaaaaaaaaaaaaaaaaaaaaaaaaaaaaugcaucccccccccccccccccccccccccccccccaaaggcucuuuucagagccaccagaauu

SEQ ID NO: 21495 - RNA, 6058 nt, Artificial Sequence
  SARS-CoV-2__MT846520.1__non-structural protein 3 (NSP3) mRNA gc
aggagaaagcuuaccauggcccccaccaaggugaccuucggcgacgacacggucaucgaggugcagggguacaagagcgugaacaucaccuucgagcuggacgagcgcaucgacaagguccucaacgagaagugcuccgccuacaccguggagcugggcaccgaggugaacgaguucgcgugcgucguggccgacgccgugaucaagacgcugcagccggucagcgagcuccugaccccccuggggaucgaccucgacgagugguccauggccaccuacuaccuguucgacgagagcggcgaguucaagcuggccucccacauguacugcagcuucuacccccccgacgaggacgaggaggagggggacugcgaggaggaggaguucgagccguccacccaguacgaguacggcacggaggacgacuaccagggcaagccccucgaguucggggcgaccagcgccgcccugcagcccgaggaggagcaggaggaggacuggcuggacgacgacucccagcagaccgugggccagcaggacgggagcgaggacaaccagaccacgaccauccagaccaucguggagguccagccccagcucgagauggagcugaccccgguggugcagacgaucgaggucaacuccuucagcggcuaccugaagcucaccgacaacguguacaucaagaacgccgacaucguggaggaggcgaagaaggucaagcccaccgugguggucaacgccgccaacguguaccugaagcacgggggcggcguggccggggcccugaacaaggcgaccaacaacgccaugcaggucgaguccgacgacuacaucgccacgaacggcccccucaagguggggggcagcugcguccuguccggccacaaccuggccaagcacugccuccacgugguggggcccaacgucaacaagggcgaggacauccagcugcugaagagcgccuacgagaacuucaaccagcacgaggugcuccuggcgccgcugcucuccgccgggaucuucggcgccgaccccauccacagccugcgggugugcgucgacaccgugcgcaccaacguguaccuggccgucuucgacaagaaccucuacgacaagcugguguccagcuuccuggagaugaagagcgagaagcagguggagcagaagaucgccgagauccccaaggaggaggucaagcccuucaucaccgaguccaagccgagcguggagcagcggaagcaggacgacaagaagaucaaggcgugcguggaggaggucacgaccacccucgaggagaccaaguuccugacggagaaccugcuccuguacaucgacaucaacgggaaccugcaccccgacuccgccacccucgugagcgacaucgacaucaccuuccugaagaaggacgcccccuacaucgugggcgacgucgugcaggagggcgugcugaccgccgucgugauccccacgaagaaggccgggggcaccaccgagaugcucgcgaaggcccugcgcaaggugccgaccgacaacuacaucacgaccuaccccgggcagggccugaacggguacaccgucgaggaggccaagaccgugcucaagaagugcaaguccgccuucuacauccugcccagcaucaucuccaacgagaagcaggagauccugggcaccgugagcuggaaccuccgggagaugcuggcgcacgccgaggagacgcgcaagcugaugcccgucugcguggagaccaaggccaucguguccaccauccagcggaaguacaagggcaucaagauccaggagggggucguggacuacggcgcccgcuucuacuucuacaccagcaagacgaccguggccucccugaucaacacccucaacgaccugaacgagacccuggucacgaugccgcucggguacgugacccacggccugaaccuggaggaggcggcccgguacaugcgcagccucaaggugcccgccaccgucuccgugagcucccccgacgccgugaccgccuacaacggguaccugacgagcuccagcaagacccccgaggagcacuucaucgagaccaucucccuggcgggcagcuacaaggacuggagcuacuccggccagagcacccagcucgggaucgaguuccugaagcggggcgacaaguccgucuacuacacgagcaacccgaccaccuuccaccuggacggggaggugaucaccuucgacaaccucaagacgcugcugucccuccgcgaggugcggaccaucaaggucuucaccaccguggacaacaucaaccugcacacgcagguggucgacaugagcaugaccuacggccagcaguucggccccaccuaccuggacggggccgacgugaccaagaucaagccccacaacucccacgagggcaagacguucuacgugcucccgaacgacgacacccugcgcgucgaggccuucgaguacuaccacaccaccgaccccagcuuccuggggcgguacauguccgcccucaaccacacgaagaaguggaaguacccccaggugaacggccugaccagcaucaagugggccgacaacaacugcuaccuggcgaccgcccuccugacccugcagcagaucgagcucaaguucaaccccccggcccugcaggacgccuacuaccgcgcgcgggccggggaggccgccaacuucugcgcccugauccucgcguacugcaacaagacggugggcgagcugggcgacguccgcgagaccauguccuaccuguuccagcacgccaaccucgacagcugcaagcgggugcugaacgucgugugcaagaccugcgggcagcagcagaccacccugaagggcguggaggccgucauguacauggggacgcucuccuacgagcaguucaagaagggcgugcagauccccugcaccugcgggaagcaggccaccaaguaccuggugcagcaggagagccccuucgucaugauguccgcccccccggcgcaguacgagcugaagcacggcaccuucacgugcgccagcgaguacaccggcaacuaccagugcgggcacuacaagcacaucaccuccaaggagacccucuacugcaucgacggcgcccugcugacgaagagcagcgaguacaaggggcccaucaccgacguguucuacaaggagaacuccuacaccaccacgaucaagcccgugaccuacaagcucgacggcgucgugugcaccgagaucgaccccaagcuggacaacuacuacaagaaggacaacagcuacuucaccgagcagccgaucgaccuggugcccaaccagcccuaccccaacgccuccuucgacaacuucaaguucgucugcgacaacaucaaguucgccgacgaccucaaccagcugacgggguacaagaagccggcgagccgcgagcugaaggugaccuucuuccccgaccucaacggcgacguggucgccaucgacuacaagcacuacacccccuccuucaagaagggcgccaagcugcugcacaagcccaucguguggcacgugaacaacgccaccaacaaggcgacguacaagccgaacaccuggugcauccggugccucuggagcaccaagcccgucgagaccuccaacagcuucgacgugcugaaguccgaggacgcccaggggauggacaaccuggccugcgaggaccucaagcccgugagcgaggaggucguggagaaccccacgauccagaaggacgugcuggagugcaacgucaagaccaccgagguggugggcgacaucauccugaagccggccaacaacucccucaagaucaccgaggaggucgggcacacggaccugauggccgcguacguggacaacagcucccugaccaucaagaagcccaacgagcucagccgcgugcugggccugaagacccucgccacccacgggcuggccgccgucaacuccgugcccugggacacgaucgccaacuacgcgaagccguuccugaacaagguggucagcaccaccaccaacaucgugacgcgcugccucaaccgggugugcaccaacuacaugcccuacuucuucacccugcugcuccagcugugcaccuucacccgcuccacgaacagccggaucaaggccuccaugcccaccaccaucgucaagaacaccgugaagagcgugggcaaguucugccuggaggccagcuucaacuaccucaagucccccaacuucagcaagcugaucaacaucaucaucugguuccugcuccuguccgucugccugggcagccucaucuacuccacggccgcccugggggugcugaugagcaaccucggcaugccguccuacugcaccggguaccgcgagggcuaccugaacagcaccaacgugaccaucgcgacguacugcaccggcuccauccccugcagcgucugccuguccgggcucgacagccuggacaccuaccccucccuggagaccauccagaucacgaucagcuccuucaagugggaccucaccgccuucggccugguggccgagugguuccuggccuacauccucuucacccgguucuucuacgugcuggggcuggccgcgaucaugcagcucuucuucagcuacuucgccguccacuucaucuccaacagcuggcugauguggcugaucaucaaccuggugcagauggcccccaucuccgccauggugcgcauguacaucuucuucgcgagcuucuacuacgucuggaagagcuacgugcacguggucgacggcugcaacuccagcaccugcaugaugugcuacaagcggaaccgcgccacgcggguggagugcaccaccaucgucaacggggugcgccgguccuucuacguguacgccaacggcggcaagggguucugcaagcuccacaacuggaacugcgucaacugcgacaccuucugcgccggcagcacguucaucuccgacgagguggcccgcgaccugagccugcaguucaagcggccgaucaaccccaccgaccaguccagcuacaucguggacuccgucaccgugaagaacgggagcauccaccucuacuucgacaaggcgggccagaagaccuacgagcgccacucccugagccacuucgugaaccuggacaaccuccgggccaacaacacgaaggggucccugcccaucaacgucaucguguucgacggcaagagcaagugcgaggaguccagcgccaaguccgccagcguguacuacucccagcugaugugccagcccauccuccugcuggaccaggcccucgucagcgacgugggcgacagcgcggagguggccgucaagauguucgacgccuacgugaacaccuucuccagcaccuucaacgugccgauggagaagcugaagacccuggucgccacggccgaggcggagcucgccaagaacgugucccuggacaacgugcugagcaccuucaucuccgccgcccgccagggguucgucgacagcgacguggagaccaaggacguggucgagugccucaagcugucccaccagagcgacaucgaggugaccggcgacuccugcaacaacuacaugcugacguacaacaagguggagaacaugaccccccgggaccucggggcgugcaucgacugcagcgcccgccacaucaacgcccaggucgccaagucccacaacaucgcccugaucuggaacgugaaggacuucaugagccuguccgagcagcuccggaagcagauccgcagcgcggccaagaagaacaaccugcccuucaagcugaccugcgccaccacgcgccagguggucaacguggugaccaccaagaucgcccucaagggcgggugaggacuaguuauaagacugacuagcccgaugggccucccaacgggcccuccuccccuccuugcaccgagauuaauaaaaaaaaaaaaaaaaaaaaaaaaaaaaaaaaaaaaaaaaaaaaaaaaaaaaaaaaaaaaaaaaugcaucccccccccccccccccccccccccccccccaaaggcucuuuucagagccaccagaauu

SEQ ID NO: 21496 - RNA, 6058 nt, Artificial Sequence
  SARS-CoV-2__MT846521.1__non-structural protein 3 (NSP3) mRNA gc
aggagaaagcuuaccauggcccccaccaaggugaccuucggcgacgacacggucaucgaggugcagggguacaagagcgugaacaucaccuucgagcuggacgagcgcaucgacaagguccucaacgagaagugcuccgccuacaccguggagcugggcaccgaggugaacgaguucgcgugcgucguggccgacgccgugaucaagacgcugcagccggucagcgagcuccugaccccccuggggaucgaccucgacgagugguccauggccaccuacuaccuguucgacgagagcggcgaguucaagcuggccucccacauguacugcagcuucuacccccccgacgaggacgaggaggagggggacugcgaggaggaggaguucgagccguccacccaguacgaguacggcacggaggacgacuaccagggcaagccccucgaguucggggcgaccagcgccgcccugcagcccgaggaggagcaggaggaggacuggcuggacgacgacucccagcagaccgugggccagcaggacgggagcgaggacaaccagaccacgaccauccagaccaucguggagguccagccccagcucgagauggagcugaccccgguggugcagacgaucgaggucaacuccuucagcggcuaccugaagcucaccgacaacguguacaucaagaacgccgacaucguggaggaggcgaagaaggucaagcccaccgugguggucaacgccgccaacguguaccugaagcacgggggcggcguggccggggcccugaacaaggcgaccaacaacgccaugcaggucgaguccgacgacuacaucgccacgaacggcccccucaagguggggggcagcugcguccuguccggccacaaccuggccaagcacugccuccacgugguggggcccaacgucaacaagggcgaggacauccagcugcugaagagcgccuacgagaacuucaaccagcacgaggugcuccuggcgccgcugcucuccgccgggaucuucggcgccgaccccauccacagccugcgggugugcgucgacaccgugcgcaccaacguguaccuggccgucuucgacaagaaccucuacgacaagcugguguccagcuuccuggagaugaagagcgagaagcagguggagcagaagaucgccgagauccccaaggaggaggucaagcccuucaucaccgaguccaagccgagcguggagcagcggaagcaggacgacaagaagaucaaggcgugcguggaggaggucacgaccacccucgaggagaccaaguuccugacggagaaccugcuccuguacaucgacaucaacgggaaccugcaccccgacuccgccacccucgugagcgacaucgacaucaccuuccugaagaaggacgcccccuacaucgugggcgacgucgugcaggagggcgugcugaccgccgucgugauccccacgaagaaggccgggggcaccaccgagaugcucgcgaaggcccugcgcaaggugccgaccgacaacuacaucacgaccuaccccgggcagggccugaacggguacaccgucgaggaggccaagaccgugcucaagaagugcaaguccgccuucuacauccugcccagcaucaucuccaacgagaagcaggagauccugggcaccgugagcuggaaccuccgggagaugcugacgcacgcggaggagacccgcaagcugaugcccgucugcguggagaccaaggccaucguguccaccauccagcggaaguacaagggcaucaagauccaggagggggucguggacuacggcgcccgcuucuacuucuacacgagcaagaccaccguggccucccugaucaacacccucaacgaccugaacgagacgcuggucaccaugccgcucggguacgugacccacggccugaaccuggaggaggccgcgcgguacaugcgcagccucaaggugcccgccaccgucuccgugagcucccccgacgccgugacggccuacaacggguaccugaccagcuccagcaagacccccgaggagcacuucaucgagaccaucucccuggccggcagcuacaaggacuggagcuacuccggccagagcacgcagcucgggaucgaguuccugaagcggggcgacaaguccgucuacuacaccagcaacccgaccaccuuccaccuggacggggaggugaucacguucgacaaccucaagaccauccugucccugcgcgaggugcggaccaucaaggucuucaccacgguggacaacaucaaccuccacacccagguggucgacaugagcaugaccuacggccagcaguucggccccaccuaccuggacggggcggacgugacgaagaucaagccccacaacucccacgagggcaagaccuucuacgugcugccgaacgacgacacccuccgcgucgaggccuucgaguacuaccacaccacggaccccagcuuccuggggcgguacauguccgcccugaaccacaccaagaaguggaaguacccccaggugaacggccucaccagcaucaagugggccgacaacaacugcuaccuggccaccgcgcugcucacgcugcagcagaucgagcugaaguucaaccccccggcccuccaggacgccuacuaccgcgcccgggcgggggaggccgccaacuucugcgcccugauccuggccuacugcaacaagaccgugggcgagcucggcgacguccgcgagaccauguccuaccuguuccagcacgcgaaccuggacagcugcaagcgggugcucaacgucgugugcaagaccugcgggcagcagcagaccacgcugaagggcguggaggccgucauguacauggggacccuguccuacgagcaguucaagaagggcgugcagauccccugcaccugcgggaagcaggccaccaaguaccucgugcagcaggagagccccuucgucaugauguccgcccccccggcccaguacgagcugaagcacggcacguucaccugcgcgagcgaguacaccggcaacuaccagugcgggcacuacaagcacaucaccuccaaggagacgcuguacugcaucgacggcgcccuccugaccaagagcagcgaguacaaggggcccaucaccgacguguucuacaaggagaacuccuacaccacgaccaucaagcccgugaccuacaagcuggacggcgucgugugcaccgagaucgaccccaagcucgacaacuacuacaagaaggacaacagcuacuucacggagcagccgaucgaccuggugcccaaccagcccuaccccaacgccuccuucgacaacuucaaguucgucugcgacaacaucaaguucgccgacgaccugaaccagcucaccggguacaagaagccggccagccgcgagcugaaggugaccuucuuccccgaccugaacggcgacguggucgcgaucgacuacaagcacuacacccccuccuucaagaagggcgccaagcuccugcacaagcccaucguguggcacgugaacaacgccacgaacaaggccaccuacaagccgaacaccuggugcauccggugccuguggagcaccaagcccgucgagacguccaacagcuucgacgugcucaaguccgaggacgcgcaggggauggacaaccuggccugcgaggaccugaagcccgugagcgaggaggucguggagaaccccaccauccagaaggacgugcucgagugcaacgucaagaccaccgagguggugggcgacaucauccugaagccggccaacaacucccugaagaucacggaggaggucgggcacaccgaccucauggccgccuacguggacaacagcucccugaccaucaagaagcccaacgagcugagccgcgugcucggccugaagacccuggcgacgcacgggcucgccgccgucaacuccgugcccugggacaccaucgccaacuacgccaagccguuccugaacaagguggucagcaccaccacgaacaucgugacccgcugccugaaccgggugugcaccaacuacaugcccuacuucuucacccuccugcugcagcucugcaccuucacgcgcuccaccaacagccggaucaaggcguccaugcccaccaccaucgccaagaacacggucaagagcgugggcaaguucugccuggaggccagcuucaacuaccugaagucccccaacuucagcaagcucaucaacaucaucaucugguuccugcugcucuccgugugccugggcagccugaucuacuccaccgccgcccucgggguccugaugagcaaccugggcaugccguccuacugcaccggguaccgcgagggcuaccucaacagcaccaacgugacgaucgcgaccuacugcaccggcuccauccccugcagcgugugccuguccgggcuggacagccucgacaccuaccccucccuggagacgauccagaucaccaucagcuccuucaagugggaccugaccgccuucggccucgucgccgagugguuccuggccuacauccuguucacccgguucuucuacgugcucgggcuggccgcgaucaugcagcuguucuucagcuacuucgccgugcacuucaucuccaacagcuggcucauguggcugaucaucaaccugguccagauggcccccaucuccgccauggugcgcauguacaucuucuucgcgagcuucuacuacguguggaagagcuacguccacgugguggacggcugcaacuccagcacgugcaugaugugcuacaagcggaaccgcgccacccgggucgagugcaccaccaucgugaacgggguccgccgguccuucuacguguacgccaacggcggcaagggguucugcaagcugcacaacuggaacugcgugaacugcgacacguucugcgccggcagcaccuucaucuccgacgaggucgcccgcgaccucagccugcaguucaagcggccgaucaaccccaccgaccaguccagcuacaucguggacuccgugaccgucaagaacgggagcauccaccuguacuucgacaaggcgggccagaagacguacgagcgccacucccucagccacuucgugaaccuggacaaccugcgggccaacaacaccaaggggucccuccccaucaacgugaucgucuucgacggcaagagcaagugcgaggaguccagcgccaaguccgccagcguguacuacucccagcugaugugccagcccauccugcuccuggaccaggcccuggugagcgacgucggcgacagcgcggagguggccgugaagauguucgacgccuacgucaacaccuucuccagcaccuucaacgugccgauggagaagcucaagacgcugguggccaccgccgaggcggagcuggccaagaacgucucccucgacaacgugcugagcaccuucaucuccgccgcccgccagggguucguggacagcgacgucgagaccaaggacgugguggagugccugaagcucucccaccagagcgacaucgaggucacgggcgacuccugcaacaacuacaugcugaccuacaacaagguggagaacaugaccccccgggaccugggggcgugcaucgacugcagcgcccgccacaucaacgcccagguggccaagucccacaacaucgcccucaucuggaacgucaaggacuucaugagccuguccgagcagcugcggaagcagauccgcagcgcggccaagaagaacaaccuccccuucaagcugaccugcgccacgacccgccagguggugaacgucgugaccaccaagaucgcccugaagggcgggugaggacuaguuauaagacugacuagcccgaugggccucccaacgggcccuccuccccuccuugcaccgagauuaauaaaaaaaaaaaaaaaaaaaaaaaaaaaaaaaaaaaaaaaaaaaaaaaaaaaaaaaaaaaaaaaaugcaucccccccccccccccccccccccccccccccaaaggcucuuuucagagccaccagaauu

SEQ ID NO: 21497 - RNA, 6058 nt, Artificial Sequence
  SARS-CoV-2__MT846527.1__non-structural protein 3 (NSP3) mRNA gc
aggagaaagcuuaccauggcccccaccaaggugaccuucggcgacgacacggucaucgaggugcagggguacaagagcgugaacaucaccuucgagcuggacgagcgcaucgacaagguccucaacgagaagugcuccgccuacaccguggagcugggcaccgaggugaacgaguucgcgugcgucgugguggacgccgucaucaagacgcugcagccggugagcgagcuccugaccccccuggggaucgaccucgacgagugguccauggccaccuacuaccuguucgacgagagcggcgaguucaagcuggccucccacauguacugcagcuucuacccccccgacgaggacgaggaggagggggacugcgaggaggaggaguucgagccguccacccaguacgaguacggcacggaggacgacuaccagggcaagccccucgaguucggggccaccagcgcggcccugcagcccgaggaggagcaggaggaggacuggcuggacgacgacucccagcagaccgugggccagcaggacgggagcgaggacaaccagaccacgaccauccagaccaucgucgaggugcagccccagcucgagauggagcugaccccggugguccagacgaucgaggugaacuccuucagcggcuaccugaagcucaccgacaacguguacaucaagaacgccgacaucgucgaggaggccaagaaggugaagcccaccguggucgugaacgcggccaacguguaccugaagcacgggggcggcgucgccggggcccugaacaaggccaccaacaacgcgaugcagguggaguccgacgacuacaucgccacgaacggcccccucaaggucgggggcagcugcgugcuguccggccacaaccuggccaagcacugccuccacguggucgggcccaacgugaacaagggcgaggacauccagcugcugaagagcgccuacgagaacuucaaccagcacgaggugcuccuggccccgcugcucuccgcggggaucuucggcgccgaccccauccacagccugcgggucugcguggacaccgugcgcaccaacgucuaccuggccguguucgacaagaaccucuacgacaagcugguguccagcuuccuggagaugaagagcgagaagcaggucgagcagaagaucgccgagauccccaaggaggaggugaagcccuucaucaccgaguccaagccgagcguggagcagcggaagcaggacgacaagaagaucaaggccugcgucgaggaggugacgaccacccucgaggagaccaaguuccugacggagaaccugcuccuguacaucgacaucaacgggaaccugcaccccgacuccgcgacccucgugagcgacaucgacaucaccuuccugaagaaggacgcccccuacaucgucggcgacguggugcaggagggcguccugaccgccguggugauccccacgaagaaggccgggggcaccaccgagaugcucgccaaggcgcugcgcaaggucccgaccgacaacuacaucacgaccuaccccgggcagggccugaacggguacaccguggaggaggccaagaccgugcucaagaagugcaaguccgccuucuacauccugcccagcaucaucuccaacgagaagcaggagauccugggcaccgucagcuggaaccuccgggagaugcuggcccacgcggaggagacgcgcaagcugaugcccgugugcguggagaccaaggccaucgucuccaccauccagcggaaguacaagggcaucaagauccaggagggggugguggacuacggcgcccgcuucuacuucuacaccagcaagacgaccgucgccucccugaucaacacccucaacgaccugaacgagacccuggugacgaugccgcucggguacgugacccacggccugaaccuggaggaggccgcgcgguacaugcgcagccucaagguccccgccaccguguccgugagcucccccgacgccgucaccgccuacaacggguaccugacgagcuccagcaagacccccgaggagcacuucaucgagaccaucucccuggccggcagcuacaaggacuggagcuacuccggccagagcacccagcucgggaucgaguuccugaagcggggcgacaaguccguguacuacacgagcaacccgaccaccuuccaccuggacggggaggugaucaccuucgacaaccucaagacgcugcugucccuccgcgagguccggaccaucaagguguucaccaccguggacaacaucaaccugcacacgcaggucguggacaugagcaugaccuacggccagcaguucggccccaccuaccuggacggggcggacgugaccaagaucaagccccacaacucccacgagggcaagacguucuacguccucccgaacgacgacacccugcgcguggaggccuucgaguacuaccacaccaccgaccccagcuuccuggggcgguacauguccgcccucaaccacacgaagaaguggaaguacccccaggugaacggccugaccagcaucaagugggccgacaacaacugcuaccuggccaccgcgcuccugacccugcagcagaucgagcucaaguucaaccccccggcccugcaggacgccuacuaccgcgcccgggcgggggaggccgccaacuucugcgcccugauccucgccuacugcaacaagacggucggcgagcugggcgacgugcgcgagaccauguccuaccuguuccagcacgcgaaccucgacagcugcaagcggguccugaacguggugugcaagaccugcgggcagcagcagaccacccugaagggcgucgaggccgugauguacauggggacgcucuccuacgagcaguucaagaagggcgugcagauccccugcaccugcgggaagcaggccaccaaguaccugguccagcaggagagccccuucgugaugauguccgcccccccggcccaguacgagcugaagcacggcaccuucacgugcgcgagcgaguacaccggcaacuaccagugcgggcacuacaagcacaucaccuccaaggagacccucuacugcaucgacggcgcccugcugacgaagagcagcgaguacaaggggcccaucaccgacguguucuacaaggagaacuccuacaccaccacgaucaagcccgucaccuacaagcucgacggcguggugugcaccgagaucgaccccaagcuggacaacuacuacaagaaggacaacagcuacuucaccgagcagccgaucgaccugguccccaaccagcccuaccccaacgccuccuucgacaacuucaaguucgugugcgacaacaucaaguucgccgacgaccucaaccagcugacgggguacaagaagccggccagccgcgagcugaaggugaccuucuuccccgaccucaacggcgacgucguggcgaucgacuacaagcacuacacccccuccuucaagaagggcgccaagcugcugcacaagcccaucguguggcacgucaacaacgccaccaacaaggccacguacaagccgaacaccuggugcauccggugccucuggagcaccaagcccguggagaccuccaacagcuucgacgugcugaaguccgaggacgcgcaggggauggacaaccuggccugcgaggaccucaagcccgucagcgaggaggugguggagaaccccacgauccagaaggacguccuggagugcaacgugaagaccaccgagguggucggcgacaucauccugaagccggccaacaacucccucaagaucaccgaggagguggggcacacggaccugauggccgccuacguggacaacagcucccugaccaucaagaagcccaacgagcucagccgcguccugggccugaagacccucgcgacccacgggcuggccgccgugaacuccgugcccugggacacgaucgccaacuacgccaagccguuccugaacaaggucgugagcaccaccaccaacaucgugacgcgcugccucaaccgggucugcaccaacuacaugcccuacuucuucacccugcugcuccagcugugcaccuucacccgcuccacgaacagccggaucaaggcguccaugcccaccaccaucgccaagaacaccgugaagagcgugggcaaguucugccuggaggccagcuucaacuaccucaagucccccaacuucagcaagcugaucaacaucaucaucugguuccugcuccuguccgucugccugggcagccucaucuacuccacggccgcccugggggugcugaugagcaaccucggcaugccguccuacugcaccggguaccgcgagggcuaccugaacagcaccaacgugaccaucgcgacguacugcaccggcuccauccccugcagcgucugccuguccgggcucgacagccuggacaccuaccccucccuggagaccauccagaucacgaucagcuccuucaagugggaccucaccgccuucggccugguggccgagugguuccuggccuacauccucuucacccgguucuucuacgugcuggggcuggccgcgaucaugcagcucuucuucagcuacuucgccguccacuucaucuccaacagcuggcugauguggcugaucaucaaccuggugcagauggcccccaucuccgccauggugcgcauguacaucuucuucgcgagcuucuacuacgucuggaagagcuacgugcacguggucgacggcugcaacuccagcaccugcaugaugugcuacaagcggaaccgcgccacgcggguggagugcaccaccaucgucaacggggugcgccgguccuucuacguguacgccaacggcggcaagggguucugcaagcuccacaacuggaacugcgucaacugcgacaccuucugcgccggcagcacguucaucuccgacgagguggcccgcgaccugagccugcaguucaagcggccgaucaaccccaccgaccaguccagcuacaucguggacuccgucaccgugaagaacgggagcauccaccucuacuucgacaaggcgggccagaagaccuacgagcgccacucccugagccacuucgugaaccuggacaaccuccgggccaacaacacgaaggggucccugcccaucaacgucaucguguucgacggcaagagcaagugcgaggaguccagcgccaaguccgccagcguguacuacucccagcugaugugccagcccauccuccugcuggaccaggcccucgucagcgacgugggcgacagcgcggagguggccgucaagauguucgacgccuacgugaacaccuucuccagcaccuucaacgugccgauggagaagcugaagacccuggucgccacggccgaggcggagcucgccaagaacgugucccuggacaacgugcugagcaccuucaucuccgccgcccgccagggguucgucgacagcgacguggagaccaaggacguggucgagugccucaagcugucccaccagagcgacaucgaggugaccggcgacuccugcaacaacuacaugcugacguacaacaagguggagaacaugaccccccgggaccucggggcgugcaucgacugcagcgcccgccacaucaacgcccaggucgccaagucccacaacaucgcccugaucuggaacgugaaggacuucaugagccuguccgagcagcuccggaagcagauccgcagcgcggccaagaagaacaaccugcccuucaagcugaccugcgccaccacgcgccagguggucaacguggugaccaccaagaucgcccucaagggcgggugaggacuaguuauaagacugacuagcccgaugggccucccaacgggcccuccuccccuccuugcaccgagauuaauaaaaaaaaaaaaaaaaaaaaaaaaaaaaaaaaaaaaaaaaaaaaaaaaaaaaaaaaaaaaaaaaugcaucccccccccccccccccccccccccccccccaaaggcucuuuucagagccaccagaauu

SEQ ID NO: 21498 - RNA, 6058 nt, Artificial Sequence
  SARS-CoV-2__MT846547.1__non-structural protein 3 (NSP3) mRNA gc
aggagaaagcuuaccauggcccccaccaaggugaccuucggcgacgacacggucaucgaggugcagggguacaagagcgugaacaucaccuucgagcuggacgagcgcaucgacaagguccucaacgagaagugcuccgccuacaccguggagcugggcaccgaggugaacgaguucgcgugcgucguggccgacgccgugaucaagacgcugcagccggucagcgagcuccugaccucccuggggaucgaccucgacgaguggagcauggccaccuacuaccuguucgacgaguccggcgaguucaagcuggccagccacauguacugcuccuucuacccccccgacgaggacgaggaggagggggacugcgaggaggaggaguucgagcccagcacccaguacgaguacggcacggaggacgacuaccagggcaagccgcucgaguucggggcgaccuccgccgcccugcagcccgaggaggagcaggaggaggacuggcuggacgacgacagccagcagaccgugggccagcaggacggguccgaggacaaccagaccacgaccauccagaccaucguggagguccagccccagcucgagauggagcugacccccguggugcagacgaucgaggucaacagcuucuccggcuaccugaagcucaccgacaacguguacaucaagaacgccgacaucguggaggaggcgaagaaggucaagccgaccgugguggucaacgccgccaacguguaccugaagcacgggggcggcguggccggggcccugaacaaggcgaccaacaacgccaugcaggucgagagcgacgacuacaucgccacgaacggcccccucaagguggggggcuccugcguccugagcggccacaaccuggccaagcacugccuccacgugguggggcccaacgucaacaagggcgaggacauccagcugcugaaguccgccuacgagaacuucaaccagcacgaggugcuccuggcgccccugcucagcgccgggaucuucggcgccgacccgauccacucccugcgggugugcgucgacaccgugcgcaccaacguguaccuggccgucuucgacaagaaccucuacgacaagcuggugagcagcuuccuggagaugaaguccgagaagcagguggagcagaagaucgccgagauccccaaggaggaggucaagcccuucaucaccgagagcaagcccuccguggagcagcggaagcaggacgacaagaagaucaaggcgugcguggaggaggucacgaccacccucgaggagaccaaguuccugacggagaaccugcuccuguacaucgacaucaacgggaaccugcacccggacagcgccacccucguguccgacaucgacaucaccuuccugaagaaggacgugcccuacaucgucggcgacguggugcaggagggcguccugaccgccguggugauccccacgaagaaggccgggggcaccaccgagaugcucgccaaggcgcugcgcaagguccccaccgacaacuacaucacgaccuacccggggcagggccugaacggguacaccguggaggaggccaagaccgugcucaagaagugcaagagcgccuucuacauccugcccuccaucaucagcaacgagaagcaggagauccugggcaccgucuccuggaaccuccgggagaugcuggcccacgcggaggagacgcgcaagcugaugcccgugugcguggagaccaaggccaucgucagcaccauccagcggaaguacaagggcaucaagauccaggagggggugguggacuacggcgcccgcuucuacuucuacaccuccaagacgaccgucgccagccugaucaacacccucaacgaccugaacgagacccuggugacgaugccccucggguacgugacccacggccugaaccuggaggaggccgcgcgguacaugcgcucccucaaggucccggccaccgugagcguguccagccccgacgccgucaccgccuacaacggguaccugacguccagcuccaagacccccgaggagcacuucaucgagaccaucagccuggccggcagcuacaaggacugguccuacagcggccaguccacccagcucgggaucgaguuccugaagcggggcgacaagagcguguacuacacguccaaccccaccaccuuccaccuggacggggaggugaucaccuucgacaaccucaagacgcugcuggcgcuccgcgagguccggaccaucaagguguucaccaccguggacaacaucaaccugcacacgcaggucguggacaugagcaugaccuacggccagcaguucggcccgaccuaccuggacggggccgacgugaccaagaucaagccccacaacucccacgagggcaagacguucuacguccuccccaacgacgacacccugcgcguggaggccuucgaguacuaccacaccaccgacccgagcuuccuggggcgguacauguccgcccucaaccacacgaagaaguggaaguacccccaggugaacggccugaccagcaucaagugggccgacaacaacugcuaccuggcgaccgcccuccugacccugcagcagaucgagcucaaguucaacccccccgcccugcaggacgccuacuaccgcgcgcgggccggggaggccgccaacuucugcgcccugauccucgcguacugcaacaagacggucggcgagcugggcgacgugcgcgagaccauguccuaccuguuccagcacgccaaccucgacagcugcaagcggguccugaacguggugugcaagaccugcgggcagcagcagaccacccugaagggcgucgaggccgugauguacauggggacgcucuccuacgagcaguucaagaagggcgugcagaucccgugcaccugcgggaagcaggccaccaaguaccugguccagcaggagagccccuucgugaugauguccgccccccccgcgcaguacgagcugaagcacggcaccuucacgugcgccagcgaguacaccggcaacuaccagugcgggcacuacaagcacaucaccuccaaggagacccucuacugcaucgacggcgcccugcugacgaagagcagcgaguacaaggggccgaucaccgacguguucuacaaggagaacuccuacaccaccacgaucaagcccgucaccuacaagcucgacggcguggugugcaccgagaucgaccccaagcuggacaacuacuacaagaaggacaacagcuacuucaccgagcagcccaucgaccuggucccgaaccagcccuaccccaacgccuccuucgacaacuucaaguucgugugcgacaacaucaaguucgccgacgaccucaaccagcugacgggguacaagaagcccgcgagccgcgagcugaaggugaccuucuucccggaccucaacggcgacgucguggccaucgacuacaagcacuacacccccuccuucaagaagggcgccaagcugcugcacaagcccaucguguggcacgucaacaacgccaccaacaaggcgacguacaagcccaacaccuggugcauccggugccucuggagcaccaagccgguggagaccuccaacagcuucgacgugcugaaguccgaggacgcccaggggauggacaaccuggccugcgaggaccucaagcccgucagcgaggaggugguggagaaccccacgauccagaaggacguccuggagugcaacgugaagaccaccgagguggucggcgacaucauccugaagcccgccaacaacucccucaagaucaccgaggagguggggcacacggaccugauggccgcguacguggacaacagcucccugaccaucaagaagccgaacgagcucagccgcguccugggccugaagacccucgccacccacgggcuggccgccgugaacuccgugcccugggacacgaucgccaacuacgcgaagcccuuccugaacaaggucgugagcaccaccaccaacaucgugacgcgcugccucaaccgggucugcaccaacuacaugccguacuucuucacccugcugcuccagcugugcaccuucacccgcuccacgaacagccggaucaaggccuccaugcccaccaccaucgccaagaacaccgugaagagcgugggcaaguucugccuggaggccagcuucaacuaccucaagucccccaacuucagcaagcugaucaacaucaucaucugguuccugcuccuguccgucugccugggcagccucaucuacuccacggccgcgcugggggugcugaugagcaaccucggcaugcccuccuacugcaccggguaccgcgagggcuaccugaacagcaccaacgugaccaucgccaucuacugcacgggcuccaucccgugcagcgucugccuguccgggcucgacagccuggacaccuaccccucccuggagaccauccagaucaccaucagcuccuucaagugggaccucacggccuucggccugguggccgagugguuccuggccuacauccucuucacccgguucuucuacgugcuggggcuggcggccaucaugcagcucuucuucagcuacuucgccguccacuucaucuccaacagcuggcugauguggcugaucaucaaccuggugcagauggcccccaucuccgcgauggugcgcauguacaucuucuucgccagcuucuacuacgucuggaagagcuacgugcacguggucgacggcugcaacuccagcaccugcaugaugugcuacaagcggaaccgcgccacccggguggagugcacgaccaucgucaacggggugcgccgguccuucuacguguacgccaacggcggcaagggguucugcaagcuccacaacuggaacugcgucaacugcgacaccuucugcgccggcagcaccuucaucuccgacgagguggcgcgcgaccugagccugcaguucaagcggcccaucaacccgacggaccaguccagcuacaucguggacuccgucaccgugaagaacgggagcauccaccucuacuucgacaaggccggccagaagaccuacgagcgccacucccugagccacuucgugaaccuggacaaccuccgggccaacaacaccaaggggucccugcccaucaacgucaucguguucgacggcaagagcaagugcgaggaguccagcgccaaguccgccagcguguacuacucccagcugaugugccagcccauccuccugcuggaccaggcgcucgucagcgacgugggcgacagcgccgagguggccgucaagauguucgacgccuacgugaacacguucuccagcaccuucaacgugcccauggagaagcugaagacccuggucgccaccgcggaggccgagcucgccaagaacgugucccuggacaacgugcugagcacguucaucuccgccgcgcgccagggguucgucgacagcgacguggagaccaaggacguggucgagugccucaagcugucccaccagagcgacaucgaggugaccggcgacuccugcaacaacuacaugcugaccuacaacaagguggagaacaugacgccgcgggaccucggggccugcaucgacugcagcgcccgccacaucaacgcccaggucgccaagucccacaacaucgcgcugaucuggaacgugaaggacuucaugagccuguccgagcagcuccggaagcagauccgcagcgccgccaagaagaacaaccugcccuucaagcugaccugcgccaccacccgccagguggucaacguggugacgaccaagaucgcccucaagggcgggugaggacuaguuauaagacugacuagcccgaugggccucccaacgggcccuccuccccuccuugcaccgagauuaauaaaaaaaaaaaaaaaaaaaaaaaaaaaaaaaaaaaaaaaaaaaaaaaaaaaaaaaaaaaaaaaaugcaucccccccccccccccccccccccccccccccaaaggcucuuuucagagccaccagaauu

SEQ ID NO: 21499 - RNA, 6058 nt, Artificial Sequence
  SARS-CoV-2__MT846554.1__non-structural protein 3 (NSP3) mRNA gc
aggagaaagcuuaccauggcccccaccaaggugaccuucggcgacgacacggucaucgaggugcagggguacaagagcgugaacaucaccuucgagcuggacgagcgcaucgacaagguccucaacgagaagugcuccgccuacaccguggagcugggcaccgaggugaacgaguucgcgugcgucguggccgacgccgugaucaagacgcugcagccggucagcgagcuccugaccccccuggggaucgaccucgacgagugguccauggccaccuacuaccuguucgacgagagcggcgaguucaagcuggccucccacauguacugcagcuucuacccccccgacgaggacgaggaggagggggacugcgaggaggaggaguucgagccguccacccaguacgaguacggcacggaggacgacuaccagggcaagccccucgaguucggggcgaccagcgccgcccugcagcccgaggaggagcaggaggaggacuggcuggacgacgacucccagcagaccgugggccagcaggacgggagcgaggacaaccagaccacgaccauccagaccaucguggagguccagccccagcucgagauggagcugaccccgguggugcagacgaucgaggucaacuccuucagcggcuaccugaagcucaccgacaacguguacaucaagaacgccgacaucguggaggaggcgaagaaggucaagcccaccgugguggucaacgccgccaacguguaccugaagcacgggggcggcguggccggggcccugaacaaggcgaccaacaacgccaugcaggucgaguccgacgacuacaucgccacgaacggcccccucaagguggggggcagcugcguccuguccggccacaaccuggccaagcacugccuccacgugguggggcccaacgucaacaagggcgaggacauccagcugcugaagagcgccuacgagaacuucaaccagcacgaggugcuccuggcgccgcugcucuccgccgggaucuucggcgccgaccccauccacagccugcgggugugcgucgacaccgugcgcaccaacguguaccuggccgucuucgacaagaaccucuacgacaagcugguguccagcuuccuggagaugaagagcgagaagcagguggagcagaacaucgccgagauccccaaggaggaggucaagcccuucaucaccgaguccaagccgagcguggagcagcggaagcaggacgacaagaagaucaaggcgugcguggaggaggucacgaccacccucgaggagaccaaguuccugacggagaaccugcuccuguacaucgacaucaacgggaaccugcaccccgacuccgccacccucgugagcgacaucgacaucaccuuccugaagaaggacgcccccuacaucgugggcgacgucgugcaggagggcgugcugaccgccgucgugauccccacgaagaaggccgggggcaccaccgagaugcucgcgaaggcccugcgcaagguguccaccgacaacuacaucacgaccuacccggggcagggccugaacggguacaccgucgaggaggccaagaccgugcucaagaagugcaagagcgccuucuacauccugcccuccaucaucagcaacgagaagcaggagauccugggcaccguguccuggaaccuccgggagaugcuggcgcacgccgaggagacgcgcaagcugaugcccgucugcguggagaccaaggccaucgugagcaccauccagcggaaguacaagggcaucaagauccaggagggggucguggacuacggcgcccgcuucuacuucuacaccuccaagacgaccguggccagccugaucaacacccucaacgaccugaacgagacccuggucacgaugccccucggguacgugacccacggccugaaccuggaggaggcggcccgguacaugcgcucccucaaggugccggccaccgucagcguguccagccccgacgccgugaccgccuacaacggguaccugacguccagcuccaagacccccgaggagcacuucaucgagaccaucagccuggcgggcagcuacaaggacugguccuacagcggccaguccacccagcucgggaucgaguuccugaagcggggcgacaagagcgucuacuacacguccaaccccaccaccuuccaccuggacggggaggugaucaccuucgacaaccucaagacgcugcugagccuccgcgaggugaagaccaucaaggucuucaccaccguggacaacaucaaccugcacacgcagguggucgacauguccaugaccuacggccagcaguucggcccgaccuaccuggacggggccgacgugaccaagaucaagccccacaacagccacgagggcaagacguucuacgugcuccccaacgacgacacccugcgggucgaggccuucgaguacuaccacaccaccgacccguccuuccuggggcgcuacaugagcgcccucaaccacacgaagaaguggaaguacccccaggugaacggccugaccuccaucaagugggccgacaacaacugcuaccuggcgaccgcccuccugacccugcagcagaucgagcucaaguucaacccccccgcccugcaggacgccuacuaccgggcgcgcgccggggaggccgccaacuucugcgcccugauccucgcguacugcaacaagacggugggcgagcugggcgacguccgggagaccaugagcuaccuguuccagcacgccaaccucgacuccugcaagcgcgugcugaacgucgugugcaagaccugcgggcagcagcagaccacccugaagggcguggaggccgucauguacauggggacgcucagcuacgagcaguucaagaagggcgugcagaucccgugcaccugcgggaagcaggccaccaaguaccuggugcagcaggaguccagcuucgucaugauguccgccccccccgcgcaguacgagcugaagcacggcaccuucacgugcgccagcgaguacaccggcaacuaccagugcgggcacuacaagcacaucaccagcaaggagacccucuacugcaucgacggcgcccugcugacgaaguccagcgaguacaaggggcccaucaccgacguguucuacaaggagaacuccuacaccaccacgaucaagccggugaccuacaagcucgacggcgucgugugcaccgagaucgaccccaagcuggacaacuacuacaagaaggacaacagcuacuucaccgagcagcccaucgaccuggugcccaaccagccguaccccaacgccuccuucgacaacuucaaguucgucugcgacaacaucaaguucgccgacgaccucaaccagcugacgggguacaagaagcccgcgagccgggagcugaaggugaccuucuuccccgaccucaacggcgacguggucgccaucgacuacaagcacuacaccccguccuucaagaagggcgccaagcugcugcacaagcccaucguguggcacgugaacaacgccaccaacaaggcgacguacaagcccaacaccuggugcauccgcugccucuggagcaccaagcccgucgagaccuccaacagcuucgacgugcugaaguccgaggacgcccaggggauggacaaccuggccugcgaggaccucaagccggugagcgaggaggucguggagaaccccacgauccagaaggacgugcuggagugcaacgucaagaccaccgagguggugggcgacaucauccugaagcccgccaacaacucccucaagaucaccgaggaggucgggcacacggaccugauggccgcguacguggacaacagcucccugaccaucaagaagcccaacgagcucagccgggugcugggccugaagacccucgccacccacgggcuggccgccgucaacuccgugccgugggacacgaucgccaacuacgcgaagcccuuccugaacaagguggucagcaccaccaccaacaucgugacgcgcugccucaaccgcgugugcaccaacuacaugcccuacuucuucacccugcugcuccagcugugcaccuucacccgguccacgaacagccgcaucaaggccagcaugccgaccaccaucgccaagaacaccgucaaguccgugggcaaguucugccuggaggccagcuucaacuaccucaagucccccaacuucagcaagcugaucaacaucaucaucugguuccugcuccuguccgugugccugggcagccucaucuacuccacggccgcgcuggggguccugaugagcaaccucggcaugcccuccuacugcaccggguaccgggagggcuaccugaacagcaccaacgugaccaucgccacguacugcaccggcuccauccccugcagcgugugccuguccgggcucgacagccuggacaccuacccgucccuggagaccauccagaucacgaucagcuccuucaagugggaccucaccgccuucggccuggucgccgagugguuccuggccuacauccucuucacccgcuucuucuacgugcuggggcuggcggccaucaugcagcucuucuucagcuacuucgccgugcacuucaucuccaacagcuggcugauguggcugaucaucaaccugguccagauggcccccaucagcgcgauggugcggauguacaucuucuucgccuccuucuacuacguguggaagagcuacguccacgugguggacggcugcaacuccagcaccugcaugaugugcuacaagcgcaaccgggccacgcgcgucgagugcaccaccaucgugaacgggguccggcgcuccuucuacguguacgccaacggcggcaagggguucugcaagcuccacaacuggaacugcgugaacugcgacaccuucugcgccggcagcacguucaucuccgacgaggucgcgcgggaccugagccugcaguucaagcgccccaucaaccccaccgaccaguccagcuacaucguggacuccgugaccgucaagaacgggagcauccaccucuacuucgacaaggccggccagaagaccuacgagcggcacucccugagccacuucgugaacuucgacaaccugcgcgccaacaacacgaaggggucccucccgaucaacgugaucgucuucgacggcaagagcaagugcgaggaguccagcgccaaguccgccagcguguacuacagccagcugaugugccagcccauccugcuccuggaccaggcgcugguguccgacgucggcgacagcgccgagguggccgugaagauguucgacgccuacgucaacaccuucuccagcaccuucaacgugcccauggagaagcucaagacccugguggccacggcggaggccgagcuggccaagaacgucucccucgacaacgugcugagcaccuucaucuccgccgcgcggcagggguucguggacagcgacgucgagaccaaggacgugguggagugccugaagcucucccaccagagcgacaucgaggucaccggcgacuccugcaacaacuacaugcugacguacaacaagguggagaacaugaccccccgcgaccugggggccugcaucgacugcagcgcccggcacaucaacgcccagguggccaagucccacaacaucgcgcucaucuggaacgucaaggacuucaugagccuguccgagcagcugcgcaagcagauccggagcgccgccaagaagaacaaccucccguucaagcugaccugcgccaccacgcgccagguggugaacgucgugaccaccaagaucgcccugaagggcgggugaggacuaguuauaagacugacuagcccgaugggccucccaacgggcccuccuccccuccuugcaccgagauuaauaaaaaaaaaaaaaaaaaaaaaaaaaaaaaaaaaaaaaaaaaaaaaaaaaaaaaaaaaaaaaaaaugcaucccccccccccccccccccccccccccccccaaaggcucuuuucagagccaccagaauu

SEQ ID NO: 21500 - RNA, 6058 nt, Artificial Sequence
  SARS-CoV-2__MT846555.1__non-structural protein 3 (NSP3) mRNA gc
aggagaaagcuuaccauggcccccaccaaggugaccuucggcgacgacacggucaucgaggugcagggguacaagagcgugaacaucaccuucgagcuggacgagcgcaucgacaagguccucaacgagaagugcuccgccuacaccguggagcugggcaccgaggugaacgaguucgcgugcgucguggccgacgccgugaucaagacgcugcagccggucagcgagcuccugaccucccuggggaucgaccucgacgaguggagcauggccaccuacuaccuguucgacgaguccggcgaguucaagcuggccagccacauguacugcuccuucuacccccccgacgaggacgaggaggagggggacugcgaggaggaggaguucgagcccagcacccaguacgaguacggcacggaggacgacuaccagggcaagccgcucgaguucggggcgaccuccgccgcccugcagcccgaggaggagcaggaggaggacuggcuggacgacgacagccagcagaccgugggccagcaggacggguccgaggacaaccagaccacgaccauccagaccaucguggagguccagccccagcucgagauggagcugacccccguggugcagacgaucgaggucaacagcuucuccggcuaccugaagcucaccgacaacguguacaucaagaacgccgacaucguggaggaggcgaagaaggucaagccgaccgugguggucaacgccgccaacguguaccugaagcacgggggcggcguggccggggcccugaacaaggcgaccaacaacgccaugcaggucgagagcgacgacuacaucgccacgaacggcccccucaagguggggggcuccugcguccugagcggccacaaccuggccaagcacugccuccacgugguggggcccaacgucaacaagggcgaggacauccagcugcugaaguccgccuacgagaacuucaaccagcacgaggugcuccuggcgccccugcucagcgccgggaucuucggcgccgacccgauccacucccugcgggugugcgucgacaccgugcgcaccaacguguaccuggccgucuucgacaagaaccucuacgacaagcuggugagcagcuuccuggagaugaaguccgagaagcagguggagcagaagaucgccgagauccccaaggaggaggucaagcccuucaucaccgagagcaagcccuccguggagcagcggaagcaggacgacaagaagaucaaggcgugcguggaggaggucacgaccacccucgaggagaccaaguuccugacggagaaccugcuccuguacaucgacaucaacgggaaccugcacccggacagcgccacccucguguccgacaucgacaucaccuuccugaagaaggacgcccccuacaucgugggcgacgucgugcaggagggcgugcugaccgccgucgugauccccacgaagaaggccgggggcaccaccgagaugcucgcgaaggcccugcgcaaggugcccaccgacaacuacaucacgaccuacccggggcagggccugaacggguacaccgucgaggaggccaagaccgugcucaagaagugcaagagcgccuucuacauccugcccuccaucaucagcaacgagaagcaggagauccugggcaccguguccuggaaccuccgggagaugcuggcgcacgccgaggagacgcgcaagcugaugcccgucugcguggagaccaaggccaucgugagcaccauccagcggaaguacaagggcaucaagauccaggagggggucguggacuacggcgcccgcuucuacuucuacaccuccaagacgaccguggccagccugaucaacacccucaacgaccugaacgagacccuggucacgaugccccucggguacgugacccacggccugaaccuggaggaggcggcccgguacaugcgcucccucaaggugccggccaccgucagcguguccagccccgacgccgugaccgccuacaacggguaccugacguccagcuccaagacccccgaggagcacuucaucgagaccaucagccuggcgggcagcuacaaggacugguccuacagcggccaguccacccagcucgggaucgaguuccugaagcggggcgacaagagcgucuacuacacguccaaccccaccaccuuccaccuggacggggaggugaucaccuucgacaaccucaagacgcugcuggcccuccgcgaggugcggaccaucaaggucuucaccaccguggacaacaucaaccugcacacgcagguggucgacaugagcaugaccuacggccagcaguucggcccgaccuaccuggacggggccgacgugaccaagaucaagccccacaacucccacgagggcaagacguucuacgugcuccccaacgacgacacccugcgcgucgaggccuucgaguacuaccacaccaccgacccgagcuuccuggggcgguacauguccgcccucaaccacacgaagaaguggaaguacccccaggugaacggccugaccagcaucaagugggcggacaacaacugcuaccuggccaccgcccuccugacccugcagcagaucgagcucaaguucaacccccccgcccugcaggacgcguacuaccgcgcccgggccggggaggccgccaacuucugcgcgcugauccucgccuacugcaacaagacggugggcgagcugggcgacguccgcgagaccauguccuaccuguuccagcacgccaaccucgacagcugcaagcgggugcugaacgucgugugcaagaccugcgggcagcagcagaccacccugaagggcguggaggccgucauguacauggggacgcucuccuacgagcaguucaagaagggcgugcagaucccgugcaccugcgggaagcaggccaccaaguaccuggugcagcaggagagccccuucgucaugauguccgcgccccccgcccaguacgagcugaagcacggcaccuucacgugcgccagcgaguacaccggcaacuaccagugcgggcacuacaagcacaucaccuccaaggagacccucuacugcaucgacggcgcccugcugacgaagagcagcgaguacaaggggccgaucaccgacguguucuacaaggagaacuccuacaccaccacgaucaagcccgugaccuacaagcucgacggcgucgugugcaccgagaucgaccccaagcuggacaacuacuacaagaaggacaacagcuacuucaccgagcagcccaucgaccuggugccgaaccagcccuaccccaacgccuccuucgacaacuucaaguucgucugcgacaacaucaaguucgcggacgaccucaaccagcugacgggguacaagaagcccgccagccgcgagcugaaggugaccuucuucccggaccucaacggcgacguggucgccaucgacuacaagcacuacacccccuccuucaagaagggcgccaagcugcugcacaagcccaucguguggcacgugaacaacgcgaccaacaaggccacguacaagcccaacaccuggugcauccggugccucuggagcaccaagccggucgagaccuccaacagcuucgacgugcugaaguccgaggacgcccaggggauggacaaccuggccugcgaggaccucaagcccgugagcgaggaggucguggagaaccccacgauccagaaggacgugcuggagugcaacgucaagaccaccgagguggugggcgacaucauccugaagcccgccaacaacucccucaagaucaccgaggaggucgggcacacggaccugauggcggccuacguggacaacagcucccugaccaucaagaagccgaacgagcucagccgcgugcugggccugaagacccucgccacccacgggcuggccgccgucaacuccgugcccugggacacgaucgcgaacuacgccaagcccuuccugaacaagguggucagcaccaccaccaacaucgugacgcgcugccucaaccgggugugcaccaacuacaugccguacuucuucacccugcugcuccagcugugcaccuucacccgcuccacgaacagccggaucaaggccuccaugcccaccaccaucgccaagaacaccgucaagagcgugggcaaguucugccuggaggccagcuucaacuaccucaagucccccaacuucagcaagcugaucaacaucaucaucugguuccugcuccuguccgugugccugggcagccucaucuacuccacggcggcccuggggguccugaugagcaaccucggcaugcccuccuacugcaccggguaccgcgagggcuaccugaacagcaccaacgugaccaucgccaucuacugcacgggcuccaucccgugcagcgugugccuguccgggcucgacagccuggacaccuaccccucccuggagaccauccagaucaccaucagcuccuucaagugggaccucacggccuucggccuggucgccgagugguuccuggcguacauccucuucacccgguucuucuacgugcuggggcuggccgccaucaugcagcucuucuucagcuacuucgccgugcacuucaucuccaacagcuggcugauguggcugaucaucaaccugguccagauggcgcccaucuccgccauggugcgcauguacaucuucuucgccagcuucuacuacguguggaagagcuacguccacgugguggacggcugcaacuccagcaccugcaugaugugcuacaagcggaaccgcgccacccgggucgagugcacgaccaucgugaacgggguccgccgguccuucuacguguacgccaacggcggcaagggguucugcaagcuccacaacuggaacugcgugaacugcgacaccuucugcgcgggcagcaccuucaucuccgacgaggucgcccgcgaccugagccugcaguucaagcggcccaucaacccgacggaccaguccagcuacaucguggacuccgugaccgucaagaacgggagcauccaccucuacuucgacaaggccggccagaagaccuacgagcgccacucccugagccacuucgugaaccuggacaaccuccgggccaacaacaccaaggggucccugcccaucaacgugaucgucuucgacggcaagagcaagugcgaggaguccagcgccaaguccgcgagcguguacuacucccagcugaugugccagcccauccuccugcuggaccaggcccucgugagcgacgucggcgacagcgccgagguggccgugaagauguucgacgccuacgucaacacguucuccagcaccuucaacgugcccauggagaagcugaagacccugguggcgaccgccgaggccgagcucgccaagaacgucucccuggacaacgugcugagcacguucaucuccgcggcccgccagggguucguggacagcgacgucgagaccaaggacgugguggagugccucaagcugucccaccagagcgacaucgaggucaccggcgacuccugcaacaacuacaugcugaccuacaacaagguggagaacaugacgccgcgggaccucggggccugcaucgacugcagcgcccgccacaucaacgcccagguggcgaagucccacaacaucgcccugaucuggaacgucaaggacuucaugagccuguccgagcagcuccggaagcagauccgcagcgccgccaagaagaacaaccugcccuucaagcugaccugcgccaccacccgccagguggugaacgucgugacgaccaagaucgcgcucaagggcgggugaggacuaguuauaagacugacuagcccgaugggccucccaacgggcccuccuccccuccuugcaccgagauuaauaaaaaaaaaaaaaaaaaaaaaaaaaaaaaaaaaaaaaaaaaaaaaaaaaaaaaaaaaaaaaaaaugcaucccccccccccccccccccccccccccccccaaaggcucuuuucagagccaccagaauu

SEQ ID NO: 21501 - RNA, 6058 nt, Artificial Sequence
  SARS-CoV-2__MT846556.1__non-structural protein 3 (NSP3) mRNA gc
aggagaaagcuuaccauggcccccaccaaggugaccuucggcgacgacacggucaucgaggugcagggguacaagagcgugaacaucaccuucgagcuggacgagcgcaucgacaagguccucaacgagaagugcuccgccuacaccguggagcugggcaccgaggugaacgaguucgcgugcgucguggccgacgccgugaucaagacgcugcagccggucagcgagcuccugaccccccuggggaucgaccucgacgagugguccauggccaccuacuaccuguucgacgagagcggcgaguucaagcuggccucccacauguacugcagcuucuacccccccgacgaggacgaggaggagggggacugcgaggaggaggaguucgagccguccacccaguacgaguacggcacggaggacgacuaccagggcaagccccucgaguucggggcgaccagcgccgcccugcagcccgaggaggagcaggaggaggacuggcuggacgacgacucccagcagaccgugggccagcaggacgggagcgaggacaaccagaccacgaccauccagaccaucguggagguccagccccagcucgagauggagcugaccccgguggugcagacgaucgaggucaacuccuucagcggcuaccugaagcucaccgacaacguguacaucaagaacgccgacaucguggaggaggcgaagaaggucaagcccaccgugguggucaacgccgccaacguguaccugaagcacgggggcggcguggccggggcccugaacaaggcgaccaacaacgccaugcaggucgaguccgacgacuacaucgccacgaacggcccccucaagguggggggcagcugcguccuguccggccacaaccuggccaagcacugccuccacgugguggggcccaacgucaacaagggcgaggacauccagcugcugaagagcgccuacgagaacuucaaccagcacgaggugcuccuggcgccgcugcucuccgccgggaucuucggcgccgaccccauccacagccugcgggugugcgucgacaccgugcgcaccaacguguaccuggccgucuucgacaagaaccucuacgacaagcugguguccagcuuccuggagaugaagagcgagaagcagguggagcagaagaucgccgagauccccaaggaggaggucaagcccuucaucaccgaguccaagccgagcguggagcagcggaagcaggacgacaagaagaucaaggcgugcguggaggaggucacgaccacccucgaggagaccaaguuccugacggagaaccugcuccuguacaucgacaucaacgggaaccugcaccccgacuccgccacccucgugagcgacaucgacaucaccuuccugaagaaggacgcccccuacaucgugggcgacgucgugcaggagggcgugcugaccgccgucgugauccccacgaagaaggccgggggcaccaccgagaugcucgcgaaggcccugcgcaaggugccgaccgacaacuacaucacgaccuaccccgggcagggccugaacggguacaccgucgaggaggccaagaccgugcucaagaagugcaaguccgccuucuacauccugcccagcaucaucuccaacgagaagcaggagauccugggcaccgugagcuggaaccuccgggagaugcuggcgcacgccgaggagacgcgcaagcugaugcccgucugcguggagaccaaggccaucguguccaccauccagcggaaguacaagggcaucaagauccaggagggggucguggacuacggcgcccgcuucuacuucuacaccagcaagacgaccguggccucccugaucaacacccucaacgaccugaacgagacccuggucacgaugccgcucggguacgugacccacggccugaaccuggaggaggcggcccgguacaugcgcagccucaaggugcccgccaccgucuccgugagcucccccgacgccgugaccgccuacaacggguaccugacgagcuccagcaagacccccgaggagcacuucaucgagaccaucucccuggcgggcagcuacaaggacuggagcuacuccggccagagcacccagcucgggaucgaguuccugaagcggggcgacaaguccgucuacuacacgagcaacccgaccaccuuccaccuggacggggaggugaucaccuucgacaaccucaagacgcugcugucccuccgcgaggugcggaccaucaaggucuucaccaccguggacaacaucaaccugcacacgcagguggucgacaugagcaugaccuacggccagcaguucggccccaccuaccuggacggggccgacgugaccaagaucaagccccacaacucccacgagggcaagacguucuacgugcucccgaacgacgacacccugcgcgucgaggccuucgaguacuaccacaccaccgaccccagcuuccuggggcgguacauguccgcccucaaccacacgaagaaguggaaguacccccaggugaacggccugaccagcaucaagugggccgacaacaacugcuaccuggcgaccgcccuccugacccugcagcagaucgagcucaaguucaaccccccggcccugcaggacgccuacuaccgcgcgcgggccggggaggccgccaacuucugcgcccugauccucgcguacugcaacaagacggugggcgagcugggcgacguccgcgagaccauguccuaccuguuccagcacgccaaccucgacagcugcaagcgggugcugaacgucgugugcaagaccugcgggcagcagcagaccacccugaagggcguggaggccgucauguacauggggacgcucuccuacgagcaguucaagaagggcgugcagauccccugcaccugcgggaagcaggccaccaaguaccuggugcagcaggagagccccuucgucaugauguccgcccccccggcgcaguacgagcugaagcacggcaccuucacgugcgccagcgaguacaccggcaacuaccagugcgggcacuacaagcacaucaccuccaaggagacccucuacugcaucgacggcgcccugcugacgaagagcagcgaguacaaggggcccaucaccgacguguucuacaaggagaacuccuacaccaccacgaucaagcccgugaccuacaagcucgacggcgucgugugcaccgagaucgaccccaagcuggacaacuacuacaagaaggacaacagcuacuucaccgagcagccgaucgaccuggugcccaaccagcccuaccccaacgccuccuucgacaacuucaaguucgucugcgacaacaucaaguucgccgacgaccucaaccagcugacgggguacaagaagccggcgagccgcgagcugaaggugaccuucuuccccgaccucaacggcgacguggucgccaucgacuacaagcacuacacccccuccuucaagaagggcgccaagcugcugcacaagcccaucguguggcacgugaacaacgccaccaacaaggcgacguacaagccgaacaccuggugcauccggugccucuggagcaccaagcccgucgagaccuccaacagcuucgacgugcugaaguccgaggacgcccaggggauggacaaccuggccugcgaggaccucaagcccgugagcgaggaggucguggagaaccccacgauccagaaggacgugcuggagugcaacgucaagaccaccgagguggugggcgacaucauccugaagccggccaacaacucccucaagaucaccgaggaggucgggcacacggaccugauggccgcguacguggacaacagcucccugaccaucaagaagcccaacgagcucagccgcgugcugggccugaagacccucgccacccacgggcuggccgccgucaacuccgugcccugggacacgaucgccaacuacgcgaagccguuccugaacaagguggucggcaccaccaccaacaucgugacgcgcugccucaaccgggugugcaccaacuacaugcccuacuucuucacccugcugcuccagcugugcaccuucacccgcagcacgaacucccggaucaaggccagcaugcccaccaccaucgccaagaacaccgucaaguccgugggcaaguucugccuggaggccagcuucaacuaccucaagagccccaacuucuccaagcugaucaacaucaucaucugguuccugcuccugagcgugugccuggggucccucaucuacagcacggccgcgcugggcguccugauguccaaccucgggaugccgagcuacugcaccggcuaccgcgagggcuaccugaacuccaccaacgugaccaucgccacguacugcaccgggagcauccccugcuccgugugccugagcggccucgacucccuggacaccuaccccagccuggagaccauccagaucacgaucuccagcuucaagugggaccucaccgccuucgggcuggucgccgagugguuccuggccuacauccucuucacccgguucuucuacgugcugggccuggcggccaucaugcagcucuucuucuccuacuucgccgugcacuucaucagcaacuccuggcugauguggcugaucaucaaccugguccagauggcccccaucagcgcgauggugcgcauguacaucuucuucgccuccuucuacuacguguggaagagcuacguccacgugguggacgggugcaacagcuccaccugcaugaugugcuacaagcggaaccgcgccacgcgggucgagugcaccaccaucgugaacggcguccgccggagcuucuacguguacgccaacggcgggaagggcuucugcaagcuccacaacuggaacugcgugaacugcgacaccuucugcgccggguccacguucaucagcgacgaggucgcgcgcgaccugucccugcaguucaagcggccgaucaaccccaccgaccagagcuccuacaucguggacagcgugaccgucaagaacggcuccauccaccucuacuucgacaaggccgggcagaagaccuacgagcgccacagccugucccacuucgugaaccuggacaaccuccgggccaacaacacgaagggcagccugcccaucaacgugaucgucuucgacggcaaguccaagugcgaggagagcuccgccaagagcgccuccguguacuacagccagcugaugugccagcccauccuccugcuggaccaggcgcucguguccgacgucggggacagcgccgagguggccgugaagauguucgacgccuacgucaacaccuucagcuccaccuucaacgugccgauggagaagcugaagacccugguggccacggcggaggccgagcucgccaagaacgucagccuggacaacgugcuguccaccuucaucagcgccgcgcgccagggcuucguggacuccgacgucgagaccaaggacgugguggagugccucaagcugagccaccaguccgacaucgaggucaccggggacagcugcaacaacuacaugcugacguacaacaagguggagaacaugaccccccgggaccucggcgccugcaucgacugcuccgcccgccacaucaacgcccagguggccaagagccacaacaucgcgcugaucuggaacgucaaggacuucaugucccugagcgagcagcuccggaagcagauccgcuccgccgccaagaagaacaaccugcccuucaagcugaccugcgccaccacgcgccagguggugaacgucgugaccaccaagaucgcccucaaggggggcugaggacuaguuauaagacugacuagcccgaugggccucccaacgggcccuccuccccuccuugcaccgagauuaauaaaaaaaaaaaaaaaaaaaaaaaaaaaaaaaaaaaaaaaaaaaaaaaaaaaaaaaaaaaaaaaaugcaucccccccccccccccccccccccccccccccaaaggcucuuuucagagccaccagaauu

SEQ ID NO: 21502 - RNA, 6058 nt, Artificial Sequence
  SARS-CoV-2__MT846557.1__non-structural protein 3 (NSP3) mRNA gc
aggagaaagcuuaccauggcccccaccaaggugaccuucggcgacgacacggucaucgaggugcagggguacaagagcgugaacaucaccuucgagcuggacgagcgcaucgacaagguccucaacgagaagugcuccgccuacaccguggagcugggcaccgaggugaacgaguucgcgugcgucguggccgacgccgugaucaagacgcugcagccggucagcgagcuccugaccccccuggggaucgaccucgacgagugguccauggccaccuacuaccuguucgacgagagcggcgaguucaagcuggccucccacauguacugcagcuucuacccccccgacgaggacgaggaggagggggacugcgaggaggaggaguucgagccguccacccaguacgaguacggcacggaggacgacuaccagggcaagccccucgaguucggggcgaccagcgccgcccugcagcccgaggaggagcaggaggaggacuggcuggacgacgacucccagcagaccgugggccagcaggacgggagcgaggacaaccagaccacgaccauccagaccaucguggagguccagccccagcucgagauggagcugaccccgguggugcagacgaucgaggucaacuccuucagcggcuaccugaagcucaccgacaacguguacaucaagaacgccgacaucguggaggaggcgaagaaggucaagcccaccgugguggucaacgccgccaacguguaccugaagcacgggggcggcguggccggggcccugaacaaggcgaccaacaacgccaugcaggucgaguccgacgacuacaucgccacgaacggcccccucaagguggggggcagcugcguccuguccggccacaaccuggccaagcacugccuccacgugguggggcccaacgucaacaagggcgaggacauccagcugcugaagagcgccuacgagaacuucaaccagcacgaggugcuccuggcgccgcugcucuccgccgggaucuucggcgccgaccccauccacagccugcgggugugcgucgacaccgugcgcaccaacguguaccuggccgucuucgacaagaaccucuacgacaagcugguguccagcuuccuggagaugaagagcgagaagcagguggagcagaagaucgccgagauccccaaggaggaggucaagcccuucaucaccgaguccaagccgagcguggagcagcggaagcaggacgacaagaagaucaaggcgugcguggaggaggucacgaccacccucgaggagaccaaguuccugacggagaaccugcuccuguacaucgacaucaacgggaaccugcaccccgacuccgccacccucgugagcgacaucgacaucaccuuccugaagaaggacgcccccuacaucgugggcgacgucgugcaggagggcgugcugaccgccgucgugauccccacgaagaaggccgggggcaccaccgagaugcucgcgaaggcccugcgcaaggugccgaccuacaacuacaucacgaccuaccccgggcagggccugaacggguacaccgucgaggaggccaagaccgugcucaagaagugcaaguccgccuucuacauccugcccagcaucaucuccaacgagaagcaggagauccugggcaccgugagcuggaaccuccgggagaugcuggcgcacgccgaggagacgcgcaagcugaugcccgucugcguggagaccaaggccaucguguccaccauccagcggaaguacaagggcaucaagauccaggagggggucguggacuacggcgcccgcuucuacuucuacaccagcaagacgaccguggccucccugaucaacacccucaacgaccugaacgagacccuggucacgaugccgcucggguacgugacccacggccugaaccuggaggaggcggcccgguacaugcgcagccucaaggugcccgccaccgucuccgugagcucccccgacgccgugaccgccuacaacggguaccugacgagcuccagcaagacccccgaggagcacuucaucgagaccaucucccuggcgggcagcuacaaggacuggagcuacuccggccagagcacccagcucgggaucgaguuccugaagcggggcgacaaguccgucuacuacacgagcaacccgaccaccuuccaccuggacggggaggugaucaccuucgacaaccucaagacgcugcugucccuccgcgaggugcggaccaucaaggucuucaccaccguggacaacaucaaccugcacacgcagguggucgacaugagcaugaccuacggccagcaguucggccccaccuaccuggacggggccgacgugaccaagaucaagccccacaacucccacgagggcaagacguucuacgugcucccgaacgacgacacccugcgcgucgaggccuucgaguacuaccacaccaccgaccccagcuuccuggggcgguacauguccgcccucaaccacacgaagaaguggaaguacccccaggugaacggccugaccagcaucaagugggccgacaacaacugcuaccuggcgaccgcccuccugacccugcagcagaucgagcucaaguucaaccccccggcccugcaggacgccuacuaccgcgcgcgggccggggaggccgccaacuucugcgcccugauccucgcguacugcaacaagacggugggcgagcugggcgacguccgcgagaccauguccuaccuguuccagcacgccaaccucgacagcugcaagcgggugcugaacgucgugugcaagaccugcgggcagcagcagaccacccugaagggcguggaggccgucauguacauggggacgcucuccuacgagcaguucaagaagggcgugcagauccccugcaccugcgggaagcaggccaccaaguaccuggugcagcaggagagccccuucgucaugauguccgcccccccggcgcaguacgagcugaagcacggcaccuucacgugcgccagcgaguacaccggcaacuaccagugcgggcacuacaagcacaucaccuccaaggagacccucuacugcaucgacggcgcccugcugacgaagagcagcgaguacaaggggcccaucaccgacguguucuacaaggagaacuccuacaccaccacgaucaagcccgugaccuacaagcucgacggcgucgugugcaccgagaucgaccccaagcuggacaacuacuacaagaaggacaacagcuacuucaccgagcagccgaucgaccuggugcccaaccagcccuaccccaacgccuccuucgacaacuucaaguucgucugcgacaacaucaaguucgccgacgaccucaaccagcugacgggguacaagaagccggcgagccgcgagcugaaggugaccuucuuccccgaccucaacggcgacguggucgccaucgacuacaagcacuacacccccuccuucaagaagggcgccaagcugcugcacaagcccaucguguggcacgugaacaacgccaccaacaaggcgacguacaagccgaacaccuggugcauccggugccucuggagcaccaagcccgucgagaccuccaacagcuucgacgugcugaaguccgaggacgcccaggggauggacaaccuggccugcgaggaccucaagcccgugagcgaggaggucguggagaaccccacgauccagaaggacgugcuggagugcaacgucaagaccaccgagguggugggcgacaucauccugaagccggccaacaacucccucaagaucaccgaggaggucgggcacacggaccugauggccgcguacguggacaacagcucccugaccaucaagaagcccaacgagcucagccgcgugcugggccugaagacccucgccacccacgggcuggccgccgucaacuccgugcccugggacacgaucgccaacuacgcgaagccguuccugaacaagguggucagcaccaccaccaacaucgugacgcgcugccucaaccgggugugcaccaacuacaugcccuacuucuucacccugcugcuccagcugugcaccuucacccgcuccacgaacagccggaucaaggccuccaugcccaccaccaucgccaagaacaccgucaagagcgugggcaaguucugccuggaggccagcuucaacuaccucaagucccccaacuucagcaagcugaucaacaucaucaucugguuccugcuccuguccgugugccugggcagccucaucuacuccacggccgcgcuggggguccugaugagcaaccucggcaugccguccuacugcaccggguaccgcgagggcuaccugaacagcaccaacgugaccaucgccacguacugcaccggcuccauccccugcagcgugugccuguccgggcucgacagccuggacaccuaccccucccuggagaccauccagaucacgaucagcuccuucaagugggaccucaccgccuucggccuggucgccgagugguuccuggccuacauccucuucacccgguucuucuacgugcuggggcuggcggccaucaugcagcucuucuucagcuacuucgccgugcacuucaucuccaacagcuggcugauguggcugaucaucaaccugguccagauggcccccaucuccgcgauggugcgcauguacaucuucuucgccagcuucuacuacguguggaagagcuacguccacgugguggacggcugcaacuccagcaccugcaugaugugcuacaagcggaaccgcgccacgcgggucgagugcaccaccaucgugaacgggguccgccgguccuucuacguguacgccaacggcggcaagggguucugcaagcuccacaacuggaacugcgugaacugcgacaccuucugcgccggcagcacguucaucuccgacgaggucgcgcgcgaccugagccugcaguucaagcggccgaucaaccccaccgaccaguccagcuacaucguggacuccgugaccgucaagaacgggagcauccaccucuacuucgacaaggccggccagaagaccuacgagcgccacucccugagccacuucgugaaccuggacaaccuccgggccaacaacacgaaggggucccugcccaucaacgugaucgucuucgacggcaagagcaagugcgaggaguccagcgccaaguccgccagcguguacuacucccagcugaugugccagcccauccuccugcuggaccaggcgcucgugagcgacgucggcgacagcgccgagguggccgugaagauguucgacgccuacgucaacaccuucuccagcaccuucaacgugccgauggagaagcugaagacccugguggccacggcggaggccgagcucgccaagaacgucucccuggacaacgugcugagcaccuucaucuccgccgcgcgccagggguucguggacagcgacgucgagaccaaggacgugguggagugccucaagcugucccaccagagcgacaucgaggucaccggcgacuccugcaacaacuacaugcugacguacaacaagguggagaacaugaccccccgggaccucggggccugcaucgacugcagcgcccgccacaucaacgcccagguggccaagucccacaacaucgcgcugaucuggaacgucaaggacuucaugagccuguccgagcagcuccggaagcagauccgcagcgccgccaagaagaacaaccugcccuucaagcugaccugcgccaccacgcgccagguggugaacgucgugaccaccaagaucgcccucaagggcgggugaggacuaguuauaagacugacuagcccgaugggccucccaacgggcccuccuccccuccuugcaccgagauuaauaaaaaaaaaaaaaaaaaaaaaaaaaaaaaaaaaaaaaaaaaaaaaaaaaaaaaaaaaaaaaaaaugcaucccccccccccccccccccccccccccccccaaaggcucuuuucagagccaccagaauu

SEQ ID NO: 21503 - RNA, 6058 nt, Artificial Sequence
  SARS-CoV-2__MT846558.1__non-structural protein 3 (NSP3) mRNA gc
aggagaaagcuuaccauggcccccaccaaggugaccuucggcgacgacacggucaucgaggugcagggguacaagagcgugaacaucaccuucgagcuggacgagcgcaucgacaagguccucaacgagaagugcuccgccuacaccguggagcugggcaccgaggugaacgaguucgcgugcgucguggccgacgccgugaucaagacgcugcagccggucagcgagcuccugaccccccuggggaucgaccucgacgagugguccauggccaccuacuaccuguucgacgagagcggcgaguucaagcuggccucccacauguacugcagcuucuacccccccgacgaggacgaggaggagggggacugcgaggaggaggaguucgagccguccacccaguacgaguacggcacggaggacgacuaccagggcaagccccucgaguucggggcgaccagcgccgcccugcagcccgaggaggagcaggaggaggacuggcuggacgacgacucccagcagaccgugggccagcaggacgggagcgaggacaaccagaccacgaccauccagaccaucguggagguccagccccagcucgagauggagcugaccccgguggugcagacgaucgaggucaacuccuucagcggcuaccugaagcucaccgacaacguguacaucaagaacgccgacaucguggaggaggcgaagaaggucaagcccaccgugguggucaacgccgccaacguguaccugaagcacgggggcggcguggccggggcccugaacaaggcgaccaacaacgccaugcaggucgaguccgacgacuacaucgccacgaacggcccccucaagguggggggcagcugcguccuguccggccacaaccuggccaagcacugccuccacgugguggggcccaacgucaacaagggcgaggacauccagcugcugaagagcgccuacgagaacuucaaccagcacgaggugcuccuggcgccgcugcucuccgccgggaucuucggcgccgaccccauccacagccugcgggugugcgucgacaccgugcgcaccaacguguaccuggccgucuucgacaagaaccucuacgacaagcugguguccagcuuccuggagaugaagagcgagaagcagguggagcagaacaucgccgagauccccaaggaggaggucaagcccuucaucaccgaguccaagccgagcguggagcagcggaagcaggacgacaagaagaucaaggcgugcguggaggaggucacgaccacccucgaggagaccaaguuccugacggagaaccugcuccuguacaucgacaucaacgggaaccugcaccccgacuccgccacccucgugagcgacaucgacaucaccuuccugaagaaggacgcccccuacaucgugggcgacgucgugcaggagggcgugcugaccgccgucgugauccccacgaagaaggccgggggcaccaccgagaugcucgcgaaggcccugcgcaagguguccaccgacaacuacaucacgaccuacccggggcagggccugaacggguacaccgucgaggaggccaagaccgugcucaagaagugcaagagcgccuucuacauccugcccuccaucaucagcaacgagaagcaggagauccugggcaccguguccuggaaccuccgggagaugcuggcgcacgccgaggagacgcgcaagcugaugcccgucugcguggagaccaaggccaucgugagcaccauccagcggaaguacaagggcaucaagauccaggagggggucguggacuacggcgcccgcuucuacuucuacaccuccaagacgaccguggccagccugaucaacacccucaacgaccugaacgagacccuggucacgaugccccucggguacgugacccacggccugaaccuggaggaggcggcccgguacaugcgcucccucaaggugccggccaccgucagcguguccagccccgacgccgugaccgccuacaacggguaccugacguccagcuccaagacccccgaggagcacuucaucgagaccaucagccuggcgggcagcuacaaggacugguccuacagcggccaguccacccagcucgggaucgaguuccugaagcggggcgacaagagcgucuacuacacguccaaccccaccaccuuccaccuggacggggaggugaucaccuucgacaaccucaagacgcugcugagccuccgcgaggugcggaccaucaaggucuucaccaccguggacaacaucaaccugcacacgcagguggucgacauguccaugaccuacggccagcaguucggcccgaccuaccuggacggggccgacgugaccaagaucaagccccacaacagccacgagggcaagacguucuacgugcuccccaacgacgacacccugcgcgucgaggccuucgaguacuaccacaccaccgacccguccuuccuggggcgguacaugagcgcccucaaccacacgaagaaguggaaguacccccaggugaacggccugaccuccaucaagugggccgacaacaacugcuaccuggcgaccgcccuccugacccugcagcagaucgagcucaaguucaacccccccgcccugcaggacgccuacuaccgcgcgcgggccggggaggccgccaacuucugcgcccugauccucgcguacugcaacaagacggugggcgagcugggcgacguccgcgagaccaugagcuaccuguuccagcacgccaaccucgacuccugcaagcgggugcugaacgucgugugcaagaccugcgggcugcagcagaccacccucaagggcguggaggccgucauguacauggggacgcugagcuacgagcaguucaagaagggcgugcagaucccgugcaccugcgggaagcaggccaccaaguaccuggugcagcaggaguccagcuucgucaugauguccgccccccccgcgcaguacgagcucaagcacggcaccuucacgugcgccagcgaguacaccggcaacuaccagugcgggcacuacaagcacaucaccagcaaggagacccuguacugcaucgacggcgcccugcucacgaaguccagcgaguacaaggggcccaucaccgacguguucuacaaggagaacuccuacaccaccacgaucaagccggugaccuacaagcuggacggcgucgugugcaccgagaucgaccccaagcuggacaacuacuacaagaaggacaacagcuacuucaccgagcagcccaucgaccucgugcccaaccagccguaccccaacgccuccuucgacaacuucaaguucgucugcgacaacaucaaguucgccgacgaccugaaccagcugacgggguacaagaagcccgcgagccgcgagcucaaggugaccuucuuccccgaccugaacggcgacguggucgccaucgacuacaagcacuacaccccguccuucaagaagggcgccaagcugcuccacaagcccaucguguggcacgugaacaacgccaccaacaaggcgacguacaagcccaacaccuggugcauccggugccuguggagcaccaagcccgucgagaccuccaacagcuucgacgugcugaaguccgaggacgcccaggggauggacaaccucgccugcgaggaccugaagccggugagcgaggaggucguggagaaccccacgauccagaaggacgugcuggagugcaacgucaagaccaccgagguggugggcgacaucauccucaagcccgccaacaacucccugaagaucaccgaggaggucgggcacacggaccugauggccgcguacguggacaacagcucccucaccaucaagaagcccaacgagcugagccgcgugcugggccucaagacccuggccacccacgggcuggccgccgucaacuccgugccgugggacacgaucgccaacuacgcgaagcccuuccucaacaagguggucagcaccaccaccaacaucgugacgcgcugccugaaccgggugugcaccaacuacaugcccuacuucuucacccugcuccugcagcugugcaccuucacccgcuccacgaacagccggaucaaggccagcaugccgaccaccaucgccaagaacaccgucaaguccgugggcaaguucugccucgaggccagcuucaacuaccugaagucccccaacuucagcaagcugaucaacaucaucaucugguuccuccugcuguccgugugccucggcagccugaucuacuccacggccgcgcuggggguccucaugagcaaccugggcaugcccuccuacugcaccggguaccgcgagggcuaccugaacagcaccaacgugaccaucgccacguacugcaccggcuccauccccugcagcgugugccucuccgggcuggacagccuggacaccuacccgucccucgagaccauccagaucacgaucagcuccuucaagugggaccugaccgccuucggccuggucgccgagugguuccucgccuacauccuguucacccgguucuucuacgugcuggggcucgcggccaucaugcagcuguucuucagcuacuucgccgugcacuucaucuccaacagcuggcugauguggcugaucaucaaccucguccagauggcccccaucagcgcgauggugcgcauguacaucuucuucgccuccuucuacuacguguggaagagcuacguccacgugguggacggcugcaacuccagcaccugcaugaugugcuacaagcggaaccgcgccacgcgggucgagugcaccaccaucgugaacgggguccgccgguccuucuacguguacgccaacggcggcaagggguucugcaagcugcacaacuggaacugcgugaacugcgacaccuucugcgccggcagcacguucaucuccgacgaggucgcgcgcgaccugagccuccaguucaagcggcccaucaaccccaccgaccaguccagcuacaucguggacuccgugaccgucaagaacgggagcauccaccuguacuucgacaaggccggccagaagaccuacgagcgccacucccugagccacuucgugaacuucgacaaccuccgggccaacaacacgaaggggucccugccgaucaacgugaucgucuucgacggcaagagcaagugcgaggaguccagcgccaaguccgccagcguguacuacagccagcugaugugccagcccauccuccugcuggaccaggcgcucguguccgacgucggcgacagcgccgagguggccgugaagauguucgacgccuacgucaacaccuucuccagcaccuucaacgugcccauggagaagcugaagacccugguggccacggcggaggccgagcucgccaagaacgucucccuggacaacgugcugagcaccuucaucuccgccgcgcgccagggguucguggacagcgacgucgagaccaaggacgugguggagugccucaagcugucccaccagagcgacaucgaggucaccggcgacuccugcaacaacuacaugcugacguacaacaagguggagaacaugaccccccgggaccucggggccugcaucgacugcagcgcccgccacaucaacgcccagguggccaagucccacaacaucgcgcugaucuggaacgucaaggacuucaugagccuguccgagcagcuccggaagcagauccgcagcgccgccaagaagaacaaccugccguucaagcugaccugcgccaccacgcgccagguggugaacgucgugaccaccaagaucgcccucaagggcgggugaggacuaguuauaagacugacuagcccgaugggccucccaacgggcccuccuccccuccuugcaccgagauuaauaaaaaaaaaaaaaaaaaaaaaaaaaaaaaaaaaaaaaaaaaaaaaaaaaaaaaaaaaaaaaaaaugcaucccccccccccccccccccccccccccccccaaaggcucuuuucagagccaccagaauu

SEQ ID NO: 21504 - RNA, 6058 nt, Artificial Sequence
  SARS-CoV-2__MT846565.1__non-structural protein 3 (NSP3) mRNA gc
aggagaaagcuuaccauggcccccaccaaggugaccuucggcgacgacacggucaucgaggugcagggguacaagagcgugaacaucaccuucgagcuggacgagcgcaucgacaagguccucaacgagaagugcuccgccuacaccguggagcugggcaccgaggugaacgaguucgcgugcgucguggccgacgccgugaucaagacgcugcagccggucagcgagcuccugaccccccuggggaucgaccucgacgagugguccauggccaccuacuaccuguucgacgagagcggcgaguucaagcuggccucccacauguacugcagcuucuacccccccgacgaggacgaggaggagggggacugcgaggaggaggaguucgagccguccacccaguacgaguacggcacggaggacgacuaccagggcaagccccucgaguucggggcgaccagcgccgcccugcagcccgaggaggagcaggaggaggacuggcuggacgacgacucccagcagaccgugggccagcaggacgggagcgaggacaaccagaccacgaccauccagaccaucguggagguccagccccagcucgagauggagcugaccccgguggugcagacgaucgaggucaacuccuucagcggcuaccugaagcucaccgacaacguguacaucaagaacgccgacaucguggaggaggcgaagaaggucaagcccaccgugguggucaacgccgccaacguguaccugaagcacgggggcggcguggccggggcccugaacaaggcgaccaacaacgccaugcaggucgaguccgacgacuacaucgccacgaacggcccccucaagguggggggcagcugcguccuguccggccacaaccuggccaagcacugccuccacgugguggggcccaacgucaacaagggcgaggacauccagcugcugaagagcgccuacgagaacuucaaccagcacgaggugcuccuggcgccgcugcucuccgccgggaucuucggcgccgaccccauccacagccugcgggugugcgucgacaccgugugcaccaacguguaccuggccgucuucgacaagaaccucuacgacaagcugguguccagcuuccuggagaugaagagcgagaagcagguggagcagaagaucgccgagauccccaaggaggaggucaagcccuucaucaccgaguccaagccgagcguggagcagcgcaagcaggacgacaagaagaucaaggcgugcguggaggaggucacgaccacccucgaggagaccaaguuccugacggagaaccugcuccuguacaucgacaucaacgggaaccugcaccccgacuccgccacccucgugagcgacaucgacaucaccuuccugaagaaggacgcccccuacaucgugggcgacgucgugcaggagggcgugcugaccgccgucgugauccccacgaagaaggccgggggcaccaccgagaugcucgcgaaggcccugcggaaggugccgaccgacaacuacaucacgaccuaccccgggcagggccugaacggguacaccgucgaggaggccaagaccgugcucaagaagugcaaguccgccuucuacauccugcccagcaucaucuccaacgagaagcaggagauccugggcaccgugagcuggaaccuccgcgagaugcuggcgcacgccgaggagacgcggaagcugaugcccgucugcguggagaccaaggccaucguguccaccauccagcgcaaguacaagggcaucaagauccaggagggggucguggacuacggcgcccgguucuacuucuacaccagcaagacgaccguggccucccugaucaacacccucaacgaccugaacgagacccuggucacgaugccgcucggguacgugacccacggccugaaccuggaggaggcggcccgcuacaugcggagccucaaggugcccgccaccgucuccgugagcucccccgacgccgugaccgccuacaacggguaccugacgagcuccagcaagacccccgaggagcacuucaucgagaccaucucccuggcgggcagcuacaaggacuggagcuacuccggccagagcacccagcucgggaucgaguuccugaagcgcggcgacaaguccgucuacuacacgagcaacccgaccaccuuccaccuggacggggaggugaucaccuucgacaaccucaagacgcugcugucccuccgggaggugcgcaccaucaaggucuucaccaccguggacaacaucaaccugcacacgcagguggucgacaugagcaugaccuacggccagcaguucggccccaccuaccuggacggggccgacgugaccaagaucaagccccacaacucccacgagggcaagacguucuacgugcucccgaacgacgacacccugcgggucgaggccuucgaguacuaccacaccaccgaccccagcuuccuggggcgcuacauguccgcccucaaccacacgaagaaguggaaguacccccaggugaacggccugaccagcaucaagugggccgacaacaacugcuaccuggcgaccgcccuccugacccugcagcagaucgagcucaaguucaaccccccggcccugcaggacgccuacuaccgggcgcgcgccggggaggccgccaacuucugcgcccugauccucgcguacugcaacaagacggugggcgagcugggcgacguccgggagaccauguccuaccuguuccagcacgccaaccucgacagcugcaagcgcgugcugaacgucgugugcaagaccugcgggcagcagcagaccacccugaagggcguggaggccgucauguacauggggacgcucuccuacgagcaguucaagaagggcgugcagauccccugcaccugcgggaagcaggccaccaaguaccuggugcagcaggagagccccuucgucaugauguccgcccccccggcgcaguacgagcugaagcacggcaccuucacgugcgccagcgaguacaccggcaacuaccagugcgggcacuacaagcacaucaccuccaaggagacccucuacugcaucgacggcgcccugcugacgaagagcagcgaguacaaggggcccaucaccgacguguucuacaaggagaacuccuacaccaccacgaucaagcccgugaccuacaagcucgacggcgucgugugcaccgagaucgaccccaagcuggacaacuacuacaagaaggacaacagcuacuucaccgagcagccgaucgaccuggugcccaaccagcccuaccccaacgccuccuucgacaacuucaaguucgucugcgacaacaucaaguucgccgacgaccucaaccagcugacgggguacaagaagccggcgagccgggagcugaaggugaccuucuuccccgaccucaacggcgacguggucgccaucgacuacaagcacuacacccccuccuucaagaagggcgccaagcugcugcacaagcccaucguguggcacgugaacaacgccaccaacaaggcgacguacaagccgaacaccuggugcauccgcugccucuggagcaccaagcccgucgagaccuccaacagcuucgacgugcugaaguccgaggacgcccaggggauggacaaccuggccugcgaggaccucaagcccgugagcgaggaggucguggagaaccccacgauccagaaggacgugcuggagugcaacgucaagaccaccgagguggugggcgacaucauccugaagccggccaacaacucccucaagaucaccgaggaggucgggcacacggaccugauggccgcguacguggacaacagcucccugaccaucaagaagcccaacgagcucagccgggugcugggccugaagacccucgccacccacgggcuggccgccgucaacuccgugcccugggacacgaucgccaacuacgcgaagccguuccugaacaagguggucagcaccaccaccaacaucgugacgcgcugccucaaccgcgugugcaccaacuacaugcccuacuucuucacccugcugcuccagcugugcaccuucacccgguccacgaacagccgcaucaaggccuccaugcccaccaccaucgccaagaacaccgucaagagcgugggcaaguucugccuggaggccagcuucaacuaccucaagucccccaacuucagcaagcugaucaacaucaucaucugguuccugcuccuguccgugugccugggcagccucaucuacuccacggccgcgcuggggguccugaugagcaaccucggcaugccguccuacugcaccggguaccgggagggcuaccugaacagcaccaacgugaccaucgccacguacugcaccggcuccauccccugcagcgugugccuguccgggcucgacagccuggacaccuaccccucccuggagaccauccagaucacgaucagcuccuucaagugggaccucaccgccuucggccuggucgccgagugguuccuggccuacauccucuucacccgcuucuucuacgugcuggggcuggcggccaucaugcagcucuucuucagcuacuucgccgugcacuucaucuccaacagcuggcugauguggcugaucaucaaccugguccagauggcccccaucuccgcgauggugcggauguacaucuucuucgccagcuucuacuacguguggaagagcuacguccacgugguggacggcugcaacuccagcaccugcaugaugugcuacaagcgcaaccgggccacgcgcgucgagugcaccaccaucgugaacgggguccggcgcuccuucuacguguacgccaacggcggcaagggguucugcaagcuccacaacuggaacugcgugaacugcgacaccuucugcgccggcagcacguucaucuccgacgaggucgcgcgggaccugagccugcaguucaagcgcccgaucaaccccaccgaccaguccagcuacaucguggacuccgugaccgucaagaacgggagcauccaccucuacuucgacaaggccggccagaagaccuacgagcggcacucccugagccacuucgugaaccuggacaaccuccgcgccaacaacacgaaggggucccugcccaucaacgugaucgucuucgacggcaagagcaagugcgaggaguccagcgccaaguccgccagcguguacuacucccagcugaugugccagcccauccuccugcuggaccaggcgcucgugagcgacgucggcgacagcgccgagguggccgugaagauguucgacgccuacgucaacaccuucuccagcaccuucaacgugccgauggagaagcugaagacccugguggccacggcggaggccgagcucgccaagaacgucucccuggacaacgugcugagcaccuucaucuccgccgcgcggcagggguucguggacagcgacgucgagaccaaggacgugguggagugccucaagcugucccaccagagcgacaucgaggucaccggcgacuccugcaacaacuacaugcugacguacaacaagguggagaacaugaccccccgcgaccucggggccugcaucgacugcagcgcccggcacaucaacgcccagguggccaagucccacaacaucgcgcugaucuggaacgucaaggacuucaugagccuguccgagcagcuccgcaagcagauccggagcgccgccaagaagaacaaccugcccuucaagcugaccugcgccaccacgcgccagguggugaacgucgugaccaccaagaucgcccucaagggcgggugaggacuaguuauaagacugacuagcccgaugggccucccaacgggcccuccuccccuccuugcaccgagauuaauaaaaaaaaaaaaaaaaaaaaaaaaaaaaaaaaaaaaaaaaaaaaaaaaaaaaaaaaaaaaaaaaugcaucccccccccccccccccccccccccccccccaaaggcucuuuucagagccaccagaauu

SEQ ID NO: 21505 - RNA, 6058 nt, Artificial Sequence
  SARS-CoV-2__MT846623.1__non-structural protein 3 (NSP3) mRNA gc
aggagaaagcuuaccauggcccccaccaaggugaccuucggcgacgacacggucaucgaggugcagggguacaagagcgugaacaucaccuucgagcuggacgagcgcaucgacaagguccucaacgagaagugcuccgccuacaccguggagcugggcaccgaggugaacgaguucgcgugcgucguggccgacgccgugaucaagacgcugcagccggucagcgagcuccugaccccccuggggaucgaccucgacgagugguccauggccaccuacuaccuguucgacgagagcggcgaguucaagcuggccucccacauguacugcagcuucuacccccccgacgaggacgaggaggagggggacugcgaggaggaggaguucgagccguccacccaguacgaguacggcacggaggacgacuaccagggcaagccccucgaguucggggcgaccagcgccgcccugcagcuggaggaggagcaggaggaggacuggcucgacgacgacucccagcagaccgugggccagcaggacgggagcgaggacaaccagaccacgaccauccagaccaucguggagguccagccccagcuggagauggagcugacccccguggugcagacgaucgaggucaacuccuucagcggcuaccucaagcugaccgacaacguguacaucaagaacgccgacaucguggaggaggcgaagaaggucaagccgaccgugguggucaacgccgccaacguguaccugaagcacgggggcggcguggccggggcccucaacaaggcgaccaacaacgccaugcaggucgaguccgacgacuacaucgccacgaacggcccccugaagguggggggcagcugcguccuguccggccacaaccucgccaagcacugccugcacgugguggggcccaacgucaacaagggcgaggacauccagcugcucaagagcgccuacgagaacuucaaccagcacgaggugcugcuggcgccccuccuguccgccgggaucuucggcgccgacccgauccacagccugcgggugugcgucgacaccgugcgcaccaacguguaccucgccgucuucgacaagaaccuguacgacaagcugguguccagcuuccucgagaugaagagcgagaagcagguggagcagaagaucgccgagauccccaaggaggaggucaagcccuucaucaccgaguccaagcccagcguggagcagcggaagcaggacgacaagaagaucaaggcgugcguggaggaggucacgaccacccuggaggagaccaaguuccugacggagaaccuccugcuguacaucgacaucaacgggaaccuccacccggacuccgccacccuggugagcgacaucgacaucaccuuccugaagaaggacgcccccuacaucgugggcgacgucgugcaggagggcgugcucaccgccgucgugauccccacgaagaaggccgggggcaccaccgagaugcuggcgaaggcccugcgcaaggugcccaccgacaacuacaucacgaccuacccggggcagggccucaacggguacaccgucgaggaggccaagaccgugcugaagaagugcaaguccgccuucuacauccugcccagcaucaucuccaacgagaagcaggagauccucggcaccgugagcuggaaccugcgggagaugcuggcgcacgccgaggagacgcgcaagcugaugcccgucugcguggagaccaaggccaucguguccaccauccagcggaaguacaagggcaucaagauccaggagggggucguggacuacggcgcccgcuucuacuucuacaccagcaagacgaccguggccucccucaucaacacccugaacgaccugaacgagacccucgucacgaugccccugggguacgugacccacggccugaaccucgaggaggcggcccgguacaugcgcagccugaaggugccggccaccgucuccgugagcucccccgacgccgugaccgccuacaacggguaccugacgagcuccagcaagacccccgaggagcacuucaucgagaccaucucccucgcgggcagcuacaaggacuggagcuacuccggccagagcacccagcuggggaucgaguuccugaagcggggcgacaaguccgucuacuacacgagcaaccccaccaccuuccaccucgacggggaggugaucaccuucgacaaccugaagacgcugcucucccugcgcgaggugcggaccaucaaggucuucaccaccguggacaacaucaaccugcacacgcagguggucgacaugagcaugaccuacggccagcaguucggcccgaccuaccucgacggggccgacgugaccaagaucaagccccacaacucccacgagggcaagacguucuacgugcugcccaacgacgacacccugcgcgucgaggccuucgaguacuaccacaccaccgacccgagcuuccucgggcgguacauguccgcccugaaccacacgaagaaguggaaguacccccaggugaacggccugaccagcaucaagugggccgacaacaacugcuaccucgcgaccgcccugcugacccuccagcagaucgagcugaaguucaacccccccgcccugcaggacgccuacuaccgcgcgcgggccggggaggccgccaacuucugcgcccucauccuggcguacugcaacaagacggugggcgagcugggcgacguccgcgagaccauguccuaccucuuccagcacgccaaccuggacagcugcaagcgggugcugaacgucgugugcaagaccugcgggcagcagcagaccacccucaagggcguggaggccgucauguacauggggacgcuguccuacgagcaguucaagaagggcgugcagaucccgugcaccugcgggaagcaggccaccaaguaccuggugcagcaggagagccccuucgucaugauguccgccccccccgcgcaguacgagcucaagcacggcaccuucacgugcgccagcgaguacaccggcaacuaccagugcgggcacuacaagcacaucaccuccaaggagacccuguacugcaucgacggcgcccugcucacgaagagcagcgaguacaaggggccgaucaccgacguguucuacaaggagaacuccuacaccaccacgaucaagcccgugaccuacaagcuggacggcgucgugugcaccgagaucgaccccaagcuggacaacuacuacaagaaggacaacagcuacuucaccgagcagcccaucgaccucgugccgaaccagcccuaccccaacgccuccuucgacaacuucaaguucgucugcgacaacaucaaguucgccgacgaccugaaccagcugacgggguacaagaagcccgcgagccgcgagcucaaggugaccuucuucccggaccugaacggcgacguggucgccaucgacuacaagcacuacacccccuccuucaagaagggcgccaagcugcuccacaagcccaucguguggcacgugaacaacgccaccaacaaggcgacguacaagcccaacaccuggugcauccggugccuguggagcaccaagccggucgagaccuccaacagcuucgacgugcugaaguccgaggacgcccaggggauggacaaccucgccugcgaggaccugaagcccgugagcgaggaggucguggagaaccccacgauccagaaggacgugcuggagugcaacgucaagaccaccgagguggugggcgacaucauccucaagcccgccaacaacucccugaagaucaccgaggaggucgggcacacggaccugauggccgcguacguggacaacagcucccucaccaucaagaagccgaacgagcugagccgcgugcugggccucaagacccuggccacccacgggcuggccgccgucaacuccgugcccugggacacgaucgccaacuacgcgaagcccuuccucaacaagguggucagcaucaccaccaacaucgugacccgcugccugaaccgggugugcacgaacuacaugccguacuucuucacccugcuccugcagcugugcaccuucacccgcuccaccaacagccggaucaaggccuccaugcccacgaccaucgccaagaacaccgucaagagcgugggcaaguucugccucgaggccagcuucaacuaccugaagucccccaacuucagcaagcugaucaacaucaucaucugguuccuccugcuguccgugugccucggcagccugaucuacuccaccgccgcgcuggggguccucaugagcaaccugggcaugcccuccuacugcacgggguaccgcgagggcuaccugaacagcaccaacgugaccaucgccaccuacugcacgggcuccaucccgugcagcgugugccucuccgggcuggacagccuggacaccuaccccucccucgagaccauccagaucaccaucagcuccuucaagugggaccugacggccuucggccuggucgccgagugguuccucgccuacauccuguucacccgguucuucuacgugcuggggcucgcggccaucaugcagcuguucuucagcuacuucgccgugcacuucaucuccaacagcuggcugauguggcugaucaucaaccucguccagauggcccccaucuccgcgauggugcgcauguacaucuucuucgccagcuucuacuacguguggaagagcuacguccacgugguggacggcugcaacuccagcaccugcaugaugugcuacaagcggaaccgcgccacccgggucgagugcacgaccaucgugaacgggguccgccgguccuucuacguguacgccaacggcggcaagggguucugcaagcugcacaacuggaacugcgugaacugcgacaccuucugcgccggcagcaccuucaucuccgacgaggucgcgcgcgaccugagccuccaguucaagcggcccaucaacccgacggaccaguccagcuacaucguggacuccgugaccgucaagaacgggagcauccaccuguacuucgacaaggccggccagaagaccuacgagcgccacucccugagccacuucgugaaccucgacaaccugcgggccaacaacaccaaggggucccugcccaucaacgugaucgucuucgacggcaagagcaagugcgaggaguccagcgccaaguccgccagcguguacuacucccagcucaugugccagcccauccugcugcucgaccaggcgcuggugagcgacgucggcgacagcgccgagguggccgugaagauguucgacgccuacgucaacacguucuccagcaccuucaacgugcccauggagaagcugaagacccucguggccaccgcggaggccgagcuggccaagaacgucucccuggacaacgugcucagcacguucaucuccgccgcgcgccagggguucguggacagcgacgucgagaccaaggacgugguggagugccugaagcugucccaccagagcgacaucgaggucaccggcgacuccugcaacaacuacaugcucaccuacaacaagguggagaacaugacgccgcgggaccugggggccugcaucgacugcagcgcccgccacaucaacgcccagguggccaagucccacaacaucgcgcugaucuggaacgucaaggacuucaugagccucuccgagcagcugcggaagcagauccgcagcgccgccaagaagaacaaccugcccuucaagcucaccugcgccaccacccgccagguggugaacgucgugacgaccaagaucgcccugaagggcgggugaggacuaguuauaagacugacuagcccgaugggccucccaacgggcccuccuccccuccuugcaccgagauuaauaaaaaaaaaaaaaaaaaaaaaaaaaaaaaaaaaaaaaaaaaaaaaaaaaaaaaaaaaaaaaaaaugcaucccccccccccccccccccccccccccccccaaaggcucuuuucagagccaccagaauu

SEQ ID NO: 21506 - RNA, 6058 nt, Artificial Sequence
  SARS-CoV-2__MT846644.1__non-structural protein 3 (NSP3) mRNA gc
aggagaaagcuuaccauggcccccaccaaggugaccuucggcgacgacacggucaucgaggugcagggguacaagagcgugaacaucaccuucgagcuggacgagcgcaucgacaagguccucaacgagaagugcuccgccuacaccguggagcugggcaccgaggugaacgaguucgcgugcgucguggccgacgccgugaucaagacgcugcagccggucagcgagcuccugaccccccuggggaucgaccucgacgagugguccauggccaccuacuaccuguucgacgagagcggcgacuucaagcuggccucccacauguacugcagcuucuacccccccgacgaggacgaggaggagggggacugcgaggaggaggaguucgagccguccacccaguacgaguacggcacggaggacgacuaccagggcaagccccucgaguucggggcgaccagcgccgcccugcagcccgaggaggagcaggaggaggacuggcuggacgacgacucccagcagaccgugggccagcaggacgggagcgaggacaaccagaccacgaccauccagaccaucguggagguccagccccagcucgagauggagcugaccccgguggugcagacgaucgaggucaacuccuucagcggcuaccugaagcucaccgacaacguguacaucaagaacgccgacaucguggaggaggcgaagaaggucaagcccaccgugguggucaacgccgccaacguguaccugaagcacgggggcggcguggccggggcccugaacaaggcgaccaacaacgccaugcaggucgaguccgacgacuacaucgccacgaacggcccccucaagguggggggcagcugcguccuguccggccacaaccuggccaagcacugccuccacgugguggggcccaacgucaacaagggcgaggacauccagcugcugaagagcgccuacgagaacuucaaccagcacgaggugcuccuggcgccgcugcucuccgccgggaucuucggcgccgaccccauccacagccugcgggugugcgucgacaccgugcgcaccaacguguaccuggccgucuucgacaagaaccucuacgacaagcugguguccagcuuccuggagaugaagagcgagaagcagguggagcagaagaucgccgagauccccaaggaggaggucaagcccuucaucaccgaguccaagccgagcguggagcagcggaagcaggacgacaagaagaucaaggcgugcguggaggaggucacgaccacccucgaggagaccaaguuccugacggagaaccugcuccuguacaucgacaucaacgggaaccugcaccccgacuccgccacccucgugagcgacaucgacaucaccuuccugaagaaggacgcccccuacaucgugggcgacgucgugcaggagggcgugcugaccgccgucgugauccccacgaagaaggccgggggcaccaccgagaugcucgcgaaggcccugcgcaaggugccgaccgacaacuacaucacgaccuaccccgggcagggccugaacggguacaccgucgaggaggccaagaccgugcucaagaagugcaaguccgccuucuacauccugcccagcaucaucuccaacgagaagcaggagauccugggcaccgugagcuggaaccuccgggagaugcuggcgcacgccgaggagacgcgcaagcugaugcccgucugcguggagaccaaggccaucguguccaccauccagcggaaguacaagggcaucaagauccaggagggggucguggacuacggcgcccgcuucuacuucuacaccagcaagacgaccguggccucccugaucaacacccucaacgaccugaacgagacccuggucacgaugccgcucggguacgugacccacggccugaaccuggaggaggcggcccgguacaugcgcagccucaaggugcccgccaccgucuccgugagcucccccgacgccgugaccgccuacaacggguaccugacgagcuccagcaagacccccgaggagcacuucaucgagaccaucucccuggcgggcagcuacaaggacuggagcuacuccggccagagcacccagcucgggaucgaguuccugaagcggggcgacaaguccgucuacuacacgagcaacccgaccaccuuccaccuggacggggaggugaucaccuucgacaaccucaagacgcugcugucccuccgcgaggugcggaccaucaaggucuucaccaccguggacaacaucaaccugcacacgcagguggucgacaugagcaugaccuacggccagcaguucggccccaccuaccuggacggggccgacgugaccaagaucaagccccacaacucccacgagggcaagacguucuacgugcucccgaacgacgacacccugcgcgucgaggccuucgaguacuaccacaccaccgaccccagcuuccuggggcgguacauguccgcccucaaccacacgaagaaguggaaguacccccaggugaacggccugaccagcaucaagugggccgacaacaacugcuaccuggcgaccgcccuccugacccugcagcagaucgagcucaaguucaaccccccggcccugcaggacgccuacuaccgcgcgcgggccggggaggccgccaacuucugcgcccugauccucgcguacugcaacaagacggugggcgagcugggcgacguccgcgagaccauguccuaccuguuccagcacgccaaccucgacagcugcaagcgggugcugaacgucgugugcaagaccugcgggcagcagcagaccacccugaagggcguggaggccgucauguacauggggacgcucuccuacgagcaguucaagaagggcgugcagauccccugcaccugcgggaagcaggccaccaaguaccuggugcagcaggagagccccuucgucaugauguccgcccccccggcgcaguacgagcugaagcacggcaccuucacgugcgccagcgaguacaccggcaacuaccagugcgggcacuacaagcacaucaccuccaaggagacccucuacugcaucgacggcgcccugcugacgaagagcagcgaguacaaggggcccaucaccgacguguucuacaaggagaacuccuacaccaccacgaucaagcccgugaccuacaagcucgacggcgucgugugcaccgagaucgaccccaagcuggacaacuacuacaagaaggacaacagcuacuucaccgagcagccgaucgaccuggugcccaaccagcccuaccccaacgccuccuucgacaacuucaaguucgucugcgacaacaucaaguucgccgacgaccucaaccagcugacgggguacaagaagccggcgagccgcgagcugaaggugaccuucuuccccgaccucaacggcgacguggucgccaucgacuacaagcacuacacccccuccuucaagaagggcgccaagcugcugcacaagcccaucguguggcacgugaacaacgccaccaacaaggcgacguacaagccgaacaccuggugcauccggugccucuggagcaccaagcccgucgagaccuccaacagcuucgacgugcugaaguccgaggacgcccaggggauggacaaccuggccugcgaggaccucaagcccgugagcgaggaggucguggagaaccccacgauccagaaggacgugcuggagugcaacgucaagaccaccgagguggugggcgacaucauccugaagccggccaacaacucccucaagaucaccgaggaggucgggcacacggaccugauggccgcguacguggacaacagcucccugaccaucaagaagcccaacgagcucagccgcgugcugggccugaagacccucgccacccacgggcuggccgccgucaacuccgugcccugggacacgaucgccaacuacgcgaagccguuccugaacaagguggucagcaccaccaccaacaucgugacgcgcugccucaaccgggugugcaccaacuacaugcccuacuucuucacccugcugcuccagcugugcaccuucacccgcuccacgaacagccggaucaaggccuccaugcccaccaccaucgccaagaacaccgucaagagcgugggcaaguucugccuggaggccagcuucaacuaccucaagucccccaacuucagcaagcugaucaacaucaucaucugguuccugcuccuguccgugugccugggcagccucaucuacuccacggccgcgcuggggguccugaugagcaaccucggcaugccguccuacugcaccggguaccgcgagggcuaccugaacagcaccaacgugaccaucgccacguacugcaccggcuccauccccugcagcgugugccuguccgggcucgacagccuggacaccuaccccucccuggagaccauccagaucacgaucagcuccuucaagugggaccucaccgccuucggccuggucgccgagugguuccuggccuacauccucuucacccgguucuucuacgugcuggggcuggcggccaucaugcagcucuucuucagcuacuucgccgugcacuucaucuccaacagcuggcugauguggcugaucaucaaccugguccagauggcccccaucuccgcgauggugcgcauguacaucuucuucgccagcuucuacuacguguggaagagcuacguccacgugguggacggcugcaacuccagcaccugcaugaugugcuacaagcggaaccgcgccacgcgggucgagugcaccaccaucgugaacgggguccgccgguccuucuacguguacgccaacggcggcaagggguucugcaagcuccacaacuggaacugcgugaacugcgacaccuucugcgccggcagcacguucaucuccgacgaggucgcgcgcgaccugagccugcaguucaagcggccgaucaaccccaccgaccaguccagcuacaucguggacuccgugaccgucaagaacgggagcauccaccucuacuucgacaaggccggccagaagaccuacgagcgccacucccugagccacuucgugaaccuggacaaccuccgggccaacaacacgaaggggucccugcccaucaacgugaucgucuucgacggcaagagcaagugcgaggaguccagcgccaaguccgccagcguguacuacucccagcugaugugccagcccauccuccugcuggaccaggcgcucgugagcgacgucggcgacagcgccgagguggccgugaagauguucgacgccuacgucaacaccuucuccagcaccuucaacgugccgauggagaagcugaagacccugguggccacggcggaggccgagcucgccaagaacgucucccuggacaacgugcugagcaccuucaucuccgccgcgcgccagggguucguggacagcgacgucgagaccaaggacgugguggagugccucaagcugucccaccagagcgacaucgaggucaccggcgacuccugcaacaacuacaugcugacguacaacaagguggagaacaugaccccccgggaccucggggccugcaucgacugcagcgcccgccacaucaacgcccagguggccaagucccacaacaucgcgcugaucuggaacgucaaggacuucaugagccuguccgagcagcuccggaagcagauccgcagcgccgccaagaagaacaaccugcccuucaagcugaccugcgccaccacgcgccagguggugaacgucgugaccaccaagaucgcccucaagggcgggugaggacuaguuauaagacugacuagcccgaugggccucccaacgggcccuccuccccuccuugcaccgagauuaauaaaaaaaaaaaaaaaaaaaaaaaaaaaaaaaaaaaaaaaaaaaaaaaaaaaaaaaaaaaaaaaaugcaucccccccccccccccccccccccccccccccaaaggcucuuuucagagccaccagaauu

SEQ ID NO: 21507 - RNA, 6058 nt, Artificial Sequence
  SARS-CoV-2__MT846686.1__non-structural protein 3 (NSP3) mRNA gc
aggagaaagcuuaccauggcccccaccaaggugaccuucggcgacgacacggucaucgaggugcagggguacaagagcgugaacaucaccuucgagcuggacgagcgcaucgacaagguccucaacgagaagugcuccgccuacaccguggagcugggcaccgaggugaacgaguucgcgugcgucguggccgacgccgugaucaagacgcugcagccggucagcgagcuccugaccccccuggggaucgaccucgacgagugguccauggccaccuacuaccuguucgacgagagcggcgaguucaagcuggccucccacauguacugcagcuucuacccccccgacgaggacgaggaggagggggacugcgaggaggaggaguucgagccguccacccaguacgaguacggcacggaggacgacuaccagggcaagccccucgaguucggggcgaccagcgccgcccugcagcccgaggaggagcaggaggaggacuggcuggacgacgacucccagcagaccgugggccagcaggacgggagcgaggacaaccagaccacgaccauccagaccaucguggagguccagccccagcucgagauggagcugaccccgguggugcagacgaucgaggucaacuccuucagcggcuaccugaagcucaccgacaacguguacaucaagaacgccgacaucguggaggaggcgaagaaggucaagcccaccgugguggucaacgccgccaacguguaccugaagcacgggggcggcguggccggggcccugaacaaggcgaccaacaacgccaugcaggucgaguccgacgacuacaucgccacgaacggcccccucaagguggggggcagcugcguccuguccggccacaaccuggccaagcacugccuccacgugguggggcccaacgucaacaagggcgaggacauccagcugcugaagagcgccuacgagaacuucaaccagcacgaggugcuccuggcgccgcugcucuccgccgggaucuucggcgccgaccccauccacagccugcgggugugcgucgacaccgugcgcaccaacguguaccuggccgucuucgacaagaaccucuacgacaagcugguguccagcuuccuggagaugaagagcgagaagcagguggagcagaagaucgccgagauccccaaggaggaggucaagcccuucaucaccgaguccaagccgagcguggagcagcggaagcaggacgacaagaagaucaaggcgugcguggaggaggucacgaccacccucgaggagaccaaguuccugacggagaaccugcuccuguacaucgacaucaacgggaaccugcaccccgacuccgccacccucgugagcgacaucgacaucaccuuccugaagaaggacgcccccuacaucgugggcgacgucgugcaggagggcgugcugaccgccgucgugauccccacgaagaaggccgggggcaccaccgagaugcucgcgaaggcccugcgcaaggugccgaccgacaacuacaucacgaccuaccccgggcagggccugaacggguacaccgucgaggaggccaagaccgugcucaagaagugcaaguccgccuucuacauccugcccagcaucaucuccaacgagaagcaggagauccugggcaccgugagcuggaaccuccgggagaugcuggcgcacgccgaggagacgcgcaagcugaugcccgucugcguggagaccaaggccaucguguccaccauccagcggaaguacaagggcaucaagauccaggagggggucguggacuacggcgcccgcuucuacuucuacaccagcaagacgaccguggccucccugaucaacacccucaacgaccugaacgagacccuggucacgaugccgcucggguacgugacccacggccugaaccuggaggaggcggcccgguacaugcgcagccucaaggugcccgccaccgucuccgugagcucccccgacgccgugaccgccuacaacggguaccugacgagcuccagcaagacccccgaggagcacuucaucgagaccaucucccuggcgggcagcuacaaggacuggagcuacuccggccagagcacccagcucgggaucgaguuccugaagcggggcgacaaguccgucuacuacacgagcaacccgaccaccuuccaccuggacggggaggugaucaccuucgacaaccucaagacgcugcugucccuccgcgaggugcggaccaucaaggucuucaccaccguggacaacaucaaccugcacacgcagguggucgacaugagcaugaccuacggccagcaguucggccccaccuaccuggacggggccgacgugaccaagaucaagccccacaacucccacgagggcaagacguucuacgugcucccgaacgacgacacccugcgcgucgaggccuucgaguacuaccacaccaccgaccccagcuuccuggggcgguacauguccgcccucaaccacacgaagaaguggaaguacccccaggugaacggccugaccagcaucaagugggccgacaacaacugcuaccuggcgaccgcccuccugacccugcagcagaucgagcucaaguucaaccccccggcccugcaggacgccuacuaccgcgcgcgggccggggaggccgccaacuucugcgcccugauccucgcguacugcaacaagacggugggcgagcugggcgacguccgcgagaccauguccuaccuguuccagcacgccaaccucgacagcugcaagcgggugcugaacgucgugugcaagaccugcgggcagcagcagaccacccugaagggcguggaggccgucauguacauggggacgcucuccuacgagcaguucaagaagggcgugcagauccccugcaccugcgggaagcaggccaccaaguaccuggugcagcaggagagccccuucgucaugauguccgcccccccggcgcaguacgagcugaagcacggcaccuucacgugcgccagcgaguacaccggcaacuaccagugcgggcacuacaagcacaucaccuccaaggagacccucuacugcaucgacggcgcccugcugacgaagagcagcgaguacaaggggcccaucaccgacguguucuacaaggagaacuccuacaccaccacgaucaagcccgugaccuacaagcucgacggcgucgugugcaccgagaucgaccccaagcuggacaacuacuacaagaaggacaacagcuacuucaccgagcagccgaucgaccuggugcccaaccagcccuaccccaacgccuccuucgacaacuucaaguucgucugcgacaacaucaaguucgccgacgaccucaaccagcugacgggguacaagaagccggcgagccgcgagcugaaggugaccuucuuccccgaccucaacggcgacguggucgccaucgacuacaagcacuacacccccuccuucaagaagggcgccaagcugcugcacaagcccaucguguggcacgugaacaacgccaccaacaaggcgacguacaagccgaacaccuggugcauccggugccucuggagcaccaagcccgucgagaccuccaacagcuucgacgugcugaaguccgaggacgcccaggggauggacaaccuggccugcgaggaccucaagcccgugagcgaggaggucguggagaaccccacgauccagaaggacgugcuggagugcaacgucaagaccaccgagguggugggcgacaucauccugaagccggccaacaacucccucaagaucaccgaggaggucgggcacacggaccugauggccgcguacguggacaacagcucccugaccaucaagaagcccaacgagcucagccgcgugcugggccugaagacccucgccacccacgggcuggccgccgucaacuccgugcccugggacacgaucgccaacuacgcgaagccguuccugaacaagguggucagcaccaccaccaacaucgugacgcgcugccucaaccgggugugcaccaacuacaugcccuacuucuucacccugcugcuccagcugugcaccuucacccgcuccacgaacagccggaucaaggccuccaugcccaccaccaucgccaagaacaccgucaagagcgugggcaaguucugccuggaggccagcuucaacuaccucaagucccccaacuucagcaagcugaucaacaucaucaucugguuccugcuccuguccgugugccugggcagccucaucuacuccacggccgcgcuggggguccugaugagcaaccucggcaugccguccuacugcaccggguaccgcgagggcuaccugaacagcaccaacgugaccaucgccacguacugcaccggcuccauccccugcagcgugugccuguccgggcucgacagccuggacaccuaccccucccuggagaccauccagaucacgaucagcuccuucaagugggaccucaccgccuucggccuggucgccgagugguuccuggccuacauccucuucacccgguucuucuacgugcuggggcuggcggccaucaugcagcucuucuucagcuacuucgccgugcacuucaucuccaacagcuggcugauguggcugaucaucaaccugguccagauggcccccaucuccgcgauggugcgcauguacaucuucuucgccagcuucuacuacguguggaagagcuacguccacgugguggacggcugcaacuccagcaccugcaugaugugcuacaagcggaaccgcgccacgcgggucgagugcaccaccaucgugaacggggucaagcgcuccuucuacguguacgccaacggcggcaagggguucugcaagcuccacaacuggaacugcgugaacugcgacaccuucugcgccggcagcacguucaucuccgacgaggucgcgcgggaccugagccugcaguucaagcgcccgaucaaccccaccgaccaguccagcuacaucguggacuccgugaccgucaagaacgggagcauccaccucuacuucgacaaggccggccagaagaccuacgagcggcacucccugagccacuucgugaaccuggacaaccuccgcgccaacaacacgaaggggucccugcccaucaacgugaucgucuucgacggcaagagcaagugcgaggaguccagcgccaaguccgccagcguguacuacucccagcugaugugccagcccauccuccugcuggaccaggcgcucgugagcgacgucggcgacagcgccgagguggccgugaagauguucgacgccuacgucaacaccuucuccagcaccuucaacgugccgauggagaagcugaagacccugguggccacggcggaggccgagcucgccaagaacgucucccuggacaacgugcugagcaccuucaucuccgccgcgcggcagggguucguggacagcgacgucgagaccaaggacgugguggagugccucaagcugucccaccagagcgacaucgaggucaccggcgacuccugcaacaacuacaugcugacguacaacaagguggagaacaugaccccccgcgaccucggggccugcaucgacugcagcgcccggcacaucaacgcccagguggccaagucccacaacaucgcgcugaucuggaacgucaaggacuucaugagccuguccgagcagcuccgcaagcagauccggagcgccgccaagaagaacaaccugcccuucaagcugaccugcgccaccacgcgccagguggugaacgucgugaccaccaagaucgcccucaagggcgggugaggacuaguuauaagacugacuagcccgaugggccucccaacgggcccuccuccccuccuugcaccgagauuaauaaaaaaaaaaaaaaaaaaaaaaaaaaaaaaaaaaaaaaaaaaaaaaaaaaaaaaaaaaaaaaaaugcaucccccccccccccccccccccccccccccccaaaggcucuuuucagagccaccagaauu

SEQ ID NO: 21508 - RNA, 6058 nt, Artificial Sequence
  SARS-CoV-2__MT847211.1__non-structural protein 3 (NSP3) mRNA gc
aggagaaagcuuaccauggcccccaccaaggugaccuucggcgacgacacggucaucgaggugcagggguacaagagcgugaacaucaccuucgagcuggacgagcgcaucgacaagguccucaacgagaagugcuccgccuacaccguggagcugggcaccgaggugaacgaguucgcgugcgucguggccgacgccgugaucaagacgcugcagccggucagcgagcuccugaccccccuggggaucgaccucgacgagugguccauggccaccuacuaccuguucgacgagagcggcgaguucaagcuggccucccacauguacugcagcuucuacccccccgacgaggacgaggaggagggggacugcgaggaggaggaguucgagccguccacccaguacgaguacggcacggaggacgacuaccagggcaagccccucgaguucggggcgaccagcgccgcccugcagcccgaggaggagcaggaggaggacuggcuggacgacgacucccagcagaccgugggccagcaggacgggagcgaggacaaccagaccacgaccauccagaccaucguggagguccagccccagcucgagauggagcugaccccgguggugcagacgaucgaggucaacuccuucagcggcuaccugaagcucaccgacaacguguacaucaagaacgccgacaucguggaggaggcgaagaaggucaagcccaccgugguggucaacgccgccaacguguaccugaagcacgggggcggcguggccggggcccugaacaaggcgaccaacaacgccaugcaggucgaguccgacgacuacaucgccacgaacggcccccucaagguggggggcagcugcguccuguccggccacaaccuggccaagcacugccuccacgugguggggcccaacgucaacaagggcgaggacauccagcugcugaagagcgccuacgagaacuucaaccagcacgaggugcuccuggcgccgcugcucuccgccgggaucuucggcgccgaccccauccacagccugcgggugugcgucgacaccgugcgcaccaacguguaccuggccgucuucgacaagaaccucuacgacaagcugguguccagcuuccuggagaugaagagcgagaagcagguggagcagaagaucgccgagauccccaaggaggaggucaagcccuucaucaccgaguccaagccgagcguggagcagcggaagcaggacgacaagaagaucaaggcgugcguggaggaggucacgaccacccucgaggagaccaaguuccugacggagaaccugcuccuguacaucgacaucaacgggaaccugcaccccgacuccgccacccucgugagcgacaucgacaucaccuuccugaagaaggacgcccccuacaucgugggcgacgucgugcaggagggcgugcugaccgccgucgugauccccacgaagaaggccgggggcaccaccgagaugcucgcgaaggcccugcgcaaggugccgaccgacaacuacaucacgaccuaccccgggcagggccugaacggguacaccgucgaggaggccaagaccgugcucaagaagugcaaguccgccuucuacauccugcccagcaucaucuccaacgagaagcaggagauccugggcaccgugagcuggaaccuccgggagaugcuggcgcacgccgaggagacgcgcaagcugaugcccgucugcguggagaccaaggccaucguguccaccauccagcggaaguacaagggcaucaagauccaggagggggucguggacuacggcgcccgcuucuacuucuacaccagcaagacgaccguggccucccugaucaacacccucaacgaccugaacgagacccuggucacgaugccgcucggguacgugacccacggccugaaccuggaggaggcggcccgguacaugcgcagccucaaggugcccgccaccgucuccgugagcucccccgacgccgugaccgccuacaacggguaccugacgagcuccagcaagacccccgaggagcacuucaucgagaccaucucccuggcgggcagcuacaaggacuggagcuacuccggccagagcacccagcucgggaucgaguuccugaagcggggcgacaaguccgucuacuacacgagcaacccgaccaccuuccaccuggacggggaggugaucaccuucgacaaccucaagacgcugcugucccuccgcgaggugcggaccaucaaggucuucaccaccguggacaacaucaaccugcacacgcagguggucgacaugagcaugaccuacggccagcaguucggccccaccuaccuggacggggccgacgugaccaagaucaagccccacaacucccacgagggcaagacguucuacgugcucccgaacgacgacacccugcgcgucgaggccuucgaguacuaccacaccaccgaccccagcuuccuggggcgguacauguccgcccucaaccacacgaagaaguggaaguacccccaggugaacggccugaccagcaucaagugggccgacaacaacugcuaccuggcgaccgcccuccugacccugcagcagaucgagcucaaguucaaccccccggcccugcaggacgccuacuaccgcgcgcgggccggggaggccgccaacuucugcgcccugauccucgcguacugcaacaagacggugggcgagcugggcgacguccgcgagaccauguccuaccuguuccagcacgccaaccucgacagcugcaagcgggugcugaacgucgugugcaagaccugcgggcagcagcagaccacccugaagggcguggaggccgucauguacauggggacgcucuccuacgagcaguucaagaagggcgugcagauccccugcaccugcgggaagcaggccaccaaguaccuggugcagcaggagagccccuucgucaugauguccgcccccccggcgcaguacgagcugaagcacggcaccuucacgugcgccagcgaguacaccggcaacuaccagugcgggcacuacaagcacaucaccuccaaggagacccucuacugcaucgacggcgcccugcugacgaagagcagcgaguacaaggggcccaucaccgacguguucuacaaggagaacuccuacaccaccacgaucaagcccgugaccuacaagcucgacggcgucgugugcaccgagaucgaccccaagcuggacaacuacuacaagaaggacaacagcuacuucaccgagcagccgaucgaccuggugcccaaccagcccuaccccaacgccuccuucgacaacuucaaguucgucugcgacaacaucaaguucgccgacgaccucaaccagcugacgggguacaagaagccggcgagccgcgagcugaaggugaccuucuuccccgaccucaacggcgacguggucgccaucgacuacaagcacuacacccccuccuucaagaagggcgccaagcugcugcacaagcccaucguguggcacgugaacaacgccaccaacaaggcgacguacaagccgaacaccuggugcauccggugccucuggagcaccaagcccgucgagaccuccaacagcuucgacgugcugaaguccgaggacgcccaggggauggacaaccuggccugcgaggaccucaagcccgugagcgaggaggucguggagaaccccacgauccagaaggacgugcuggagugcaacgucaagaccaccgagguggugggcgacaucauccugaagccggccaacaacucccucaagaucaccgaggaggucgggcacacggaccugauggccgcguacguggacaacagcucccugaccaucaagaagcccaacgagcucagccgcgugcugggccugaagacccucgccacccacgggcuggccgccgucaacuccgugcccugggacacgaucgccaacuacgcgaagccguuccugaacaagguggucagcaccaccaccaacaucgugacguggugccucaaccgcgugugcaccaacuacaugcccuacuucuucacccugcugcuccagcugugcaccuucacccgguccacgaacagccgcaucaaggccuccaugcccaccaccaucgccaagaacaccgucaagagcgugggcaaguucugccuggaggccagcuucaacuaccucaagucccccaacuucagcaagcugaucaacaucaucaucugguuccugcuccuguccgugugccugggcagccucaucuacuccacggccgcgcuggggguccugaugagcaaccucggcaugccguccuacugcaccggguaccgggagggcuaccugaacagcaccaacgugaccaucgccacguacugcaccggcuccauccccugcagcgugugccuguccgggcucgacagccuggacaccuaccccucccuggagaccauccagaucacgaucagcuccuucaagugggaccucaccgccuucggccuggucgccgagugguuccuggccuacauccucuucacccgcuucuucuacgugcuggggcuggcggccaucaugcagcucuucuucagcuacuucgccgugcacuucaucuccaacagcuggcugauguggcugaucaucaaccugguccagauggcccccaucuccgcgauggugcggauguacaucuucuucgccagcuucuacuacguguggaagagcuacguccacgugguggacggcugcaacuccagcaccugcaugaugugcuacaagcgcaaccgggccacgcgcgucgagugcaccaccaucgugaacgggguccggcgcuccuucuacguguacgccaacggcggcaagggguucugcaagcuccacaacuggaacugcgugaacugcgacaccuucugcgccggcagcacguucaucuccgacgaggucgcgcgggaccugagccugcaguucaagcgcccgaucaaccccaccgaccaguccagcuacaucguggacuccgugaccgucaagaacgggagcauccaccucuacuucgacaaggccggccagaagaccuacgagcggcacucccugagccacuucgugaaccuggacaaccuccgcgccaacaacacgaaggggucccugcccaucaacgugaucgucuucgacggcaagagcaagugcgaggaguccagcgccaaguccgccagcguguacuacucccagcugaugugccagcccauccuccugcuggaccaggcgcucgugagcgacgucggcgacagcgccgagguggccgugaagauguucgacgccuacgucaacaccuucuccagcaccuucaacgugccgauggagaagcugaagacccugguggccacggcggaggccgagcucgccaagaacgucucccuggacaacgugcugagcaccuucaucuccgccgcgcggcagggguucguggacagcgacgucgagaccaaggacgugguggagugccucaagcugucccaccagagcgacaucgaggucaccggcgacuccugcaacaacuacaugcugacguacaacaagguggagaacaugaccccccgcgaccucggggccugcaucgacugcagcgcccggcacaucaacgcccagguggccaagucccacaacaucgcgcugaucuggaacgucaaggacuucaugagccuguccgagcagcuccgcaagcagauccggagcgccgccaagaagaacaaccugcccuucaagcugaccugcgccaccacgcgccagguggugaacgucgugaccaccaagaucgcccucaagggcgggugaggacuaguuauaagacugacuagcccgaugggccucccaacgggcccuccuccccuccuugcaccgagauuaauaaaaaaaaaaaaaaaaaaaaaaaaaaaaaaaaaaaaaaaaaaaaaaaaaaaaaaaaaaaaaaaaugcaucccccccccccccccccccccccccccccccaaaggcucuuuucagagccaccagaauu

SEQ ID NO: 21509 - RNA, 6058 nt, Artificial Sequence
  SARS-CoV-2__MT847217.1__non-structural protein 3 (NSP3) mRNA gc
aggagaaagcuuaccauggcccccaccaaggugaccuucggcgacgacacggucaucgaggugcagggguacaagagcgugaacaucaccuucgagcuggacgagcgcaucgacaagguccucaacgagaagugcuccgccuacaccguggagcugggcaccgaggugaacgaguucgcgugcgucguggccgacgccgugaucaagacgcugcagccggucagcgagcuccugaccccccuggggaucgaccucgacgagugguccauggccaccuacuaccuguucgacgagagcggcgaguucaagcuggccucccacauguacugcagcuucuacccccccgacgaggacgaggaggagggggacugcgaggaggaggaguucgagccguccacccaguacgaguacggcacggaggacgacuaccagggcaagccccucgaguucggggcgaccagcgccgcccugcagcccgaggaggagcaggaggaggacuggcuggacgacgacucccagcagaccgugggccagcaggacgggaucgaggacaaccagaccacgaccauccagaccaucguggagguccagccccagcucgagauggagcugaccccgguggugcagacgaucgaggucaacagcuucuccggcuaccugaagcucaccgacaacguguacaucaagaacgccgacaucguggaggaggcgaagaaggucaagcccaccgugguggucaacgccgccaacguguaccugaagcacgggggcggcguggccggggcccugaacaaggcgaccaacaacgccaugcaggucgagagcgacgacuacaucgccacgaacggcccccucaagguggggggcuccugcguccugagcggccacaaccuggccaagcacugccuccacgugguggggcccaacgucaacaagggcgaggacauccagcugcugaaguccgccuacgagaacuucaaccagcacgaggugcuccuggcgccgcugcucagcgccgggaucuucggcgccgaccccauccacucccugcgggugugcgucgacaccgugcgcaccaacguguaccuggccgucuucgacaagaaccucuacgacaagcuggugagcuccuuccuggagaugaagagcgagaagcagguggagcagaagaucgccgagauccccaaggaggaggucaagcccuucaucaccgagagcaagccguccguggagcagcggaagcaggacgacaagaagaucaaggcgugcguggaggaggucacgaccacccucgaggagaccaaguuccugacggagaaccugcuccuguacaucgacaucaacgggaaccugcaccccgacagcgccacccucguguccgacaucgacaucaccuuccugaagaaggacgcccccuacaucgugggcgacgucgugcaggagggcgugcugaccgccgucgugauccccacgaagaaggccgggggcaccaccgagaugcucgcgaaggcccugcgcaaggugccgaccgacaacuacaucacgaccuaccccgggcagggccugaacggguacaccgucgaggaggccaagaccgugcucaagaagugcaagagcgccuucuacauccugcccuccaucaucagcaacgagaagcaggagauccugggcaccguguccuggaaccuccgggagaugcuggcgcacgccgaggagacgcgcaagcugaugcccgucugcguggagaccaaggccaucgugagcaccauccagcggaaguacaagggcaucaagauccaggagggggucguggacuacggcgcccgcuucuacuucuacaccuccaagacgaccguggccagccugaucaacacccucaacgaccugaacgagacccuggucacgaugccgcucggguacgugacccacggccugaaccuggaggaggcggcccgguacaugcgcucccucaaggugcccgccaccgucagcguguccagccccgacgccgugaccgccuacaacggguaccugacguccagcuccaagacccccgaggagcacuucaucgagaccaucagccuggcgggcuccuacaaggacuggagcuacagcggccaguccacccagcucgggaucgaguuccugaagcggggcgacaagagcgucuacuacacguccaacccgaccaccuuccaccuggacggggaggugaucaccuucgacaaccucaagacgcugcugagccuccgcgaggugcggaccaucaaggucuucaccaccguggacaacaucaaccugcacacgcagguggucgacauguccaugaccuacggccagcaguucggccccaccuaccuggacggggccgacgugaccaagaucaagccccacaacagccacgagggcaagacguucuacgugcucccgaacgacgacacccugcgcgucgaggccuucgaguacuaccacaccaccgaccccuccuuccuggggcgguacaugagcgcccucaaccacacgaagaaguggaaguacccccaggugaacggccugaccuccaucaagugggccgacaacaacugcuaccuggcgaccgcccuccugacccugcagcagaucgagcucaaguucaaccccccggcccugcaggacgccuacuaccgcgcgcgggccggggaggccgccaacuucugcgcccugauccucgcguacugcaacaagacggugggcgagcugggcgacguccgcgagaccaugagcuaccuguuccagcacgccaaccucgacuccugcaagcgggugcugaacgucgugugcaagaccugcgggcagcagcagaccacccugaagggcguggaggccgucauguacauggggacgcucagcuacgagcaguucaagaagggcgugcagauccccugcaccugcgggaagcaggccaccaaguaccuggugcagcaggagucccccuucgucaugaugagcgcccccccggcgcaguacgagcugaagcacggcaccuucacgugcgccuccgaguacaccggcaacuaccagugcgggcacuacaagcacaucaccagcaaggagacccucuacugcaucgacggcgcccugcugacgaaguccagcgaguacaaggggcccaucaccgacguguucuacaaggagaacagcuacaccaccacgaucaagcccgugaccuacaagcucgacggcgucgugugcaccgagaucgaccccaagcuggacaacuacuacaagaaggacaacuccuacuucaccgagcagccgaucgaccuggugcccaaccagcccuaccccaacgccagcuucgacaacuucaaguucgucugcgacaacaucaaguucgccgacgaccucaaccagcugacgggguacaagaagccggcgucccgcgagcugaaggugaccuucuuccccgaccucaacggcgacguggucgccaucgacuacaagcacuacacccccagcuucaagaagggcgccaagcugcugcacaagcccaucguguggcacgugaacaacgccaccaacaaggcgacguacaagccgaacaccuggugcauccggugccucugguccaccaagcccgucgagaccagcaacuccuucgacgugcugaagagcgaggacgcccaggggauggacaaccuggccugcgaggaccucaagcccguguccgaggaggucguggagaaccccacgauccagaaggacgugcuggagugcaacgucaagaccaccgagguggugggcgacaucauccugaagccggccaacaacagccucaagaucaccgaggaggucgggcacacggaccugauggccgcguacguggacaacuccagccugaccaucaagaagcccaacgagcucucccgcgugcugggccugaagacccucgccacccacgggcuggccgccgucaacagcgugcccugggacacgaucgccaacuacgcgaagccguuccugaacaagguggucuccaccaccaccaacaucgugacgcgcugccucaaccgggugugcaccaacuacaugcccuacuucuucacccugcugcuccagcugugcaccuucacccgcagcacgaacucccggaucaaggccagcaugcccaccaccaucgccaagaacaccgucaaguccgugggcaaguucugccuggaggccagcuucaacuaccucaagagccccaacuucuccaagcugaucaacaucaucaucugguuccugcuccugagcgugugccugggcucccucaucuacagcacggccgcgcuggggguccugauguccaaccucggcaugccgagcuacugcaccggguaccgcgagggcuaccugaacuccaccaacgugaccaucgccacguacugcaccggcagcauccccugcuccgugugccugagcgggcucgacucccuggacaccuaccccagccuggagaccauccagaucacgaucuccagcuucaagugggaccucaccgccuucggccuggucgccgagugguuccuggccuacauccucuucacccgguucuucuacgugcuggggcuggcggccaucaugcagcucuucuucuccuacuucgccgugcacuucaucagcaacuccuggcugauguggcugaucaucaaccugguccagauggcccccaucagcgcgauggugcgcauguacaucuucuucgccuccuucuacuacguguggaagagcuacguccacgugguggacggcugcaacagcuccaccugcaugaugugcuacaagcggaaccgcgccacgcgggucgagugcaccaccaucgugaacgggguccgccggagcuucuacguguacgccaacggcggcaagggguucugcaagcuccacaacuggaacugcgugaacugcgacaccuucugcgccggcuccacguucaucagcgacgaggucgcgcgcgaccugucccugcaguucaagcggccgaucaaccccaccgaccagagcuccuacaucguggacagcgugaccgucaagaacggguccauccaccucuacuucgacaaggccggccagaagaccuacgagcgccacagccugucccacuucgugaaccuggacaaccuccgggccaacaacacgaaggggagccugcccaucaacgugaucgucuucgacggcaaguccaagugcgaggagagcuccgccaagagcgccuccguguacuacagccagcugaugugccagcccauccuccugcuggaccaggcgcucguguccgacgucggcgacagcgccgagguggccgugaagauguucgacgccuacgucaacaccuucagcuccaccuucaacgugccgauggagaagcugaagacccugguggccacggcggaggccgagcucgccaagaacgucagccuggacaacgugcuguccaccuucaucagcgccgcgcgccagggguucguggacuccgacgucgagaccaaggacgugguggagugccucaagcugagccaccaguccgacaucgaggucaccggcgacagcugcaacaacuacaugcugacguacaacaagguggagaacaugaccccccgggaccucggggccugcaucgacugcuccgcccgccacaucaacgcccagguggccaagagccacaacaucgcgcugaucuggaacgucaaggacuucaugucccugagcgagcagcuccggaagcagauccgcuccgccgccaagaagaacaaccugcccuucaagcugaccugcgccaccacgcgccagguggugaacgucgugaccaccaagaucgcccucaagggcgggugaggacuaguuauaagacugacuagcccgaugggccucccaacgggcccuccuccccuccuugcaccgagauuaauaaaaaaaaaaaaaaaaaaaaaaaaaaaaaaaaaaaaaaaaaaaaaaaaaaaaaaaaaaaaaaaaugcaucccccccccccccccccccccccccccccccaaaggcucuuuucagagccaccagaauu

SEQ ID NO: 21510 - RNA, 6058 nt, Artificial Sequence
  SARS-CoV-2__MT847218.1__non-structural protein 3 (NSP3) mRNA gc
aggagaaagcuuaccauggcccccaccaaggugaccuucggcgacgacacggucaucgaggugcagggguacaagagcgugaacaucaccuucgagcuggacgagcgcaucgacaagguccucaacgagaagugcuccgccuacaccguggagcugggcaccgaggugaacgaguucgcgugcgucguggccgacgccgugaucaagacgcugcagccggucagcgagcuccugaccccccuggggaucgaccucgacgagugguccauggccaccuacuaccuguucgacgagagcggcgaguucaagcuggccucccacauguacugcagcuucuacccccccgacgaggacgaggaggagggggacugcgaggaggaggaguucgagccguccacccaguacgaguacggcacggaggacgacuaccagggcaagccccucgaguucggggcgaccagcgccgccccccagcccgaggaggagcaggaggaggacuggcuggacgacgacucccagcagaccgugggccagcaggacgggagcgaggacaaccagaccacgaccauccagaccaucguggagguccagccgcagcuggagauggagcucacccccguggugcagacgaucgaggucaacuccuucagcggcuaccugaagcugaccgacaacguguacaucaagaacgccgacaucguggaggaggcgaagaaggucaagcccaccgugguggucaacgccgccaacguguaccucaagcacgggggcggcguggccggggcccugaacaaggcgaccaacaacgccaugcaggucgaguccgacgacuacaucgccacgaacggcccccugaagguggggggcagcugcguccucuccggccacaaccuggccaagcacugccugcacgugguggggccgaacgucaacaagggcgaggacauccagcuccugaagagcgccuacgagaacuucaaccagcacgaggugcugcucgcgccccugcuguccgccgggaucuucggcgccgaccccauccacagccuccgggugugcgucgacaccgugcgcaccaacguguaccuggccgucuucgacaagaaccuguacgacaagcucguguccagcuuccuggagaugaagagcgagaagcagguggagcagaagaucgccgagauccccaaggaggaggucaagccguucaucaccgaguccaagcccagcguggagcagcggaagcaggacgacaagaagaucaaggcgugcguggaggaggucacgaccacccuggaggagaccaaguuccucacggagaaccugcugcucuacaucgacaucaacgggaaccugcaccccgacuccgccacccuggugagcgacaucgacaucaccuuccucaagaaggacgcccccuacaucgugggcgacgucgugcaggagggcgugcugaccgccgucgugaucccgacgaagaaggccgggggcaccaccgagaugcuggcgaaggcccuccgcaaggugcccaccgacaacuacaucacgaccuaccccgggcagggccugaacggguacaccgucgaggaggccaagaccgugcugaagaagugcaaguccgccuucuacauccuccccagcaucaucuccaacgagaagcaggagauccugggcaccgugagcuggaaccugcgggagaugcucgcgcacgccgaggagacgcgcaagcugaugccggucugcguggagaccaaggccaucguguccaccauccagcggaaguacaagggcaucaagauccaggagggggucguggacuacggcgcccgcuucuacuucuacaccagcaagacgaccguggccucccugaucaacacccugaacgaccucaacgagacccuggucacgaugccccugggguacgugacccacggccucaaccuggaggaggcggcccgguacaugcgcagccugaaggugcccgccaccgucuccgugagcucccccgacgccgugaccgccuacaacggguaccucacgagcuccagcaagaccccggaggagcacuucaucgagaccaucucccuggcgggcagcuacaaggacuggagcuacuccggccagagcacccagcuggggaucgaguuccucaagcggggcgacaaguccgucuacuacacgagcaaccccaccaccuuccaccuggacggggaggugaucaccuucgacaaccugaagacgcuccugucccugcgcgaggugcggaccaucaaggucuucaccaccguggacaacaucaaccuccacacgcagguggucgacaugagcaugaccuacggccagcaguucggccccaccuaccuggacggggccgacgugaccaagaucaagccgcacaacucccacgagggcaagacguucuacgugcugcccaacgacgacacccuccgcgucgaggccuucgaguacuaccacaccaccgaccccagcuuccuggggcgguacauguccgcccugaaccacacgaagaaguggaaguacccccaggugaacggccucaccagcaucaagugggccgacaacaacugcuaccuggcgaccgcccugcucacccugcagcagaucgagcugaaguucaacccgcccgcccuccaggacgccuacuaccgcgcgcgggccggggaggccgccaacuucugcgcccugauccuggcguacugcaacaagacggugggcgagcucggcgacguccgcgagaccauguccuaccuguuccagcacgccaaccuggacagcugcaagcgggugcucaacgucgugugcaagaccugcgggcagcagcagaccacccugaagggcguggaggccgucauguacauggggacgcuguccuacgagcaguucaagaagggcgugcagauccccugcaccugcgggaagcaggccaccaaguaccucgugcagcaggagagccccuucgucaugauguccgccccgcccgcgcaguacgagcugaagcacggcaccuucacgugcgccagcgaguacaccggcaacuaccagugcgggcacuacaagcacaucaccuccaaggagacccuguacugcaucgacggcgcccuccugacgaagagcagcgaguacaaggggcccaucaccgacguguucuacaaggagaacuccuacaccaccacgaucaagcccgugaccuacaagcuggacggcgucgugugcaccgagaucgacccgaagcucgacaacuacuacaagaaggacaacagcuacuucaccgagcagcccaucgaccuggugcccaaccagcccuacccgaacgccuccuucgacaacuucaaguucgucugcgacaacaucaaguucgccgacgaccugaaccagcucacgggguacaagaagcccgcgagccgcgagcugaaggugaccuucuuccccgaccugaacggcgacguggucgccaucgacuacaagcacuacacccccuccuucaagaagggcgccaagcuccugcacaagccgaucguguggcacgugaacaacgccaccaacaaggcgacguacaagcccaacaccuggugcauccggugccuguggagcaccaagcccgucgagaccuccaacagcuucgacgugcucaaguccgaggacgcccaggggauggacaaccuggccugcgaggaccugaagcccgugagcgaggaggucguggagaacccgacgauccagaaggacgugcucgagugcaacgucaagaccaccgagguggugggcgacaucauccugaagcccgccaacaacucccugaagaucaccgaggaggucgggcacacggaccucauggccgcguacguggacaacagcucccugaccaucaagaagcccaacgagcugagccgcgugcucggccugaagacccuggccacccacgggcucgccgccgucaacuccgugccgugggacacgaucgccaacuacgcgaagcccuuccugaacaagguggucagcaccaccaccaacaucgugacgcgcugccugaaccgggugugcaccaacuacaugcccuacuucuucacccuccugcugcagcucugcaccuucacccgcuccacgaacagccggaucaaggccuccaugcccaccaccaucgccaagaacaccgucaagagcgugggcaaguucugccuggaggccagcuucaacuaccugaaguccccgaacuucagcaagcucaucaacaucaucaucugguuccugcugcucuccgugugccugggcagccugaucuacuccacggccgcgcucgggguccugaugagcaaccugggcaugcccuccuacugcaccggguaccgcgagggcuaccucaacagcaccaacgugaccaucgccacguacugcaccggcuccauccccugcagcgugugccuguccgggcuggacagccucgacaccuaccccucccuggagaccauccagaucacgaucagcuccuucaagugggaccugaccgccuucggccucgucgccgagugguuccuggccuacauccuguucacccgguucuucuacgugcucgggcuggcggccaucaugcagcuguucuucagcuacuucgccgugcacuucaucuccaacagcuggcucauguggcugaucaucaaccugguccagauggccccgaucuccgcgauggugcgcauguacaucuucuucgccagcuucuacuacguguggaagagcuacguccacgugguggacggcugcaacuccagcaccugcaugaugugcuacaagcggaaccgcgccacgcgggucgagugcaccaccaucgugaacgggguccgccgguccuucuacguguacgccaacggcggcaagggguucugcaagcugcacaacuggaacugcgugaacugcgacaccuucugcgccggcagcacguucaucuccgacgaggucgcgcgcgaccucagccugcaguucaagcggcccaucaaccccaccgaccaguccagcuacaucguggacuccgugaccgucaagaacgggagcauccaccuguacuucgacaaggccggccagaagaccuacgagcgccacucccucagccacuucgugaaccuggacaaccugcgggccaacaacacgaaggggucccuccccaucaacgugaucgucuucgacggcaagagcaagugcgaggaguccagcgccaaguccgccagcguguacuacucccagcugaugugccagccgauccugcuccuggaccaggcgcuggugagcgacgucggcgacagcgccgagguggccgugaagauguucgacgccuacgucaacaccuucuccagcaccuucaacgugcccauggagaagcucaagacccugguggccacggcggaggccgagcuggccaagaacgucucccucgacaacgugcugagcaccuucaucuccgccgcgcgccagggguucguggacagcgacgucgagaccaaggacgugguggagugccugaagcucucccaccagagcgacaucgaggucaccggcgacuccugcaacaacuacaugcugacguacaacaagguggagaacaugaccccccgggaccugggggccugcaucgacugcagcgcccgccacaucaacgcccagguggccaagucccacaacaucgcgcucaucuggaacgucaaggacuucaugagccuguccgagcagcugcggaagcagauccgcagcgccgccaagaagaacaaccuccccuucaagcugaccugcgccaccacgcgccagguggugaacgucgugaccaccaagaucgcccugaagggcgggugaggacuaguuauaagacugacuagcccgaugggccucccaacgggcccuccuccccuccuugcaccgagauuaauaaaaaaaaaaaaaaaaaaaaaaaaaaaaaaaaaaaaaaaaaaaaaaaaaaaaaaaaaaaaaaaaugcaucccccccccccccccccccccccccccccccaaaggcucuuuucagagccaccagaauu

SEQ ID NO: 21511 - RNA, 6058 nt, Artificial Sequence
  SARS-CoV-2__MT847224.1__non-structural protein 3 (NSP3) mRNA gc
aggagaaagcuuaccauggcccccaccaaggugaccuucggcgacgacacggucaucgaggugcagggguacaagagcgugaacaucaccuucgagcuggacgagcgcaucgacaagguccucaacgagaagugcuccgccuacaccguggagcugggcaccgaggugaacgaguucgcgugcgucguggccgacgccgugaucaagacgcugcagccggucagcgagcuccugaccccccuggggaucgaccucgacgagugguccauggccaccuacuaccuguucgacgagagcggcgaguucaagcuggccucccacauguacugcagcuucuacccccccgacgaggacgaggaggagggggacuacgaggaggaggaguucgagccguccacccaguacgaguacggcacggaggacgacuaccagggcaagccccucgaguucggggcgaccagcgccgcccugcagcccgaggaggagcaggaggaggacuggcuggacgacgacucccagcagaccgugggccagcaggacgggagcgaggacaaccagaccacgaccauccagaccaucguggagguccagccccagcucgagauggagcugaccccgguggugcagacgaucgaggucaacuccuucagcggcuaccugaagcucaccgacaacguguacaucaagaacgccgacaucguggaggaggcgaagaaggucaagcccaccgugguggucaacgccgccaacguguaccugaagcacgggggcggcguggccggggcccugaacaaggcgaccaacaacgccaugcaggucgaguccgacgacuacaucgccacgaacggcccccucaagguggggggcagcugcguccuguccggccacaaccuggccaagcacugccuccacgugguggggcccaacgucaacaagggcgaggacauccagcugcugaagagcgccuacgagaacuucaaccagcacgaggugcuccuggcgccgcugcucuccgccgggaucuucggcgccgaccccauccacagccugcgggugugcgucgacaccgugcgcaccaacguguaccuggccgucuucgacaagaaccucuacgacaagcugguguccagcuuccuggagaugaagagcgagaagcagguggagcagaagaucgccgagauccccaaggaggaggucaagcccuucaucaccgaguccaagccgagcguggagcagcggaagcaggacgacaagaagaucaaggcgugcguggaggaggucacgaccacccucgaggagaccaaguuccugacggagaaccugcuccuguacaucgacaucaacgggaaccugcaccccgacuccgccacccucgugagcgacaucgacaucaccuuccugaagaaggacgcccccuacaucgugggcgacgucgugcaggagggcgugcugaccgccgucgugauccccacgaagaaggccgggggcaccaccgagaugcucgcgaaggcccugcgcaaggugccgaccgacaacuacaucacgaccuaccccgggcagggccugaacggguacaccgucgaggaggccaagaccgugcucaagaagugcaaguccgccuucuacauccugcccagcaucaucuccaacgagaagcaggagauccugggcaccgugagcuggaaccuccgggagaugcuggcgcacgccgaggagacgcgcaagcugaugcccgucugcguggagaccaaggccaucguguccaccauccagcggaaguacaagggcaucaagauccaggagggggucguggacuacggcgcccgcuucuacuucuacaccagcaagacgaccguggccucccugaucaacacccucaacgaccugaacgagacccuggucacgaugccgcucggguacgugacccacggccugaaccuggaggaggcggcccgguacaugcgcagccucaaggugcccgccaccgucuccgugagcucccccgacgccgugaccgccuacaacggguaccugacgagcuccagcaagacccccgaggagcacuucaucgagaccaucucccuggcgggcagcuacaaggacuggagcuacuccggccagagcacccagcucgggaucgaguuccugaagcggggcgacaaguccgucuacuacacgagcaacccgaccaccuuccaccuggacggggaggugaucaccuucgacaaccucaagacgcugcugucccuccgcgaggugcggaccaucaaggucuucaccaccguggacaacaucaaccugcacacgcagguggucgacaugagcaugaccuacggccagcaguucggccccaccuaccuggacggggccgacgugaccaagaucaagccccacaacucccacgagggcaagacguucuacgugcucccgaacgacgacacccugcgcgucgaggccuucgaguacuaccacaccaccgaccccagcuuccuggggcgguacauguccgcccucaaccacacgaagaaguggaaguacccccaggugaacggccugaccagcaucaagugggccgacaacaacugcuaccuggcgaccgcccuccugacccugcagcagaucgagcucaaguucaaccccccggcccugcaggacgccuacuaccgcgcgcgggccggggaggccgccaacuucugcgcccugauccucgcguacugcaacaagacggugggcgagcugggcgacguccgcgagaccauguccuaccuguuccagcacgccaaccucgacagcugcaagcgggugcugaacgucgugugcaagaccugcgggcagcagcagaccacccugaagggcguggaggccgucauguacauggggacgcucuccuacgagcaguucaagaagggcgugcagauccccugcaccugcgggaagcaggccaccaaguaccuggugcagcaggagagccccuucgucaugauguccgcccccccggcgcaguacgagcugaagcacggcaccuucacgugcgccagcgaguacaccggcaacuaccagugcgggcacuacaagcacaucaccuccaaggagacccucuacugcaucgacggcgcccugcugacgaagagcagcgaguacaaggggcccaucaccgacguguucuacaaggagaacuccuacaccaccacgaucaagcccgugaccuacaagcucgacggcgucgugugcaccgagaucgaccccaagcuggacaacuacuacaagaaggacaacagcuacuucaccgagcagccgaucgaccuggugcccaaccagcccuaccccaacgccuccuucgacaacuucaaguucgucugcgacaacaucaaguucgccgacgaccucaaccagcugacgggguacaagaagccggcgagccgcgagcugaaggugaccuucuuccccgaccucaacggcgacguggucgccaucgacuacaagcacuacacccccuccuucaagaagggcgccaagcugcugcacaagcccaucguguggcacgugaacaacgccaccaacaaggcgacguacaagccgaacaccuggugcauccggugccucuggagcaccaagcccgucgagaccuccaacagcuucgacgugcugaaguccgaggacgcccaggggauggacaaccuggccugcgaggaccucaagcccgugagcgaggaggucguggagaaccccacgauccagaaggacgugcuggagugcaacgucaagaccaccgagguggugggcgacaucauccugaagccggccaacaacucccucaagaucaccgaggaggucgggcacaucgaccugauggccgcguacguggacaacagcucccugacgaucaagaagcccaacgagcucagccgcgugcugggccugaagacccucgccacccacgggcuggccgccgucaacuccgugcccugggacaccaucgccaacuacgcgaagccguuccugaacaagguggucagcacgaccaccaacaucgugacccgcugccucaaccgggugugcacgaacuacaugcccuacuucuucacccugcugcuccagcugugcaccuucacccgcuccaccaacagccggaucaaggccuccaugcccacgaccaucgccaagaacaccgucaagagcgugggcaaguucugccuggaggccagcuucaacuaccucaagucccccaacuucagcaagcugaucaacaucaucaucugguuccugcuccuguccgugugccugggcagccucaucuacuccaccgccgcgcuggggguccugaugagcaaccucggcaugccguccuacugcacgggguaccgcgagggcuaccugaacagcaccaacgugaccaucgccaccuacugcacgggcuccauccccugcagcgugugccuguccgggcucgacagccuggacaccuaccccucccuggagaccauccagaucaccaucagcuccuucaagugggaccucacggccuucggccuggucgccgagugguuccuggccuacauccucuucacccgguucuucuacgugcuggggcuggcggccaucaugcagcucuucuucagcuacuucgccgugcacuucaucuccaacagcuggcugauguggcugaucaucaaccugguccagauggcccccaucuccgcgauggugcgcauguacaucuucuucgccagcuucuacuacguguggaagagcuacguccacgugguggacggcugcaacuccagcaccugcaugaugugcuacaagcggaaccgcgccacccgggucgagugcacgaccaucgugaacgggguccgccgguccuucuacguguacgccaacggcggcaagggguucugcaagcuccacaacuggaacugcgugaacugcgacaccuucugcgccggcagcaccuucaucuccgacgaggucgcgcgcgaccugagccugcaguucaagcggccgaucaaccccacggaccaguccagcuacaucguggacuccgugaccgucaagaacgggagcauccaccucuacuucgacaaggccggccagaagaccuacgagcgccacucccugagccacuucgugaaccuggacaaccuccgggccaacaacaccaaggggucccugcccaucaacgugaucgucuucgacggcaagagcaagugcgaggaguccagcgccaaguccgccagcguguacuacucccagcugaugugccagcccauccuccugcuggaccaggcgcucgugagcgacgucggcgacagcgccgagguggccgugaagauguucgacgccuacgucaacacguucuccagcaccuucaacgugccgauggagaagcugaagacccugguggccaccgcggaggccgagcucgccaagaacgucucccuggacaacgugcugagcacguucaucuccgccgcgcgccagggguucguggacagcgacgucgagaccaaggacgugguggagugccucaagcugucccaccagagcgacaucgaggucaccggcgacuccugcaacaacuacaugcugaccuacaacaagguggagaacaugacgccccgggaccucggggccugcaucgacugcagcgcccgccacaucaacgcccagguggccaagucccacaacaucgcgcugaucuggaacgucaaggacuucaugagccuguccgagcagcuccggaagcagauccgcagcgccgccaagaagaacaaccugcccuucaagcugaccugcgccaccacccgccagguggugaacgucgugacgaccaagaucgcccucaagggcgggugaggacuaguuauaagacugacuagcccgaugggccucccaacgggcccuccuccccuccuugcaccgagauuaauaaaaaaaaaaaaaaaaaaaaaaaaaaaaaaaaaaaaaaaaaaaaaaaaaaaaaaaaaaaaaaaaugcaucccccccccccccccccccccccccccccccaaaggcucuuuucagagccaccagaauu

SEQ ID NO: 21512 - RNA, 6058 nt, Artificial Sequence
  SARS-CoV-2__MT847228.1__non-structural protein 3 (NSP3) mRNA gc
aggagaaagcuuaccauggcccccaccaaggugaccuucggcgacgacacggucaucgaggugcagggguacaagagcgugaacaucaccuucgagcuggacgagcgcaucgacaagguccucaacgagaagugcuccgccuacaccguggagcugggcaccgaggugaacgaguucgcgugcgucguggccgacgccgugaucaagacgcugcagccggucagcgagcuccugaccccccuggggaucgaccucgacgagugguccauggccaccuacuaccuguucgacgagagcggcgaguucaagcuggccucccacauguacugcagcuucuacccccccgacgaggacgaggaggagggggacugcgaggaggaggaguucgagccguccacccaguacgaguacggcacggaggacgacuaccagggcaagccccucgaguucggggcgaccagcgccgcccugcagcccgaggaggagcaggaggaggacuggcuggacgacgacucccagcagaccgugggccagcaggacgggagcgaggacaaccagaccacgaccauccagaccaucguggagguccagccccagcucgagauggagcugaccccgguggugcagacgaucgaggucaacuccuucagcggcuaccugaagcucaccgacaacguguacaucaagaacgccgacaucguggaggaggcgaagaaggucaagcccaccgugguggucaacgccgccaacguguaccugaagcacgggggcggcguggccggggcccugaacaaggcgaccaacaacgccaugcaggucgaguccgacgacuacaucgccacgaacggcccccucaagguggggggcagcugcguccuguccggccacaaccuggccaagcacugccuccacgugguggggcccaacgucaacaagggcgaggacauccagcugcugaagagcgccuacgagaacuucaaccagcacgaggugcuccuggcgccgcugcucuccgccgggaucuucggcgccgaccccauccacagccugcgggugugcgucgacaccgugcgcaccaacguguaccuggccgucuucgacaagaaccucuacgacaagcugguguccagcuuccuggagaugaagagcgagaagcagguggagcagaagaucgccgagauccccaaggaggaggucaagcccuucaucaccgaguccaagccgagcguggagcagcggaagcaggacgacaagaagaucaaggcgugcguggaggaggucacgaccacccucgaggagaccaaguuccugacggagaaccugcuccuguacaucgacaucaacgggaaccugcaccccgacuccgccacccucgugagcgacaucgacaucaccuuccugaagaaggacgcccccuacaucgugggcgacgucgugcaggagggcgugcugaccgccgucgugauccccacgaagaaggccgggggcaccaccgagaugcucgcgaaggcccugcgcaaggugccgaccgacaacuacaucacgaccuaccccgggcagggccugaacggguacaccgucgaggaggccaagaccgugcucaagaagugcaaguccgccuucuacauccugcccagcaucaucuccaacgagaagcaggagauccugggcaccgugagcuggaaccuccgggagaugcuggcgcacgccgaggagacgcgcaagcugaugcccgucugcguggagaccaaggccaucguguccaccauccagcggaaguacaagggcaucaagauccaggagggggucguggacuacggcgcccgcuucuacuucuacaccagcaagacgaccguggccucccugaucaacacccucaacgaccugaacgagacccuggucacgaugccgcucggguacgugacccacggccugaaccuggaggaggcggcccgguacaugcgcagccucaaggugcccgccaccgucuccgugagcucccccgacgccgugaccgccuacaacggguaccugacgagcuccagcaagacccccgaggagcacuucaucgagaccaucucccuggcgggcagcuacaaggacuggagcuacuccggccagagcacccagcucgggaucgaguuccugaagcggggcgacaaguccgucuacuacacgagcaacccgaccaccuuccaccuggacggggaggugaucaccuucgacaaccucaagacgcugcugucccuccgcgaggugcggaccaucaaggucuucaccaccguggacaacaucaaccugcacacgcagguggucgacaugagcaugaccuacggccagcaguucggccccaccuaccuggacggggccgacgugaccaagaucaagccccacaacucccacgagggcaagacguucuacgugcucccgaacgacgacacccugcgcgucgaggccuucgaguacuaccacaccaccgaccccagcuuccuggggcgguacauguccgcccucaaccacacgaagaaguggaaguacccccaggugaacggccugaccagcaucaagugggccgacaacaacugcuaccuggcgaccgcccuccugacccugcagcagaucgagcucaaguucaaccccccggcccugcaggacgccuacuaccgcgcgcgggccggggaggccgccaacuucugcgcccugauccucgcguacugcaacaagacggugggcgagcugggcgacguccgcgagaccauguccuaccuguuccagcacgccaaccucgacagcugcaagcgggugcugaacgucgugugcaagaccugcgggcagcagcagaccauccugaagggcguggaggccgucauguacauggggacccucuccuacgagcaguucaagaagggcgugcagauccccugcacgugcgggaagcaggccaccaaguaccuggugcagcaggagagccccuucgucaugauguccgcccccccggcgcaguacgagcugaagcacggcaccuucaccugcgccagcgaguacacgggcaacuaccagugcgggcacuacaagcacaucaccuccaaggagacccucuacugcaucgacggcgcccugcugaccaagagcagcgaguacaaggggcccaucacggacguguucuacaaggagaacuccuacaccaccaccaucaagcccgugacguacaagcucgacggcgucgugugcaccgagaucgaccccaagcuggacaacuacuacaagaaggacaacagcuacuucaccgagcagccgaucgaccuggugcccaaccagcccuaccccaacgccuccuucgacaacuucaaguucgucugcgacaacaucaaguucgccgacgaccucaaccagcugaccggguacaagaagccggcgagccgcgagcugaaggugacguucuuccccgaccucaacggcgacguggucgccaucgacuacaagcacuacacccccuccuucaagaagggcgccaagcugcugcacaagcccaucguguggcacgugaacaacgccaccaacaaggcgaccuacaagccgaacacguggugcauccggugccucuggagcaccaagcccgucgagaccuccaacagcuucgacgugcugaaguccgaggacgcccaggggauggacaaccuggccugcgaggaccucaagcccgugagcgaggaggucguggagaaccccaccauccagaaggacgugcuggagugcaacgucaagacgaccgagguggugggcgacaucauccugaagccggccaacaacucccucaagaucaccgaggaggucgggcacaccgaccugauggccgcguacguggacaacagcucccugacgaucaagaagcccaacgagcucagccgcgugcugggccugaagacccucgccacccacgggcuggccgccgucaacuccgugcccugggacaccaucgccaacuacgcgaagccguuccugaacaagguggucagcacgaccaccaacaucgugacccgcugccucaaccgggugugcacgaacuacaugcccuacuucuucacccugcugcuccagcugugcaccuucacccgcuccaccaacagccggaucaaggccuccaugcccacgaccaucgccaagaacaccgucaagagcgugggcaaguucugccuggaggccagcuucaacuaccucaagucccccaacuucagcaagcugaucaacaucaucaucugguuccugcuccuguccgugugccugggcagccucaucuacuccaccgccgcgcuggggguccugaugagcaaccucggcaugccguccuacugcacgggguaccgcgagggcuaccugaacagcaccaacgugaccaucgccaccuacugcacgggcuccauccccugcagcgugugccuguccgggcucgacagccuggacaccuaccccucccuggagaccauccagaucaccaucagcuccuucaagugggaccucacggccuucggccuggucgccgagugguuccuggccuacauccucuucacccgguucuucuacgugcuggggcuggcggccaucaugcagcucuucuucagcuacuucgccgugcacuucaucuccaacagcuggcugauguggcugaucaucaaccugguccagauggcccccaucuccgcgauggugcgcauguacaucuucuucgccagcuucuacuacguguggaagagcuacguccacgugguggacggcugcaacuccagcaccugcaugaugugcuacaagcggaaccgcgccacccgggucgagugcacgaccaucgugaacgggguccgccgguccuucuacguguacgccaacggcggcaagggguucugcaagcuccacaacuggaacugcgugaacugcgacaccuucugcgccggcagcaccuucaucuccgacgaggucgcgcgcgaccugagccugcaguucaagcggccgaucaaccccacggaccaguccagcuacaucguggacuccgugaccgucaagaacgggagcauccaccucuacuucgacaaggccggccagaagaccuacgagcgccacucccugagccacuucgugaaccuggacaaccuccgggccaacaacaccaaggggucccugcccaucaacgugaucgucuucgacggcaagagcaagugcgaggaguccagcgccaaguccgccagcguguacuacucccagcugaugugccagcccauccuccugcuggaccaggcgcucgugagcgacgucggcgacagcgccgagguggccgugaagauguucgacgccuacgucaacacguucuccagcaccuucaacgugccgauggagaagcugaagacccugguggccaccgcggaggccgagcucgccaagaacgucucccuggacaacgugcugagcacguucaucuccgccgcgcgccagggguucguggacagcgacgucgagaccaaggacgugguggagugccucaagcugucccaccagagcgacaucgaggucaccggcgacuccugcaacaacuacaugcugaccuacaacaagguggagaacaugacgccccgggaccucggggccugcaucgacugcagcgcccgccacaucaacgcccagguggccaagucccacaacaucgcgcugaucuggaacgucaaggacuucaugagccuguccgagcagcuccggaagcagauccgcagcgccgccaagaagaacaaccugcccuucaagcugaccugcgccaccacccgccagguggugaacgucgugacgaccaagaucgcccucaagggcgggugaggacuaguuauaagacugacuagcccgaugggccucccaacgggcccuccuccccuccuugcaccgagauuaauaaaaaaaaaaaaaaaaaaaaaaaaaaaaaaaaaaaaaaaaaaaaaaaaaaaaaaaaaaaaaaaaugcaucccccccccccccccccccccccccccccccaaaggcucuuuucagagccaccagaauu

SEQ ID NO: 21513 - RNA, 6058 nt, Artificial Sequence
  SARS-CoV-2__MT843297.1__non-structural protein 3 (NSP3) mRNA gc
aggagaaagcuuaccauggcccccaccaaggugaccuucggcgacgacacggucaucgaggugcagggguacaagagcgugaacaucaccuucgagcuggacgagcgcaucgacaagguccucaacgagaagugcuccgccuacaccguggagcugggcaccgaggugaacgaguucgcgugcgucguggccgacgccgugaucaagacgcugcagccggucagcgagcuccugaccccccuggggaucgaccucgacgagugguccauggccaccuacuaccuguucgacgagagcggcgaguucaagcuggccucccacauguacugcagcuucuacccccccgacgaggacgaggaggagggggacugcgaggaggaggaguucgagccguccacccaguacgaguacggcacggaggacgacuaccagggcaagcaccucgaguucggggcgaccagcgccgcccugcagcccgaggaggagcaggaggaggacuggcuggacgacgacucccagcagaccgugggccagcaggacgggagcgaggacaaccagaccacgaccauccagaccaucguggagguccagccccagcucgagauggagcugacccccguggugcagacgaucgaggucaacuccuucagcggcuaccugaagcucaccgacaacguguacaucaagaacgccgacaucguggaggaggcgaagaaggucaagccgaccgugguggucaacgccgccaacguguaccugaagcacgggggcggcguggccggggcccugaacaaggcgaccaacaacgccaugcaggucgaguccgacgacuacaucgccacgaacggcccccucaagguggggggcagcugcguccuguccggccacaaccuggccaagcacugccuccacgugguggggcccaacgucaacaagggcgaggacauccagcugcugaagagcgccuacgagaacuucaaccagcacgaggugcuccuggcgccccugcucuccgccgggaucuucggcgccgacccgauccacagccugcgggugugcgucgacaccgugcgcaccaacguguaccuggccgucuucgacaagaaccucuacgacaagcugguguccagcuuccuggagaugaagagcgagaagcagguggagcagaagaucgccgagauccccaaggaggaggucaagcccuucaucaccgaguccaagcccagcguggagcagcggaagcaggacgacaagaagaucaaggcgugcguggaggaggucacgaccacccucgaggagaccaaguuccugacggagaaccugcuccuguacaucgacaucaacgggaaccugcacccggacuccgccacccucgugagcgacaucgacaucaccuuccugaagaaggacgcccccuacaucgugggcgacgucgugcaggagggcgugcugaccgccgucgugauccccacgaagaaggccgggggcaccaccgagaugcucgcgaaggcccugcgcaaggugcccaccgacaacuacaucacgaccuacccggggcagggccugaacggguacaccgucgaggaggccaagaccgugcucaagaagugcaaguccgccuucuacauccugcccagcaucaucuccaacgagaagcaggagauccugggcaccgugagcuggaaccuccgggagaugcuggcgcacgccgaggagacgcgcaagcugaugcccgucugcguggagaccaaggccaucguguccaccauccagcggaaguacaagggcaucaagauccaggagggggucguggacuacggcgcccgcuucuacuucuacaccagcaagacgaccguggccucccugaucaacacccucaacgaccugaacgagacccuggucacgaugccccucggguacgugacccacggccugaaccuggaggaggcggcccgguacaugcgcagccucaaggugccggccaccgucuccgugagcucccccgacgccgugaccgccuacaacggguaccugacgagcuccagcaagacccccgaggagcacuucaucgagaccaucucccuggcgggcagcuacaaggacuggagcuacuccggccagagcacccagcucgggaucgaguuccugaagcggggcgacaaguccgucuacuacacgagcaaccccaccaccuuccaccuggacggggaggugaucaccuucgacaaccucaagacgcugcugucccuccgcgaggugcggaccaucaaggucuucaccaccguggacaacaucaaccugcacacgcagguggucgacaugagcaugaccuacggccagcaguucggcccgaccuaccuggacggggccgacgugaccaagaucaagccccacaacucccacgagggcaagacguucuacgugcuccccaacgacgacacccugcgcgucgaggccuucgaguacuaccacaccaccgacccgagcuuccuggggcgguacauguccgcccucaaccacacgaagaaguggaaguacccccaggugaacggccugaccagcaucaagugggccgacaacaacugcuaccuggcgaccgcccuccugacccugcagcagaucgagcucaaguucaacccccccgcccugcaggacgccuacuaccgcgcgcgggccggggaggccgccaacuucugcgcccugauccucgcguacugcaacaagacggugggcgagcugggcgacguccgcgagaccauguccuaccuguuccagcacgccaaccucgacagcugcaagcgggugcugaacgucgugugcaagaccugcgggcagcagcagaccacccugaagggcguggaggccgucauguacauggggacgcucuccuacgagcaguucaagaagggcgugcagaucccgugcaccugcgggaagcaggccaccaaguaccuggugcagcaggagagccccuucgucaugauguccgccccccccgcgcaguacgagcugaagcacggcaccuucacgugcgccagcgaguacaccggcaacuaccagugcgggcacuacaagcacaucaccuccaaggagacccucuacugcaucgacggcgcccugcugacgaagagcagcgaguacaaggggccgaucaccgacguguucuacaaggagaacuccuacaccaccacgaucaagcccgugaccuacaagcucgacggcgucgugugcaccgagaucgaccccaagcuggacaacuacuacaagaaggacaacagcuacuucaccgagcagcccaucgaccuggugccgaaccagcccuaccccaacgccuccuucgacaacuucaaguucgucugcgacaacaucaaguucgccgacgaccucaaccagcugacgggguacaagaagcccgcgagccgcgagcugaaggugaccuucuucccggaccucaacggcgacguggucgccaucgacuacaagcacuacacccccuccuucaagaagggcgccaagcugcugcacaagcccaucguguggcacgugaacaacgccaccaacaaggcgacguacaagcccaacaccuggugcauccggugccucuggagcaccaagccggucgagaccuccaacagcuucgacgugcugaaguccgaggacgcccaggggauggacaaccuggccugcgaggaccucaagcccgugagcgaggaggucguggagaaccccacgauccagaaggacgugcuggagugcaacgucaagaccaccgagguggugggcgacaucauccugaagcccgccaacaacucccucaagaucaccgaggaggucgggcacacggaccugauggccgcguacguggacaacagcucccugaccaucaagaagccgaacgagcucagccgcgugcugggccugaagacccucgccacccacgggcuggccgccgucaacuccgugcccugggacacgaucgccaacuacgcgaagcccuuccugaacaagguggucagcaccaccaccaacaucgugacgcgcugccucaaccgggugugcaccaacuacaugccguacuucuucacccugcugcuccagcugugcaccuucacccgcuccacgaacagccggaucaaggccuccaugcccaccaccaucgccaagaacaccgucaagagcgugggcaaguucugccuggaggccagcuucaacuaccucaagucccccaacuucagcaagcugaucaacaucaucaucugguuccugcuccuguccgugugccugggcagccucaucuacuccacggccgcgcuggggguccugaugagcaaccucggcaugcccuccuacugcaccggguaccgcgagggcuaccugaacagcaccaacgugaccaucgccacguacugcaccggcuccaucccgugcagcgugugccuguccgggcucgacagccuggacaccuaccccucccuggagaccauccagaucacgaucagcuccuucaagugggaccucaccgccuucggccuggucgccgagugguuccuggccuacauccucuucacccgguucuucuacgugcuggggcuggcggccaucaugcagcucuucuucagcuacuucgccgugcacuucaucuccaacagcuggcugauguggcugaucaucaaccugguccagauggcccccaucuccgcgauggugcgcauguacaucuucuucgccagcuucuacuacguguggaagagcuacguccacgugguggacggcugcaacuccagcaccugcaugaugugcuacaagcggaaccgcgccacgcgggucgagugcaccaccaucgugaacgggguccgccgguccuucuacguguacgccaacggcggcaagggguucugcaagcuccacaacuggaacugcgugaacugcgacaccuucugcgccggcagcacguucaucuccgacgaggucgcgcgcgaccugagccugcaguucaagcggcccaucaacccgaccgaccaguccagcuacaucguggacuccgugaccgucaagaacgggagcauccaccucuacuucgacaaggccggccagaagaccuacgagcgccacucccugagccacuucgugaaccuggacaaccuccgggccaacaacacgaaggggucccugcccaucaacgugaucgucuucgacggcaagagcaagugcgaggaguccagcgccaaguccgccagcguguacuacucccagcugaugugccagcccauccuccugcuggaccaggcgcucgugagcgacgucggcgacagcgccgagguggccgugaagauguucgacgccuacgucaacaccuucuccagcaccuucaacgugcccauggagaagcugaagacccugguggccacggcggaggccgagcucgccaagaacgucucccuggacaacgugcugagcaccuucaucuccgccgcgcgccagggguucguggacagcgacgucgagaccaaggacgugguggagugccucaagcugucccaccagagcgacaucgaggucaccggcgacuccugcaacaacuacaugcugacguacaacaagguggagaacaugaccccgcgggaccucggggccugcaucgacugcagcgcccgccacaucaacgcccagguggccaagucccacaacaucgcgcugaucuggaacgucaaggacuucaugagccuguccgagcagcuccggaagcagauccgcagcgccgccaagaagaacaaccugcccuucaagcugaccugcgccaccacgcgccagguggugaacgucgugaccaccaagaucgcccucaagggcgggugaggacuaguuauaagacugacuagcccgaugggccucccaacgggcccuccuccccuccuugcaccgagauuaauaaaaaaaaaaaaaaaaaaaaaaaaaaaaaaaaaaaaaaaaaaaaaaaaaaaaaaaaaaaaaaaaugcaucccccccccccccccccccccccccccccccaaaggcucuuuucagagccaccagaauu

SEQ ID NO: 21514 - RNA, 6058 nt, Artificial Sequence
  SARS-CoV-2__MT843319.1__non-structural protein 3 (NSP3) mRNA gc
aggagaaagcuuaccauggcccccaccaaggugaccuucggcgacgacacggucaucgaggugcagggguacaagagcgugaacaucaccuucgagcuggacgagcgcaucgacaagguccucaacgagaagugcuccgccuacaccguggagcugggcaccgaggugaacgaguucgcgugcgucguggccgacgccgugaucaagacgcugcagccggucagcgagcuccugaccccccuggggaucgaccucgacgagugguccauggccaccuacuaccuguucgacgagagcggcgaguucaagcuggccucccacauguacugcagcuucuacccccccgacgaggacgaggaggagggggacugcgaggaggaggaguucgagccguccacccaguacgaguacggcacggaggacgacuaccagggcaagccccucgaguucggggcgaccagcgccgcccugcagcccgaggaggagcaggaggaggacuggcuggacgacgacucccagcagaccgugggccagcaggacgggagcgaggacaaccagaccacgaccauccagaccaucguggagguccagccccagcucgagauggagcugaccccgguggugcagacgaucgaggucaacuccuucagcggcuaccugaagcucaccgacaacguguacaucaagaacgccgacaucguggaggaggcgaagaaggucaagcccaccgugguggucaacgccgccaacguguaccugaagcacgggggcggcguggccggggcccugaacaaggcgaccaacaacgccaugcaggucgaguccgacgacuacaucgccacgaacggcccccucaagguggggggcagcugcguccuguccggccacaaccuggccaagcacugccuccacgugguggggcccaacgucaacaagggcgaggacauccagcugcugaagagcgccuacgagaacuucaaccagcacgaggugcuccuggcgccgcugcucuccgccgggaucuucggcgccgaccccauccacagccugcgggugugcgucgacaccgugcgcaccaacguguaccuggccgucuucgacaagaaccucuacgacaagcugguguccagcuuccuggagaugaagagcgagaagcagguggagcagaagaucgccgagauccccaaggaggaggucaagcccuucaucaccgaguccaagccgagcguggagcagcggaagcaggacgacaagaagaucaaggcgugcguggaggaggucacgaccacccucgaggagaccaaguuccugacggagaaccugcuccuguacaucgacaucaacgggaaccugcaccccgacuccgccacccucgugagcgacaucgacaucaccuuccugaagaaggacgcccccuacaucgugggcgacgucgugcaggagggcgugcugaccgccgucgugauccccacgaagaaggccgggggcaccaccgagaugcucgcgaaggcccugcgcaaggugccgaccgacaacuacaucacgaccuaccccgggcagggccugaacggguacaccgucgaggaggccaagaccgugcucaagaagugcaaguccgccuucuacauccugcccagcaucaucuccaacgagaagcaggagauccugggcaccgugagcuggaaccuccgggagaugcuggcgcacgccgaggagacgcgcaagcugaugcccgucugcguggagaccaaggccaucguguccaccauccagcggaaguacaagggcaucaagauccaggagggggucguggacuacggcgcccgcuucuacuucuacaccagcaagacgaccguggccucccugaucaacacccucaacgaccugaacgagacccuggucacgaugccgcucggguacgugacccacggccugaaccuggaggaggcggcccgguacaugcgcagccucaaggugcccgccaccgucuccgugagcucccccgacgccgugaccgccuacaacggguaccugacgagcuccagcaagacccccgaggagcacuucaucgagaccaucucccuggcgggcagcuacaaggacuggagcuacuccggccagagcacccagcucgggaucgaguuccugaagcggggcgacaaguccgucuacuacacgagcaacccgaccaccuuccaccuggacggggaggugaucaccuucgacaaccucaagacgcugcugucccuccgcgaggugcggaccaucaaggucuucaccaccguggacaacaucaaccugcacacgcagguggucgacaugagcaugaccuacggccagcaguucggccccaccuaccuggacggggccgacgugaccaagaucaagccccacaacucccacgagggcaagacguucuacgugcucccgaacgacgacacccugcgcgucgaggccuucgaguacuaccacaccaccgaccccagcuuccuggggcgguacauguccgcccucaaccacacgaagaaguggaaguacccccaggugaacggccugaccagcaucaagugggccgacaacaacugcuaccuggcgaccgcccuccugacccugcagcagaucgagcucaaguucaaccccccggcccugcaggacgccuacuaccgcgcgcgggccggggaggccgccaacuucugcgcccugauccucgcguacugcaacaagacggugggcgagcugggcgacguccgcgagaccauguccuaccuguuccagcacgccaaccucgacagcugcaagcgggugcugaacgucgugugcaagaccugcgggcagcagcagaccacccugaagggcguggaggccgucauguacauggggacgcucuccuacgagcaguucaagaagggcgugcagauccccugcaccugcgggaagcaggccaccaaguaccuggugcagcaggagagccccuucgucaugauguccgcccccccggcgcaguacgagcugaagcacggcaccuucacgugcgccagcgaguacaccggcaacuaccagugcgggcacuacaagcacaucaccuccaaggagacccucuacugcaucgacggcgcccugcugacgaagagcagcgaguacaaggggcccaucaccgacguguucuacaaggagaacuccuacaccaccacgaucaagcccgugaccuacaagcucgacggcgucgugugcaccgagaucgaccccaagcuggacaacuacuacaagaaggacaacagcuacuucaccgagcagccgaucgaccuggugcccaaccagcccuaccccaacgccuccuucgacaacuucaaguucgucugcgacaacaucaaguucgccgacgaccucaaccagcugacgggguacaagaagccggcgagccgcgagcugaaggugaccuucuuccccgaccucaacggcgacguggucgccaucgacuacaagcacuacacccccuccuucaagaagggcgccaagcugcugcacaagcccaucguguggcacgugaacaacgccaccaacaaggcgacguacaagccgaacaccuggugcauccggugccucuggagcaccaagcccgucgagaccuccaacagcuucgacgugcugaaguccgaggacgcccaggggauggacaaccuggccugcgaggaccucaagcccgugagcgaggaggucguggagaaccccacgauccagaaggacgugcuggagugcaacgucaagaccaccgagguggugggcgacaucauccugaagccggccaacaacucccucaagaucaccgaggaggucgggcacacggaccugauggccgcguacguggacaacagcucccugaccaucaagaagcccaacgagcucagccgcgugcugggccugaagacccucgccacccacgggcuggccgccgucaacuccgugcccugggacacgaucgccaacuacgcgaagccguuccugaacaagguggucagcaccaccaccaacaucgugacgcgcugccucaaccgggugugcaccaacuacaugcccuacuucuucacccugcugcuccagcugugcaccuucacccgcuccacgaacagccggaucaaggccuccaugcccaccaccaucgccaagaacaccgucaagagcgugggcaaguucugccuggaggccagcuucaacuaccucaagucccccaacuucagcaagcugaucaacaucaucaucugguuccugcuccuguccgugugccugggcagccucaucuacuccacggccgcgcuggggguccugaugagcaaccucggcaugccguccuacugcaccggguaccgcgagggcuaccugaacagcaccaacgugaccaucgccacguacugcaccggcuccauccccugcagcgugugccuguccgggcucgacagccuggacaccuaccccucccuggagaccauccagaucacgaucagcuccuucaagugggaccucaccgccuucggccuggucgccgagugguuccuggccuacauccucuucacccgguucuucuacgugcuggggcuggcggccaucaugcagcucuucuucagcuacuucgccgugcacuucaucuccaacagcuggcugauguggcugaucaucaaccugguccagauggcccccaucuccgcgauggugcgcauguacaucuucuucgccagcuucuacuacguguggaagagcuacguccacgugguggacggcugcaacuccagcaccugcaugaugugcuacaagcggaaccgcgccacgcgggucgagugcaccaccaucgugaacgggguccgccgguccuucuacguguacgccaacggcggcaagggguucugcaagcuccacaacuggaacugcgugaacugcgacaccuucugcgccggcagcacguucaucuccgacgaggucgcgcgcgaccugagccugcaguucaagcggccgaucaaccccaccgaccaguccagcuacaucguggacuccgugaccgucaagaacgggagcauccaccucuacuucgacaaggccggccagaagaccuacgagcgccacucccugagccacuucgugaaccuggacaaccuccgggccaacaacacgaaggggucccugcccaucaacgugaucgucuucgacggcaagagcaagugcgaggaguccagcgccaaguccgccagcguguacuacucccagcugaugugccagcccauccuccugcuggaccaggcgcucgugagcgacgucggcgacagcgccgagguggccgugaagauguucgacgccuacgucaacaccuucuccagcaccuucaacgugccgauggagaagcugaagacccugguggccacggcggaggccgagcucgccaagaacgucucccuggacaacgugcugagcaccuucaucuccgccgcgcgccagggguucguggacagcgacgucgagaccaaggacgugguggagugccucaagcugucccaccagagcgacaucgaggucaccggcgacuccugcaacaacuacaugcugacguacaacaagguggagaacaugaccccccgggaccucggggccugcaucgacugcagcgcccgccacaucaacgcccagguggccaagucccacaacaucgcgcugaucuggaacgucaaggacuucaugagccuguccgagcagcuccggaagaagauccgcagcgccgccaagaagaacaaccugcccuucaagcugaccugcgccaccacgcgccagguggugaacgucgugaccaccaagaucgcccucaagggcgggugaggacuaguuauaagacugacuagcccgaugggccucccaacgggcccuccuccccuccuugcaccgagauuaauaaaaaaaaaaaaaaaaaaaaaaaaaaaaaaaaaaaaaaaaaaaaaaaaaaaaaaaaaaaaaaaaugcaucccccccccccccccccccccccccccccccaaaggcucuuuucagagccaccagaauu

SEQ ID NO: 21515 - RNA, 6058 nt, Artificial Sequence
  SARS-CoV-2__MT843738.1__non-structural protein 3 (NSP3) mRNA gc
aggagaaagcuuaccauggcccccaccaaggugaccuucggcgacgacacggucaucgaggugcagggguacaagagcgugaacaucaccuucgagcuggacgagcgcaucgacaagguccucaacgagaagugcuccgccuacaccguggagcugggcaccgaggugaacgaguucgcgugcgucguggccgacgccgugaucaagacgcugcagccggucuucgagcuccugaccccccuggggaucgaccucgacgaguggagcauggccaccuacuaccuguucgacgaguccggcgaguucaagcuggccagccacauguacugcuccuucuacccccccgacgaggacgaggaggagggggacugcgaggaggaggaguucgagccgagcacccaguacgaguacggcacggaggacgacuaccagggcaagccccucgaguucggggcgaccuccgccgcccugcagcccgaggaggagcaggaggaggacuggcuggacgacgacagccagcagaccgugggccagcaggacggguccgaggacaaccagaccacgaccauccagaccaucguggagguccagccccagcucgagauggagcugaccccgguggugcagacgaucgaggucaacagcuucuccggcuaccugaagcucaccgacaacguguacaucaagaacgccgacaucguggaggaggcgaagaaggucaagcccaccgugguggucaacgccgccaacguguaccugaagcacgggggcggcguggccggggcccugaacaaggcgaccaacaacgccaugcaggucgagagcgacgacuacaucgccacgaacggcccccucaagguggggggcuccugcguccugagcggccacaaccuggccaagcacugccuccacgugguggggcccaacgucaacaagggcgaggacauccagcugcugaaguccgccuacgagaacuucaaccagcacgaggugcuccuggcgccgcugcucagcgccgggaucuucggcgccgaccccauccacucccugcgggugugcgucgacaccgugcgcaccaacguguaccuggccgucuucgacaagaaccucuacgacaagcuggugagcuccuuccuggagaugaagagcgagaagcagguggagcagaagaucgccgagauccccaaggaggaggucaagcccuucaucaccgagagcaagccguccguggagcagcggaagcaggacgacaagaagaucaaggcgugcguggaggaggucacgaccacccucgaggagaccaaguuccugacggagaaccugcuccuguacaucgacaucaacgggaaccugcaccccgacagcgccacccucguguccgacaucgacaucaccuuccugaagaaggacgcccccuacaucgugggcgacgucgugcaggagggcgugcugaccgccgucgugauccccacgaagaaggccgggggcaccaccgagaugcucgcgaaggcccugcgcaaggugccgaccgacaacuacaucacgaccuaccccgggcagggccugaacggguacaccgucgaggaggccaagaccgugcucaagaagugcaagagcgccuucuacauccugcccuccaucaucagcaacgagaagcaggagauccugggcaccguguccuggaaccuccgggagaugcuggcgcacgccgaggagacgcgcaagcugaugcccgucugcguggagaccaaggccaucgugagcaccauccagcggaaguacaagggcaucaagauccaggagggggucguggacuacggcgcccgcuucuacuucuacaccuccaagacgaccguggccagccugaucaacacccucaacgaccugaacgagacccuggucacgaugccgcucggguacgugacccacggccugaaccuggaggaggcggcccgguacaugcgcucccucaaggugcccgccaccgucagcguguccagccccgacgccgugaccgccuacaacggguaccugacguccagcuccaagacccccgaggagcacuucaucgagaccaucagccuggcgggcuccuacaaggacuggagcuacagcggccaguccacccagcucgggaucgaguuccugaagcggggcgacaagagcgucuacuacacguccaacccgaccaccuuccaccuggacggggaggugaucaccuucgacaaccucaagacgcugcugagccuccgcgaggugcggaccaucaaggucuucaccaccguggacaacaucaaccugcacacgcagguggucgacauguccaugaccuacggccagcaguucggccccaccuaccuggacggggccgacgugaccaagaucaagccccacaacagccacgagggcaagacguucuacgugcucccgaacgacgacacccugcgcgucgaggccuucgaguacuaccacaccaccgaccccuccuuccuggggcgguacaugagcgcccucaaccacacgaagaaguggaaguacccccaggugaacggccugaccuccaucaagugggccgacaacaacugcuaccuggcgaccgcccuccugacccugcagcagaucgagcucaaguucaaccccccggcccugcaggacgccuacuaccgcgcgcgggccggggaggccgccaacuucugcgcccugauccucgcguacugcaacaagacggugggcgagcugggcgacguccgcgagaccaugagcuaccuguuccagcacgccaaccucgacuccugcaagcgggugcugaacgucgugugcaagaccugcgggcagcagcagaccacccugaagggcguggaggccgucauguacauggggacgcucagcuacgagcaguucaagaagggcgugcagauccccugcaccugcgggaagcaggccaccaaguaccuggugcagcaggagucccccuucgucaugaugagcgcccccccggcgcaguacgagcugaagcacggcaccuucacgugcgccuccgaguacaccggcaacuaccagugcgggcacuacaagcacaucaccagcaaggagacccucuacugcaucgacggcgcccugcugacgaaguccagcgaguacaaggggcccaucaccgacguguucuacaaggagaacagcuacaccaccacgaucaagcccgugaccuacaagcucgacggcgucgugugcaccgagaucgaccccaagcuggacaacuacuacaagaaggacaacuccuacuucaccgagcagccgaucgaccuggugcccaaccagcccuaccccaacgccagcuucgacaacuucaaguucgucugcgacaacaucaaguucgccgacgaccucaaccagcugacgggguacaagaagccggcgucccgcgagcugaaggugaccuucuuccccgaccucaacggcgacguggucgccaucgacuacaagcacuacacccccagcuucaagaagggcgccaagcugcugcacaagcccaucguguggcacgugaacaacgccaccaacaaggcgacguacaagccgaacaccuggugcauccggugccucugguccaccaagcccgucgagaccagcaacuccuucgacgugcugaagagcgaggacgcccaggggauggacaaccuggccugcgaggaccucaagcccguguccgaggaggucguggagaaccccacgauccagaaggacgugcuggagugcaacgucaagaccaccgagguggugggcgacaucauccugaagccggccaacaacagccucaagaucaccgaggaggucgggcacacggaccugauggccgcguacguggacaacuccagccugaccaucaagaagcccaacgagcucucccgcgugcugggccugaagacccucgccacccacgggcuggccgccgucaacagcgugcccugggacacgaucgccaacuacgcgaagccguuccugaacaagguggucuccaccaccaccaacaucgugacgcgcugccucaaccgggugugcaccaacuacaugcccuacuucuucacccugcugcuccagcugugcaccuucacccgcagcacgaacucccggaucaaggccagcaugcccaccaccaucgccaagaacaccgucaaguccgugggcaaguucugccuggaggccagcuucaacuaccucaagagccccaacuucuccaagcugaucaacaucaucaucugguuccugcuccugagcgugugccugggcucccucaucuacagcacggccgcgcuggggguccugauguccaaccucggcaugccgagcuacugcaccggguaccgcgagggcuaccugaacuccaccaacgugaccaucgccacguacugcaccggcagcauccccugcuccgugugccugagcgggcucgacucccuggacaccuaccccagccuggagaccauccagaucacgaucuccagcuucaagugggaccucaccgccuucggccuggucgccgagugguuccuggccuacauccucuucacccgguucuucuacgugcuggggcuggcggccaucaugcagcucuucuucuccuacuucgccgugcacuucaucagcaacuccuggcugauguggcugaucaucaaccugguccagauggcccccaucagcgcgauggugcgcauguacaucuucuucgccuccuucuacuacguguggaagagcuacguccacgugguggacggcugcaacagcuccaccugcaugaugugcuacaagcggaaccgcgccacgcgggucgagugcaccaccaucgugaacgggguccgccggagcuucuacguguacgccaacggcggcaagggguucugcaagcuccacaacuggaacugcgugaacugcgacaccuucugcgccggcuccacguucaucagcgacgaggucgcgcgcgaccugucccugcaguucaagcggccgaucaaccccaccgaccagagcuccuacaucguggacagcgugaccgucaagaacggguccauccaccucuacuucgacaaggccggccagaagaccuacgagcgccacagccugucccacuucgugaaccuggacaaccuccgggccaacaacacgaaggggagccugcccaucaacgugaucgucuucgacggcaaguccaagugcgaggagagcuccgccaagagcgccuccguguacuacagccagcugaugugccagcccauccuccugcuggaccaggcgcucguguccgacgucggcgacagcgccgagguggccgugaagauguucgacgccuacgucaacaccuucagcuccaccuucaacgugccgauggagaagcugaagacccugguggccacggcggaggccgagcucgccaagaacgucagccuggacaacgugcuguccaccuucaucagcgccgcgcgccagggguucguggacuccgacgucgagaccaaggacgugguggagugccucaagcugagccaccaguccgacaucgaggucaccggcgacagcugcaacaacuacaugcugacguacaacaagguggagaacaugaccccccgggaccucggggccugcaucgacugcuccgcccgccacaucaacgcccagguggccaagagccacaacaucgcgcugaucuggaacgucaaggacuucaugucccugagcgagcagcuccggaagcagauccgcuccgccgccaagaagaacaaccugcccuucaagcugaccugcgccaccacgcgccagguggugaacgucgugaccaccaagaucgcccucaagggcgggugaggacuaguuauaagacugacuagcccgaugggccucccaacgggcccuccuccccuccuugcaccgagauuaauaaaaaaaaaaaaaaaaaaaaaaaaaaaaaaaaaaaaaaaaaaaaaaaaaaaaaaaaaaaaaaaaugcaucccccccccccccccccccccccccccccccaaaggcucuuuucagagccaccagaauu

SEQ ID NO: 21516 - RNA, 6058 nt, Artificial Sequence
  SARS-CoV-2__MT844021.1__non-structural protein 3 (NSP3) mRNA gc
aggagaaagcuuaccauggcccccaccaaggugaccuucggcgacgacacggucaucgaggugcagggguacaagagcgugaacaucaccuucgagcuggacgagcgcaucgacaagguccucaacgagaagugcuccgccuacaccguggagcugggcaccgaggugaacgaguucgcgugcgucguggccgacgccgugaucaagacgcugcagccggucagcgagcuccugaccccccuggggaucgaccucgacgagugguccauggccaccuacuaccuguucgacgagagcggcgaguucaagcuggccucccacauguacugcagcuucuacccccccgacgaggacgaggaggagggggacugcgaggaggaggaguucgagccguccacccaguacgaguacggcacggaggacgacuaccagggcaagccccucgaguucggggcgaccagcgccgcccugcagcccgaggaggagcaggaggaggacuggcuggacgacgacucccagcagaccgugggccagcaggacgggagcgaggacaaccagaccacgaccauccagaccaucguggagguccagccccagcucgagauggagcugaccccgguggugcagacgaucgaggucaacuccuucagcggcuaccugaagcucaccgacaacguguacaucaagaacgccgacaucguggaggaggcgaagaaggucaagcccaccgugguggucaacgccgccaacguguaccugaagcacgggggcggcguggccggggcccugaacaaggcgaccaacaacgccaugcaggucgaguccgacgacuacaucgccacgaacggcccccucaagguggggggcagcugcguccuguccggccacaaccuggccaagcacugccuccacgugguggggcccaacgucaacaagggcgaggacauccagcugcugaagagcgccuacgagaacuucaaccagcacgaggugcuccuggcgccgcugcucuccgccgggaucuucggcgccgaccccauccacagccugcgggugugcgucgacaccgugcgcaccaacguguaccuggccgucuucgacaagaaccucuacgacaagcugguguccagcuuccuggagaugaagagcgagaagcagguggagcagaagaucgccgagauccccaaggaggaggucaagcccuucaucaccgaguccaagccgagcguggagcagcggaagcaggacgacaagaagaucaaggcgugcguggaggaggucacgaccacccucgaggagaccaaguuccugacggagaaccugcuccuguacaucgacaucaacgggaaccugcaccccgacuccgccacccucgugagcgacaucgacaucaccuuccugaagaaggacgcccccuacaucgugggcgacgucgugcaggagggcgugcugaccgccgucgugauccccacgaagaaggccgggggcaccaccgagaugcucgcgaaggcccugcgcaaggugccgaccgacaacuacaucacgaccuaccccgggcagggccugaacggguacaccgucgaggaggccaagaccgugcucaagaagugcaaguccgccuucuacauccugcccagcaucaucuccaacgagaagcaggagauccugggcaccgugagcuggaaccuccgggagaugcuggcgcacgccgaggagacgcgcaagcugaugcccgucugcguggagaccaaggccaucguguccaccauccagcggaaguacaagggcaucaagauccaggagggggucguggacuacggcgcccgcuucuacuucuacaccagcaagacgaccguggccucccugaucaacacccucaacgaccugaacgagacccuggucacgaugccgcucggguacgugacccacggccugaaccuggaggaggcggcccgguacaugcgcagccucaaggugcccgccaccgucuccgugagcucccccgacgccgugaccgccuacaacggguaccugacgagcuccagcaagacccccgaggagcacuucaucgagaccaucucccuggcgggcagcuacaaggacuggagcuacuccggccagagcacccagcucgggaucgaguuccugaagcggggcgacaaguccgucuacuacacgagcaacccgaccaccuuccaccuggacggggaggugaucaccuucgacaaccucaagacgcugcugucccuccgcgaggugcggaccaucaaggucuucaccaccguggacaacaucaaccugcacacgcagguggucgacaugagcaugaccuacggccagcaguucggccccaccuaccuggacggggccgacgugaccaagaucaagccccacaacucccacgagggcaagacguucuacgugcucccgaacgacgacacccugcgcgucgaggccuucgaguacuaccacaccaccgaccugagcuuccucgggcgguacauguccgcccugaaccacacgaagaaguggaaguacccccaggugaacggccugaccagcaucaagugggccgacaacaacugcuaccucgcgaccgcccugcugacccuccagcagaucgagcugaaguucaacccccccgcccugcaggacgccuacuaccgcgcgcgggccggggaggccgccaacuucugcgcccucauccuggcguacugcaacaagacggugggcgagcugggcgacguccgcgagaccauguccuaccucuuccagcacgccaaccuggacagcugcaagcgggugcugaacgucgugugcaagaccugcgggcagcagcagaccacccucaagggcguggaggccgucauguacauggggacgcuguccuacgagcaguucaagaagggcgugcagaucccgugcaccugcgggaagcaggccaccaaguaccuggugcagcaggagagccccuucgucaugauguccgccccccccgcgcaguacgagcucaagcacggcaccuucacgugcgccagcgaguacaccggcaacuaccagugcgggcacuacaagcacaucaccuccaaggagacccuguacugcaucgacggcgcccugcucacgaagagcagcgaguacaaggggccgaucaccgacguguucuacaaggagaacuccuacaccaccacgaucaagcccgugaccuacaagcuggacggcgucgugugcaccgagaucgaccccaagcuggacaacuacuacaagaaggacaacagcuacuucaccgagcagcccaucgaccucgugccgaaccagcccuaccccaacgccuccuucgacaacuucaaguucgucugcgacaacaucaaguucgccgacgaccugaaccagcugacgggguacaagaagcccgcgagccgcgagcucaaggugaccuucuucccggaccugaacggcgacguggucgccaucgacuacaagcacuacacccccuccuucaagaagggcgccaagcugcuccacaagcccaucguguggcacgugaacaacgccaccaacaaggcgacguacaagcccaacaccuggugcauccggugccuguggagcaccaagccggucgagaccuccaacagcuucgacgugcugaaguccgaggacgcccaggggauggacaaccucgccugcgaggaccugaagcccgugagcgaggaggucguggagaaccccacgauccagaaggacgugcuggagugcaacgucaagaccaccgagguggugggcgacaucauccucaagcccgccaacaacucccugaagaucaccgaggaggucgggcacacggaccugauggccgcguacguggacaacagcucccucaccaucaagaagccgaacgagcugagccgcgugcugggccucaagacccuggccacccacgggcuggccgccgucaacuccgugcccugggacacgaucgccaacuacgcgaagcccuuccucaacaagguggucagcaccaccaccaacaucgugacgcgcugccugaaccgggugugcaccaacuacaugccguacuucuucacccugcuccugcagcugugcaccuucacccgcuccacgaacagccggaucaaggccuccaugcccaccaccaucgccaagaacaccgucaagagcgugggcaaguucugccucgaggccagcuucaacuaccugaagucccccaacuucagcaagcugaucaacaucaucaucugguuccuccugcuguccgugugccucggcagccugaucuacuccacggccgcgcuggggguccucaugagcaaccugggcaugcccuccuacugcaccggguaccgcgagggcuaccugaacagcaccaacgugaccaucgccacguacugcaccggcuccaucccgugcagcgugugccucuccgggcuggacagccuggacaccuaccccucccucgagaccauccagaucacgaucagcuccuucaagugggaccugaccgccuucggccuggucgccgagugguuccucgccuacauccuguucacccgguucuucuacgugcuggggcucgcggccaucaugcagcuguucuucagcuacuucgccgugcacuucaucuccaacagcuggcugauguggcugaucaucaaccucguccagauggcccccaucuccgcgauggugcgcauguacaucuucuucgccagcuucuacuacguguggaagagcuacguccacgugguggacggcugcaacuccagcaccugcaugaugugcuacaagcggaaccgcgccacgcgggucgagugcaccaccaucgugaacgggguccgccgguccuucuacguguacgccaacggcggcaagggguucugcaagcugcacaacuggaacugcgugaacugcgacaccuucugcgccggcagcacguucaucuccgacgaggucgcgcgcgaccugagccuccaguucaagcggcccaucaacccgaccgaccaguccagcuacaucguggacuccgugaccgucaagaacgggagcauccaccuguacuucgacaaggccggccagaagaccuacgagcgccacucccugagccacuucgugaaccucgacaaccugcgggccaacaacacgaaggggucccugcccaucaacgugaucgucuucgacggcaagagcaagugcgaggaguccagcgccaaguccgccagcguguacuacucccagcucaugugccagcccauccugcugcucgaccaggcgcuggugagcgacgucggcgacagcgccgagguggccgugaagauguucgacgccuacgucaacaccuucuccagcaccuucaacgugcccauggagaagcugaagacccucguggccacggcggaggccgagcuggccaagaacgucucccuggacaacgugcucagcaccuucaucuccgccgcgcgccagggguucguggacagcgacgucgagaccaaggacgugguggagugccugaagcugucccaccagagcgacaucgaggucaccggcgacuccugcaacaacuacaugcucacguacaacaagguggagaacaugaccccgcgggaccugggggccugcaucgacugcagcgcccgccacaucaacgcccagguggccaagucccacaacaucgcgcugaucuggaacgucaaggacuucaugagccucuccgagcagcugcggaagcagauccgcagcgccgccaagaagaacaaccugcccuucaagcucaccugcgccaccacgcgccagguggugaacgucgugaccaccaagaucgcccugaagggcgggugaggacuaguuauaagacugacuagcccgaugggccucccaacgggcccuccuccccuccuugcaccgagauuaauaaaaaaaaaaaaaaaaaaaaaaaaaaaaaaaaaaaaaaaaaaaaaaaaaaaaaaaaaaaaaaaaugcaucccccccccccccccccccccccccccccccaaaggcucuuuucagagccaccagaauu

SEQ ID NO: 21517 - RNA, 6058 nt, Artificial Sequence
  SARS-CoV-2__MT844044.1__non-structural protein 3 (NSP3) mRNA gc
aggagaaagcuuaccauggcccccaccaaggugaccuucggcgacgacacggucaucgaggugcagggguacaagagcgugaacaucaccuucgagcuggacgagcgcaucgacaagguccucaacgagaagugcuccgccuacaccguggagcugggcaccgaggugaacgaguucgcgugcgucguggccgacgccgugaucaagacgcugcagccggucagcgagcuccugaccccccuggggaucgaccucgacgagugguccauggccaccuacuaccuguucgacgagagcggcgaguucaagcuggccucccacauguacugcagcuucuacccccccgacgaggacgaggaggagggggacugcgaggaggaggaguucgagccguccacccaguacgaguacggcacggaggacgacuaccagggcaagccccucgaguucggggcgaccagcgccgcccugcagcccgaggaggagcaggaggaggacuggcuggacgacgacucccagcagaccgugggccagcaggacgggagcgaggacaaccagaccacgaccauccagaccaucguggagguccagccccagcucgagauggagcugaccccgguggugcagacgaucgaggucaacuccuucagcggcuaccugaagcucaccgacaacguguacaucaagaacgccgacaucguggaggaggcgaagaaggucaagcccaccgugguggucaacgccgccaacguguaccugaagcacgggggcggcguggccggggcccugaacaaggcgaccaacaacgccaugcaggucgaguccgacgacuacaucgccacgaacggcccccucaagguggggggcagcugcguccuguccggccacaaccuggccaagcacugccuccacgugguggggcccaacgucaacaagggcgaggacauccagcugcugaagagcgccuacgagaacuucaaccagcacgaggugcuccuggcgccgcugcucuccgccgggaucuucggcgccgaccccauccacagccugcgggugugcgucgacaccgugcgcaccaacguguaccuggccgucuucgacaagaaccucuacgacaagcugguguccagcuuccuggagaugaagagcgagaagcagguggagcagaagaucgccgagauccccaaggaggaggucaagcccuucaucaccgaguccaagccgagcguggagcagcggaagcaggacgacaagaagaucaaggcgugcguggaggaggucacgaccacccucgaggagaccaaguuccugacggagaaccugcuccuguacaucgacaucaacgggaaccugcaccccgacuccgccacccucgugagcgacaucgacaucaccuuccugaagaaggacgcccccuacaucgugggcgacgucgugcaggagggcgugcugaccgccgucgugauccccacgaagaaggccgggggcaccaccgggaugcucgcgaaggcccugcgcaaggugccgaccgacaacuacaucacgaccuaccccggccaggggcugaacggcuacaccgucgaggaggccaagaccgugcucaagaagugcaaguccgccuucuacauccugcccagcaucaucuccaacgagaagcaggagauccugggcaccgugagcuggaaccuccgggagaugcuggcgcacgccgaggagacgcgcaagcugaugcccgucugcguggagaccaaggccaucguguccaccauccagcggaaguacaaggggaucaagauccaggagggcgucguggacuacggggcccgcuucuacuucuacaccagcaagacgaccguggccucccugaucaacacccucaacgaccugaacgagacccuggucacgaugccgcucggcuacgugacccacgggcugaaccuggaggaggcggcccgguacaugcgcagccucaaggugcccgccaccgucuccgugagcucccccgacgccgugaccgccuacaacggcuaccugacgagcuccagcaagacccccgaggagcacuucaucgagaccaucucccuggcgggcagcuacaaggacuggagcuacuccgggcagagcacccagcucggcaucgaguuccugaagcggggggacaaguccgucuacuacacgagcaacccgaccaccuuccaccuggacggcgaggugaucaccuucgacaaccucaagacgcugcugucccuccgcgaggugcggaccaucaaggucuucaccaccguggacaacaucaaccugcacacgcagguggucgacaugagcaugaccuacggccagcaguucgggcccaccuaccuggacggcgccgacgugaccaagaucaagccccacaacucccacgaggggaagacguucuacgugcucccgaacgacgacacccugcgcgucgaggccuucgaguacuaccacaccaccgaccccagcuuccugggccgguacauguccgcccucaaccacacgaagaaguggaaguacccccaggugaacgggcugaccagcaucaagugggccgacaacaacugcuaccuggcgaccgcccuccugacccugcagcagaucgagcucaaguucaaccccccggcccugcaggacgccuacuaccgcgcgcgggccggcgaggccgccaacuucugcgcccugauccucgcguacugcaacaagacggugggcgagcugggggacguccgcgagaccauguccuaccuguuccagcacgccaaccucgacagcugcaagcgggugcugaacgucgugugcaagaccugcggccagcagcagaccacccugaaggggguggaggccgucauguacaugggcacgcucuccuacgagcaguucaagaagggggugcagauccccugcaccugcggcaagcaggccaccaaguaccuggugcagcaggagagccccuucgucaugauguccgcccccccggcgcaguacgagcugaagcacggcaccuucacgugcgccagcgaguacaccgggaacuaccagugcggccacuacaagcacaucaccuccaaggagacccucuacugcaucgacggggcccugcugacgaagagcagcgaguacaagggccccaucaccgacguguucuacaaggagaacuccuacaccaccacgaucaagcccgugaccuacaagcucgacggggucgugugcaccgagaucgaccccaagcuggacaacuacuacaagaaggacaacagcuacuucaccgagcagccgaucgaccuggugcccaaccagcccuaccccaacgccuccuucgacaacuucaaguucgucugcgacaacaucaaguucgccgacgaccucaaccagcugacgggcuacaagaagccggcgagccgcgagcugaaggugaccuucuuccccgaccucaacggcgacguggucgccaucgacuacaagcacuacacccccuccuucaagaagggggccaagcugcugcacaagcccaucguguggcacgugaacaacgccaccaacaaggcgacguacaagccgaacaccuggugcauccggugccucuggagcaccaagcccgucgagaccuccaacagcuucgacgugcugaaguccgaggacgcccagggcauggacaaccuggccugcgaggaccucaagcccgugagcgaggaggucguggagaaccccacgauccagaaggacgugcuggagugcaacgucaagaccaccgagguggugggggacaucauccugaagccggccaacaacucccucaagaucaccgaggaggucggccacacggaccugauggccgcguacguggacaacagcucccugaccaucaagaagcccaacgagcucagccgcgugcuggggcugaagacccucgccacccacggccuggccgccgucaacuccgugcccugggacacgaucgccaacuacgcgaagccguuccugaacaagguggucagcaccaccaccaacaucgugacgcgcugccucaaccgggugugcaccaacuacaugcccuacuucuucacccugcugcuccagcugugcaccuucacccgcuccacgaacagccggaucaaggccuccaugcccaccaccaucgccaagaacaccgucaagagcgugggcaaguucugccuggaggccagcuucaacuaccucaagucccccaacuucagcaagcugaucaacaucaucaucugguuccugcuccuguccgugugccuggggagccucaucuacuccacggccgcgcugggcguccugaugagcaaccucgggaugccguccuacugcaccggcuaccgcgagggcuaccugaacagcaccaacgugaccaucgccacguacugcaccggguccauccccugcagcgugugccuguccggccucgacagccuggacaccuaccccucccuggagaccauccagaucacgaucagcuccuucaagugggaccucaccgccuucgggcuggucgccgagugguuccuggccuacauccucuucacccgguucuucuacgugcugggccuggcggccaucaugcagcucuucuucagcuacuucgccgugcacuucaucuccaacagcuggcugauguggcugaucaucaaccugguccagauggcccccaucuccgcgauggugcgcauguacaucuucuucgccagcuucuacuacguguggaagagcuacguccacgugguggacgggugcaacuccagcaccugcaugaugugcuacaagcggaaccgcgccacgcgggucgagugcaccaccaucgugaacggcguccgccgguccuucuacguguacgccaacggcgggaagggcuucugcaagcuccacaacuggaacugcgugaacugcgacaccuucugcgccgggagcacguucaucuccgacgaggucgcgcgcgaccugagccugcaguucaagcggccgaucaaccccaccgaccaguccagcuacaucguggacuccgugaccgucaagaacggcagcauccaccucuacuucgacaaggccgggcagaagaccuacgagcgccacucccugagccacuucgugaaccuggacaaccuccgggccaacaacacgaagggcucccugcccaucaacgugaucgucuucgacggcaagagcaagugcgaggaguccagcgccaaguccgccagcguguacuacucccagcugaugugccagcccauccuccugcuggaccaggcgcucgugagcgacgucggggacagcgccgagguggccgugaagauguucgacgccuacgucaacaccuucuccagcaccuucaacgugccgauggagaagcugaagacccugguggccacggcggaggccgagcucgccaagaacgucucccuggacaacgugcugagcaccuucaucuccgccgcgcgccagggcuucguggacagcgacgucgagaccaaggacgugguggagugccucaagcugucccaccagagcgacaucgaggucaccggggacuccugcaacaacuacaugcugacguacaacaagguggagaacaugaccccccgggaccucggcgccugcaucgacugcagcgcccgccacaucaacgcccagguggccaagucccacaacaucgcgcugaucuggaacgucaaggacuucaugagccuguccgagcagcuccggaagcagauccgcagcgccgccaagaagaacaaccugcccuucaagcugaccugcgccaccacgcgccagguggugaacgucgugaccaccaagaucgcccucaaggggggcugaggacuaguuauaagacugacuagcccgaugggccucccaacgggcccuccuccccuccuugcaccgagauuaauaaaaaaaaaaaaaaaaaaaaaaaaaaaaaaaaaaaaaaaaaaaaaaaaaaaaaaaaaaaaaaaaugcaucccccccccccccccccccccccccccccccaaaggcucuuuucagagccaccagaauu

SEQ ID NO: 21518 - RNA, 6058 nt, Artificial Sequence
  SARS-CoV-2__MT831129.1__non-structural protein 3 (NSP3) mRNA gc
aggagaaagcuuaccauggcccccaccaaggugaccuucggcgacgacacggucaucgaggugcagggguacaagagcgugaacaucaccuucgagcuggacgagcgcaucgacaagguccucaacgagaagugcuccgccuacaccguggagcugggcaccgaggugaacgaguucgcgugcgucguggccgacgccgugaucaagacgcugcagccggucagcgagcuccugaccccccuggggaucgaccucgacgagugguccauggccaccuacuaccuguucgacgagagcggcgaguucaagcuggccucccacauguacugcagcuucuacccccccgacgaggacgaggaggagggggacugcgaggaggaggaguucgagccguccacccaguacgaguacggcacggaggacgacuaccagggcaagccccucgaguucggggcgaccagcgccgcccugcagcccgaggaggagcaggaggaggacuggcuggacgacgacucccagcagaccgugggccagcaggacgggagcgaggacaaccagaccacgaccauccagaccaucguggagguccagccccagcucgagauggagcugaccccgguggugcagacgaucgaggucaacuccuucagcggcuaccugaagcucaccgacaacguguacaucaagaacgccgacaucguggaggaggcgaagaaggucaagcccaccgugguggucaacgccgccaacguguaccugaagcacgggggcggcguggccggggcccugaacaaggcgaccaacaacgccaugcaggucgaguccgacgacuacaucgccacgaacggcccccucaagguggggggcagcugcguccuguccggccacaaccuggccaagcacugccuccacgugguggggcccaacgucaacaagggcgaggacauccagcugcugaagagcgccuacgagaacuucaaccagcacgaggugcuccuggcgccgcugcucuccgccgggaucuucggcgccgaccccauccacagccugcgggugugcgucgacaccgugcgcaccaacguguaccuggccgucuucgacaagaaccucuacgacaagcugguguccagcuuccuggagaugaagagcgagaagcagguggagcagaagaucgccgagauccccaaggaggaggucaagcccuucaucaccgaguccaagccgagcguggagcagcggaagcaggacgacaagaagaucaaggcgugcguggaggaggucacgaccacccucgaggagaccaaguuccugacggagaaccugcuccuguacaucgacaucaacgggaaccugcaccccgacuccgccacccucgugagcgacaucgacaucaccuuccugaagaaggacgcccccuacaucgugggcgacgucgugcaggagggcgugcugaccgccgucgugauccccacgaagaaggccgggggcaccaccgagaugcucgcgaaggcccugcgcaaggugccgaccgacaacuacaucacgaccuaccccgggcagggccugaacggguacaccgucgaggacgccaagaccgugcucaagaagugcaaguccgccuucuacauccugcccagcaucaucuccaacgagaagcaggagauccugggcaccgugagcuggaaccuccgggagaugcuggcgcacgccgaggagacgcgcaagcugaugcccgucugcguggagaccaaggccaucguguccaccauccagcggaaguacaagggcaucaagauccaggagggggucguggacuacggcgcccgcuucuacuucuacaccagcaagacgaccguggccucccugaucaacacccucaacgaccugaacgagacccuggucacgaugccgcucggguacgugacccacggccugaaccuggaggaggcggcccgguacaugcgcagccucaaggugcccgccaccgucuccgugagcucccccgacgccgugaccgccuacaacggguaccugacgagcuccagcaagacccccgaggagcacuucaucgagaccaucucccuggcgggcagcuacaaggacuggagcuacuccggccagagcacccagcucgggaucgaguuccugaagcggggcgacaaguccgucuacuacacgagcaacccgaccaccuuccaccuggacggggaggugaucaccuucgacaaccucaagacgcugcugucccuccgcgaggugcggaccaucaaggucuucaccaccguggacaacaucaaccugcacacgcagguggucgacaugagcaugaccuacggccagcaguucggccccaccuaccuggacggggccgacgugaccaagaucaagccccacaacucccacgagggcaagacguucuacgugcucccgaacgacgacacccugcgcgucgaggccuucgaguacuaccacaccaccgaccccagcuuccuggggcgguacauguccgcccucaaccacacgaagaaguggaaguacccccaggugaacggccugaccagcaucaagugggccgacaacaacugcuaccuggcgaccgcccuccugacccugcagcagaucgagcucaaguucaaccccccggcccugcaggacgccuacuaccgcgcgcgggccggggaggccgccaacuucugcgcccugauccucgcguacugcaacaagacggugggcgagcugggcgacguccgcgagaccauguccuaccuguuccagcacgccaaccucgacagcugcaagcgggugcugaacgucgugugcaagaccugcgggcagcagcagaccacccugaagggcguggaggccgucauguacauggggacgcucuccuacgagcaguucaagaagggcgugcagauccccugcaccugcgggaagcaggccaccaaguaccuggugcagcaggagagccccuucgucaugauguccgcccccccggcgcaguacgagcugaagcacggcaccuucacgugcgccagcgaguacaccggcaacuaccagugcgggcacuacaagcacaucaccuccaaggagacccucuacugcaucgacggcgcccugcugacgaagagcagcgaguacaaggggcccaucaccgacguguucuacaaggagaacuccuacaccaccacgaucaagcccgugaccuacaagcucgacggcgucgugugcaccgagaucgaccccaagcuggacaacuacuacaagaaggacaacagcuacuucaccgagcagccgaucgaccuggugcccaaccagcccuaccccaacgccuccuucgacaacuucaaguucgucugcgacaacaucaaguucgccgacgaccucaaccagcugacgggguacaagaagccggcgagccgcgagcugaaggugaccuucuuccccgaccucaacggcgacguggucgccaucgacuacaagcacuacacccccuccuucaagaagggcgccaagcugcugcacaagcccaucguguggcacgugaacaacgccaccaacaaggcgacguacaagccgaacaccuggugcauccggugccucuggagcaccaagcccgucgagaccuccaacagcuucgacgugcugaaguccgaggacgcccaggggauggacaaccuggccugcgaggaccucaagcccgugagcgaggaggucguggagaaccccacgauccagaaggacgugcuggagugcaacgucaagaccaccgagguggugggcgacaucauccugaagccggccaacaacucccucaagaucaccgaggaggucgggcacacggaccugauggccgcguacguggacaacagcucccugaccaucaagaagcccaacgagcucagccgcgugcugggccugaagacccucgccacccacgggcuggccgccgucaacuccgugcccugggacacgaucgccaacuacgcgaagccguuccugaacaagguggucagcaccaccaccaacaucgugacgcgcugccucaaccgggugugcaccaacuacaugcccuacuucuucacccugcugcuccagcugugcaccuucacccgcuccacgaacagccggaucaaggccuccaugcccaccaccaucgccaagaacaccgucaagagcgugggcaaguucugccuggaggccagcuucaacuaccucaagucccccaacuucagcaagcugaucaacaucaucaucugguuccugcuccuguccgugugccugggcagccucaucuacuccacggccgcgcuggggguccugaugagcaaccucggcaugccguccuacugcaccggguaccgcgagggcuaccugaacagcaccaacgugaccaucgccacguacugcaccggcuccauccccugcagcgugugccuguccgggcucgacagccuggacaccuaccccucccuggagaccauccagaucacgaucagcuccuucaagugggaccucaccgccuucggccuggucgccgagugguuccuggccuacauccucuucacccgguucuucuacgugcuggggcuggcggccaucaugcagcucuucuucagcuacuucgccgugcacuucaucuccaacagcuggcugauguggcugaucaucaaccugguccagauggcccccaucuccgcgauggugcgcauguacaucuucuucgccagcuucuacuacguguggaagagcuacguccacgugguggacggcugcaacuccagcaccugcaugaugugcuacaagcggaaccgcgccacgcgggucgagugcaccaccaucgugaacgggguccgccgguccuucuacguguacgccaacggcggcaagggguucugcaagcuccacaacuggaacugcgugaacugcgacaccuucugcgccggcagcacguucaucuccgacgaggucgcgcgcgaccugagccugcaguucaagcggccgaucaaccccaccgaccaguccagcuacaucguggacuccgugaccgucaagaacgggagcauccaccucuacuucgacaaggccggccagaagaccuacgagcgccacucccugagccacuucgugaaccuggacaaccuccgggccaacaacacgaaggggucccugcccaucaacgugaucgucuucgacggcaagagcaagugcgaggaguccagcgccaaguccgccagcguguacuacucccagcugaugugccagcccauccuccugcuggaccaggcgcucgugagcgacgucggcgacagcgccgagguggccgugaagauguucgacgccuacgucaacaccuucuccagcaccuucaacgugccgauggagaagcugaagacccugguggccacggcggaggccgagcucgccaagaacgucucccuggacaacgugcugagcaccuucaucuccgccgcgcgccagggguucguggacagcgacgucgagaccaaggacgugguggagugccucaagcugucccaccagagcgacaucgaggucaccggcgacuccugcaacaacuacaugcugacguacaacaagguggagaacaugaccccccgggaccucggggccugcaucgacugcagcgcccgccacaucaacgcccagguggccaagucccacaacaucgcgcugaucuggaacgucaaggacuucaugagccuguccgagcagcuccggaagcagauccgcagcgccgccaagaagaacaaccugcccuucaagcugaccugcgccaccacgcgccagguggugaacgucgugaccaccaagaucgcccucaagggcgggugaggacuaguuauaagacugacuagcccgaugggccucccaacgggcccuccuccccuccuugcaccgagauuaauaaaaaaaaaaaaaaaaaaaaaaaaaaaaaaaaaaaaaaaaaaaaaaaaaaaaaaaaaaaaaaaaugcaucccccccccccccccccccccccccccccccaaaggcucuuuucagagccaccagaauu

SEQ ID NO: 21519 - RNA, 6058 nt, Artificial Sequence
  SARS-CoV-2__MT831131.1__non-structural protein 3 (NSP3) mRNA gc
aggagaaagcuuaccauggcccccaccaaggugaccuucggcgacgacacggucaucgaggugcagggguacaagagcgugaacaucaccuucgagcuggacgagcgcaucgacaagguccucaacgagaagugcuccgccuacaccguggagcugggcaccgaggugaacgaguucgcgugcgucguggccgacgccgugaucaagacgcugcagccggucagcgagcuccugaccccccuggggaucgaccucgacgagugguccauggccaccuacuaccuguucgacgagagcggcgaguucaagcuggccucccacauguacugcagcuucuacccccccgacgaggacgaggaggagggggacugcgaggaggaggaguucgagccguccacccaguacgaguacggcacggaggacgacuaccagggcaagccccucgaguucggggcgaccagcgccgcccugcagcccgaggaggagcaggaggaggacuggcuggacgacgacucccagcagaccgugggccagcaggacgggagcgaggacaaccagaccacgaccauccagaccaucguggagguccagccccagcucgagauggagcugaccccgguggugcagacgaucgaggucaacuccuucagcggcuaccugaagcucaccgacaacguguacaucaagaacgccgacaucguggaggaggcgaagaaggucaagcccaccgugguggucaacgccgccaacguguaccugaagcacgggggcggcguggccggggcccugaacaaggcgaccaacaacgccaugcaggucgaguccgacgacuacaucgccacgaacggcccccucaagguggggggcagcugcguccuguccggccacaaccuggccaagcacugccuccacgugguggggcccaacgucaacaagggcgaggacauccagcugcugaagagcgccuacgagaacuucaaccagcacgaggugcuccuggcgccgcugcucuccgccgggaucuucggcgccgaccccauccacagccugcgggugugcgucgacaccgugcgcaccaacguguaccuggccgucuucgacaagaaccucuacgacaagcugguguccagcuuccuggagaugaagagcgagaagcagguggagcagaagaucgccgagauccccaaggaggaggucaagcccuucaucaccgaguccaagccgagcguggagcagcggaagcaggacgacaagaagaucaaggcgugcguggaggaggucacgaccacccucgaggagaccaaguuccugacggagaaccugcuccuguacaucgacaucaacgggaaccugcaccccgacuccgccacccucgugagcgacaucgacaucaccuuccugaagaaggacgcccccuacaucgugggcgacgucgugcaggagggcgugcugaccgccgucgugauccccacgaagaaggccgggggcaccaccgagaugcucgcgaaggcccugcgcaaggugccgaccgacaacuacaucacgaccuaccccgggcagggccugaacggguacaccgucgaggaggccaagaccgugcucaagaagugcaaguccgccuucuacauccugcccagcaucaucuccaacgagaagcaggagauccugggcaccgugagcuggaaccuccgggagaugcuggcgcacgccgaggagacgcgcaagcugaugcccgucugcguggagaccaaggccaucguguccaccauccagcggaaguacaagggcaucaagauccaggagggggucguggacuacggcgcccgcuucuacuucuacaccagcaagacgaccguggccucccugaucaacacccucaacgaccugaacgagacccuggucacgaugccgcucggguacgugacccacggccugaaccuggaggaggcggcccgguacaugcgcagccucaaggugcccgccaccgucuccgugagcucccccgacgccgugaccgccuacaacggguaccugacgagcuccagcaagacccccgaggagcacuucaucgagaccaucucccuggcgggcagcuacaaggacuggagcuacuccggccagagcacccagcucgggaucgaguuccugaagcggggcgacaaguccgucuacuacacgagcaacccgaccaccuuccaccuggacggggaggugaucaccuucgacaaccucaagacgcugcugucccuccgcgaggugcggaccaucaaggucuucaccaccguggacaacaucaaccugcacacgcagguggucgacaugagcaugaccuacggccagcaguucggccccaccuaccuggacggggccgacgugaccaagaucaagccccacaacucccacgagggcaagacguucuacgugcucccgaacgacgacacccugcgcgucgaggccuucgaguacuaccacaccaccgaccccagcuuccuggggcgguacauguccgcccucaaccacacgaagaaguggaaguacccccaggugaacggccugaccagcaucaagugggccgacaacaacugcuaccuggcgaccgcccuccugacccugcagcagaucgagcucaaguucaaccccccggcccugcaggacgccuacuaccgcgcgcgggccggggaggccgccaacuucugcgcccugauccucgcguacugcaacaagacggugggcgagcugggcgacguccgcgagaccauguccuaccuguuccagcacgccaaccucgacagcugcaagcgggugcugaacgucgugugcaagaccugcgggcagcagcagaccacccugaagggcguggaggccgucauguacauggggacgcucuccuacgagcaguucaagaagggcgugcagauccccugcaccugcgggaagcaggccaccaaguaccuggugcagcaggagagccccuucgucaugauguccgcccccccggcgcaguacgagcugaagcacggcaccuucacgugcgccagcgaguacaccggcaacuaccagugcgggcacuacaagcacaucaccuccaaggagacccucuacugcaucgacggcgcccugcugacgaagagcagcgaguacaaggggcccaucaccgacguguucuacaaggagaacuccuacaccaccacgaucaagcccgugaccuacaagcucgacggcgucgugugcaccgagaucgaccccaagcuggacaacuacuacaagaaggacaacagcuacuucaccgagcagccgaucgaccuggugcccaaccagcccuaccccaacgccuccuucgacaacuucaaguucgucugcgacaacaucaaguucgccgacgaccucaaccagcugacgggguacaagaagccggcgagccgcgagcugaaggugaccuucuuccccgaccucaacggcgacguggucgccaucgacuacaagcacuacacccccuccuucaagaagggcgccaagcugcugcacaagcccaucguguggcacgugaacaacgccaccaacaaggcgacguacaagccgaacaccuggugcauccggugccucuggagcaccaagcccgucgagaccuccaacagcuucgacgugcugaaguccgaggacgcccaggggauggacaaccuggccugcgaggaccucaagcccgugagcgaggaggucguggagaaccccacgauccagaaggacgugcuggagugcaacgucaagaccaccgagguggugggcgacaucauccugaagccggccaacaacucccucaagaucaccgaggaggucgggcacacggaccugauggccgcguacguggacaacagcucccugaccaucaagaagcccaacgagcucagccgcgugcugggccugaagacccucgccacccacgggcuggccgccgucaacuccgugcccugggacacgaucgccaacuacgcgaagccguuccugaacaagguggucagcaccaccaccaacaucgugacgcgcugccucaaccgggugugcaccaacuacaugcccuacuucuucacccugcugcuccagcugugcaccuucacccgcuccacgaacagccggaucaaggccuccaugcccaccaccaucgccaagaacaccgucaagagcgugggcaaguucugccuggaggccagcuucaacuaccucaagucccccaacuucagcaagcugaucaacaucaucaucugguuccugcuccuguccgugugccugggcagccucaucuacuccacggccgcgcuggggguccugaugagcaaccucggcaugccguccuacugcaccggguaccgcgagggcuaccugaacagcaccaacgugaccaucgccacguacugcaccggcuccauccccugcagcgugugccuguccgggcucgacagccuggacaccuaccccucccuggagaccauccagaucacgaucagcuccuucaagugggaccucaccgccuucggccuggucgccgagugguuccuggccuacauccucuucacccgguucuucuacgugcuggggcuggcggccaucaugcagcucuucuucagcuacuucgccgugcacuucaucuccaacagcuggcugauguggcugaucaucaaccugguccagauggcccccaucuccgcgauggugcgcauguacaucuucuucgccagcuucuacuacguguggaagagcuacguccacgugguggacggcugcaacuccagcaccugcaugaugugcuacaagcggaaccgcgccacgcgggucgagugcaccaccaucgugaacgggguccgccgguccuucuacguguacgccaacggcggcaagggguucugcaagcuccacaacuggaacugcgugaacugcgacaccuucugcgccggcagcacguucaucuccgacgaggucgcgcgcgaccugagccugcaguucaagcggccgaucaaccccaccgaccaguccagcuacaucguggacuccgugaccgucaagaacgggagcauccaccucuacuucgacaaggccggccagaagaccuacgagcgccacucccugagccacuucgugaaccuggacaaccuccgggccaacaacacgaaggggucccugcccaucaacgugaucgucuucgacggcaagagcaagugcgaggaguccagcgccaaguccgccagcguguacuacucccagcugaugugccagcccauccuccugcuggaccaggcgcucgugagcgacgucggcgacagcgccgagguggccgugaagauguucgacgccuacgucaacaccuucuccagcaccuucaacaucccgauggagaagcugaagacccugguggccacggcggaggccgagcucgccaagaacgugucccuggacaacguccugagcaccuucaucuccgccgcgcgccagggguucguggacagcgacguggagaccaaggacgucguggagugccucaagcugucccaccagagcgacaucgaggugaccggcgacuccugcaacaacuacaugcugacguacaacaaggucgagaacaugaccccccgggaccucggggccugcaucgacugcagcgcccgccacaucaacgcccagguggccaagucccacaacaucgcgcugaucuggaacgugaaggacuucaugagccuguccgagcagcuccggaagcagauccgcagcgccgccaagaagaacaaccugcccuucaagcugaccugcgccaccacgcgccaggucgugaacguggucaccaccaagaucgcccucaagggcgggugaggacuaguuauaagacugacuagcccgaugggccucccaacgggcccuccuccccuccuugcaccgagauuaauaaaaaaaaaaaaaaaaaaaaaaaaaaaaaaaaaaaaaaaaaaaaaaaaaaaaaaaaaaaaaaaaugcaucccccccccccccccccccccccccccccccaaaggcucuuuucagagccaccagaauu

SEQ ID NO: 21520 - RNA, 6058 nt, Artificial Sequence
  SARS-CoV-2__MT831162.1__non-structural protein 3 (NSP3) mRNA gc
aggagaaagcuuaccauggcccccaccaaggugaccuucggcgacgacacggucaucgaggugcagggguacaagagcgugaacaucaccuucgagcuggacgagcgcaucgacaagguccucaacgagaagugcuccgccuacaccguggagcugggcaccgaggugaacgaguucgcgugcgucguggccgacgccgugaucaagacgcugcagccggucagcgagcuccugaccccccuggggaucgaccucgacgagugguccauggccaccuacuaccuguucgacgagagcggcgaguucaagcuggccucccacauguacugcagcuucuacccccccgacgaggacgaggaggagggggacugcgaggaggaggaguucgagccguccacccaguacgaguacggcacggaggacgacuaccagggcaagccccucgaguucggggcgaccagcgccgcccugcagcccgaggaggagcaggaggaggacuggcuggacgacgacucccagcagaccgugggccagcaggacgggagcgaggacaaccagaccacgaccauccagaccaucguggagguccagccccagcucgagauggagcugaccccgguggugcagacgaucgaggucaacuccuucagcggcuaccugaagcucaccgacaacguguacaucaagaacgccgacaucguggaggaggcgaagaaggucaagcccaccgugguggucaacgccgccaacguguaccugaagcacgggggcggcguggccggggcccugaacaaggcgaccaacaacgccaugcaggucgaguccgacgacuacaucgccacgaacggcccccucaagguggggggcagcugcguccuguccggccacaaccuggccaagcacugccuccacgugguggggcccaacgucaacaagggcgaggacauccagcugcugaagagcgccuacgagaacuucaaccagcacgaggugcuccuggcgccgcugcucuccgccgggaucuucggcgccgaccccauccacagccugcgggugugcgucgacaccgugcgcaccaacguguaccuggccgucuucgacaagaaccucuacgacaagcugguguccagcuuccuggagaugaagagcgagaagcagguggagcagaagaucgccgagauccccaaggaggaggucaagcccuucaucaccgaguccaagccgagcguggagcagcggaagcaggacgacaagaagaucaaggcgugcguggaggaggucacgaccacccucgaggagaccaaguuccugacggagaaccugcuccuguacaucgacaucaacgggaaccugcaccccgacuccgccacccucgugagcgacaucgacaucaccuuccugaagaaggacgcccccuacaucgugggcgacgucgugcaggagggcgugcugaccgccgucgugauccccacgaagaaggccgggggcaccaccgagaugcucgcgaaggcccugcgcaaggugccgaccgacaacuacaucacgaccuaccccgggcagggccugaacggguacaccgucgaggaggccaagaccgugcucaagaagugcaaguccgccuucuacauccugcccagcaucaucuccaacgagaagcaggagauccugggcaccgugagcuggaaccuccgggagaugcuggcgcacgccgaggagacgcgcaagcugaugcccgucugcguggagaccaaggccaucguguccaccauccagcggaaguacaagggcaucaagauccaggagggggucguggacuacggcgcccgcuucuacuucuacaccagcaagacgaccguggccucccugaucaacacccucaacgaccugaacgagacccuggucacgaugccgcucggguacgugacccacggccugaaccuggaggaggcggcccgguacaugcgcagccucaaggugcccgccaccgucuccgugagcucccccgacgccgugaccgccuacaacggguaccugacgagcuccagcaagacccccgaggagcacuucaucgagaccaucucccuggcgggcagcuacaaggacuggagcuacuccggccagagcacccagcucgggaucgaguuccugaagcggggcgacaaguccgucuacuacacgagcaacccgaccaccuuccaccuggacggggaggugaucaccuucgacaaccucaagacgcugcugucccuccgcgaggugcggaccaucaaggucuucaccaccguggacaacaucaaccugcacacgcagguggucgacaugagcaugaccuacggccagcaguucggccccaccuaccuggacggggccgacgugaccaagaucaagccccacaacucccacgagggcaagacguucuacgugcucccgaacgacgacacccugcgcgucgaggccuucgaguacuaccacaccaccgaccccagcuuccuggggcgguacauguccgcccucaaccacacgaagaaguggaaguacccccaggugaacggccugaccagcaucaagugggccgacaacaacugcuaccuggcgaccgcccuccugacccugcagcagaucgagcucaaguucaaccccccggcccugcaggacgccuacuaccgcgcgcgggccggggaggccgccaacuucugcgcccugauccucgcguacugcaacaagacggugggcgagcugggcgacguccgcgagaccauguccuaccuguuccagcacgccaaccucgacagcugcaagcgggugcugaacgucgugugcaagaccugcgggcagcagcagaccacccugaagggcguggaggccgucauguacauggggacgcucuccuacgagcaguucaagaagggcgugcagauccccugcaccugcgggaagcaggccaccaaguaccuggugcagcaggagagccccuucgucaugauguccgcccccccggcgcaguacgagcugaagcacggcaccuucacgugcgccagcgaguacaccggcaacuaccagugcgggcacuacaagcacaucaccuccaaggagacccucuacugcaucgacggcgcccugcugacgaagagcagcgaguacaaggggcccaucaccgacguguucuacaaggagaacuccuacaccaccacgaucaagcccgugaccuacaagcucgacggcgucgugugcaccgagaucgaccccaagcuggacaacuacuacaagaaggacaacagcuacuucaccgagcagccgaucgaccuggugcccaaccagcccuaccccaacgccuccuucgacaacuucaaguucgucugcgacaacaucaaguucgccgacgaccucaaccagcugacgggguacaagaagccggcgagccgcgagcugaaggugaccuucuuccccgaccucaacggcgacguggucgccaucgacuacaagcacuacacccccuccuucaagaagggcgccaagcugcugcacaagcccaucguguggcacgugaacaacgccaccaacaaggcgacguacaagccgaacaccuggugcauccggugccucuggagcaccaagcccgucgagaccuccaacagcuucgacgugcugaaguccgaggacgcccaggggauggacaaccuggccugcgaggaccucaagcccgugagcgaggaggucguggagaaccccacgauccagaaggacgugcuggagugcaacgucaagaccaccgagguggugggcgacaucauccugaagccggccaacaacucccucaagaucaccgaggaggucgggcacacggaccugauggccgcguacguggacaacagcucccugaccaucaagaagcccaacgagcucagccgcgugcugggccugaagacccucgccacccacgggcuggccgccgucaacuccgugcccugggacacgaucgccaacuacgcgaagccguuccugaacaagguggucagcaccaccaccaacaucgugacgcgcugccucaaccgggugugcaccaacuacaugcccuacuucuucacccugcugcuccagcugugcaccuucacccgcuccacgaacagccggaucaaggccuccaugcccaccaccaucgccaagaacaccgucaagagcgugggcaaguucugccuggaggccagcuucaacuaccucaagucccccaacuucagcaagcugaucaacaucaucaucugguuccugcuccuguccgugugccugggcagccucaucuacuccacggccgcgcuggggguccugaugagcaaccucggcaugccguccuacugcaccggguaccgcgagggcuaccugaacagcaccaacgugaccaucgccacguacugcaccggcuccauccccugcagcgugugccuguccgggcucgacagccuggacaccuaccccucccuggagaccauccagaucacgaucagcuccuucaagugggaccucaccgccuucggccuggucgccgagugguuccuggccuacauccucuucacccgguucuucuacgugcuggggcuggcggccaucaugcagcucuucuucagcuacuucgccgugcacuucaucuccaacagcuggcugauguggcugaucaucaaccugguccagauggcccccaucuccgcgauggugcgcauguacaucuucuucgccagcuucuacuacguguggaagagcuacguccacgugguggacggcugcaacuccagcaccugcaugaugugcuacaagcggaaccgcgccacgcgggucgagugcaccaccaucgugaacgggguccgccgguccuucuacguguacgccaacggcggcaagggguucugcaagcuccacaacuggaacugcgugaacugcgacaccuucugcgccggcagcacguucaucuccgacgaggucgcgcgcgaccugagccugcaguucaagcggccgaucaaccccaccgaccaguccagcuacaucguggacuccgugaccgucaagaacgggagcauccaccucuacuucgacaaggccggccagaagaccuacgagcgccacucccugagccacuucgugaaccuggacaaccuccgggccaacaacaucaaggggucccugcccaucaacgugaucgucuucgacggcaagagcaagugcgaggaguccagcgccaaguccgccagcguguacuacucccagcugaugugccagcccauccuccugcuggaccaggcgcucgugagcgacgucggcgacagcgccgagguggccgugaagauguucgacgccuacgucaacacguucuccagcaccuucaacgugccgauggagaagcugaagacccugguggccaccgcggaggccgagcucgccaagaacgucucccuggacaacgugcugagcacguucaucuccgccgcgcgccagggguucguggacagcgacgucgagaccaaggacgugguggagugccucaagcugucccaccagagcgacaucgaggucaccggcgacuccugcaacaacuacaugcugaccuacaacaagguggagaacaugacgccccgggaccucggggccugcaucgacugcagcgcccgccacaucaacgcccagguggccaagucccacaacaucgcgcugaucuggaacgucaaggacuucaugagccuguccgagcagcuccggaagcagauccgcagcgccgccaagaagaacaaccugcccuucaagcugaccugcgccaccacccgccagguggugaacgucgugacgaccaagaucgcccucaagggcgggugaggacuaguuauaagacugacuagcccgaugggccucccaacgggcccuccuccccuccuugcaccgagauuaauaaaaaaaaaaaaaaaaaaaaaaaaaaaaaaaaaaaaaaaaaaaaaaaaaaaaaaaaaaaaaaaaugcaucccccccccccccccccccccccccccccccaaaggcucuuuucagagccaccagaauu

SEQ ID NO: 21521 - RNA, 6058 nt, Artificial Sequence
  SARS-CoV-2__MT831168.1__non-structural protein 3 (NSP3) mRNA gc
aggagaaagcuuaccauggcccccaccaaggugaccuucggcgacgacacggucaucgaggugcagggguacaagagcgugaacaucaccuucgagcuggacgagcgcaucgacaagguccucaacgagaagugcuccgccuacaccguggagcugggcaccgaggugaacgaguucgcgugcgucguggccgacgccgugaucaagacgcugcagccggucagcgagcuccugaccccccuggggaucgaccucgacgagugguccauggccaccuacuaccuguucgacgagagcggcgaguucaagcuggccucccacauguacugcagcuucuacccccccgacgaggacgaggaggagggggacugcgaggaggaggaguucgagccguccacccaguacgaguacggcacggaggacgacuaccagggcaagccccucgaguucggggcgaccagcgccgcccugcagcccgaggaggagcaggaggaggacuggcuggacgacgacucccagcagaccgugggccagcaggacgggagcgaggacaaccagaccacgaccauccagaccaucguggagguccagccccagcucgagauggagcugaccccgguggugcagacgaucgaggucaacuccuucagcggcuaccugaagcucaccgacaacguguacaucaagaacgccgacaucguggaggaggcgaagaaggucaagcccaccgugguggucaacgccgccaacguguaccugaagcacgggggcggcguggccggggcccugaacaaggcgaccaacaacgccaugcaggucgaguccgacgacuacaucgccacgaacggcccccucaagguggggggcagcugcguccuguccggccacaaccuggccaagcacugccuccacgugguggggcccaacgucaacaagggcgaggacauccagcugcugaagagcgccuacgagaacuucaaccagcacgaggugcuccuggcgccgcugcucuccgccgggaucuucggcgccgaccccauccacagccugcgggugugcgucgacaucgugcgcaccaacguguaccuggccgucuucgacaagaaccucuacgacaagcugguguccagcuuccuggagaugaagagcgagaagcagguggagcagaagaucgccgagauccccaaggaggaggucaagcccuucaucaccgaguccaagccgagcguggagcagcggaagcaggacgacaagaagaucaaggcgugcguggaggaggucaccacgacccucgaggagaccaaguuccugaccgagaaccugcuccuguacaucgacaucaacgggaaccugcaccccgacuccgccacgcucgugagcgacaucgacaucaccuuccugaagaaggacgcccccuacaucgugggcgacgucgugcaggagggcgugcugaccgccgucgugauccccaccaagaaggccgggggcacgaccgagaugcucgcgaaggcccugcgcaaggugccgaccgacaacuacaucaccacguaccccgggcagggccugaacggguacaccgucgaggaggccaagaccgugcucaagaagugcaaguccgccuucuacauccugcccagcaucaucuccaacgagaagcaggagauccugggcaccgugagcuggaaccuccgggagaugcuggcgcacgccgaggagacccgcaagcugaugcccgucugcguggagacgaaggccaucguguccaccauccagcggaaguacaagggcaucaagauccaggagggggucguggacuacggcgcccgcuucuacuucuacaccagcaagaccacgguggccucccugaucaacacccucaacgaccugaacgagacccuggucaccaugccgcucggguacgugacgcacggccugaaccuggaggaggcggcccgguacaugcgcagccucaaggugcccgccaccgucuccgugagcucccccgacgccgugaccgccuacaacggguaccugaccagcuccagcaagacgcccgaggagcacuucaucgagaccaucucccuggcgggcagcuacaaggacuggagcuacuccggccagagcacccagcucgggaucgaguuccugaagcggggcgacaaguccgucuacuacaccagcaacccgacgaccuuccaccuggacggggaggugaucaccuucgacaaccucaagacccugcugucccuccgcgaggugcggacgaucaaggucuucaccaccguggacaacaucaaccugcacacccagguggucgacaugagcaugacguacggccagcaguucggccccaccuaccuggacggggccgacgugaccaagaucaagccccacaacucccacgagggcaagaccuucuacgugcucccgaacgacgacacgcugcgcgucgaggccuucgaguacuaccacaccaccgaccccagcuuccuggggcgguacauguccgcccucaaccacaccaagaaguggaaguacccccaggugaacggccugacgagcaucaagugggccgacaacaacugcuaccuggcgaccgcccuccugacccugcagcagaucgagcucaaguucaaccccccggcccugcaggacgccuacuaccgcgcgcgggccggggaggccgccaacuucugcgcccugauccucgcguacugcaacaagaccgugggcgagcugggcgacguccgcgagacgauguccuaccuguuccagcacgccaaccucgacagcugcaagcgggugcugaacgucgugugcaagaccugcgggcagcagcagaccacccugaagggcguggaggccgucauguacauggggacccucuccuacgagcaguucaagaagggcgugcagauccccugcacgugcgggaagcaggccaccaaguaccuggugcagcaggagagccccuucgucaugauguccgcccccccggcgcaguacgagcugaagcacggcaccuucaccugcgccagcgaguacacgggcaacuaccagugcgggcacuacaagcacaucaccuccaaggagacccucuacugcaucgacggcgcccugcugaccaagagcagcgaguacaaggggcccaucacggacguguucuacaaggagaacuccuacaccaccaccaucaagcccgugacguacaagcucgacggcgucgugugcaccgagaucgaccccaagcuggacaacuacuacaagaaggacaacagcuacuucaccgagcagccgaucgaccuggugcccaaccagcccuaccccaacgccuccuucgacaacuucaaguucgucugcgacaacaucaaguucgccgacgaccucaaccagcugaccggguacaagaagccggcgagccgcgagcugaaggugacguucuuccccgaccucaacggcgacguggucgccaucgacuacaagcacuacacccccuccuucaagaagggcgccaagcugcugcacaagcccaucguguggcacgugaacaacgccaccaacaaggcgaccuacaagccgaacacguggugcauccggugccucuggagcaccaagcccgucgagaccuccaacagcuucgacgugcugaaguccgaggacgcccaggggauggacaaccuggccugcgaggaccucaagcccgugagcgaggaggucguggagaaccccaccauccagaaggacgugcuggagugcaacgucaagacgaccgagguggugggcgacaucauccugaagccggccaacaacucccucaagaucaccgaggaggucgggcacaccgaccugauggccgcguacguggacaacagcucccugacgaucaagaagcccaacgagcucagccgcgugcugggccugaagacccucgccacccacgggcuggccgccgucaacuccgugcccugggacaccaucgccaacuacgcgaagccguuccugaacaagguggucagcacgaccaccaacaucgugacccgcugccucaaccgggugugcacgaacuacaugcccuacuucuucacccugcugcuccagcugugcaccuucacccgcuccaccaacagccggaucaaggccuccaugcccacgaccaucgccaagaacaccgucaagagcgugggcaaguucugccuggaggccagcuucaacuaccucaagucccccaacuucagcaagcugaucaacaucaucaucugguuccugcuccuguccgugugccugggcagccucaucuacuccaccgccgcgcuggggguccugaugagcaaccucggcaugccguccuacugcacgggguaccgcgagggcuaccugaacagcaccaacgugaccaucgccaccuacugcacgggcuccauccccugcagcgugugccuguccgggcucgacagccuggacaccuaccccucccuggagaccauccagaucaccaucagcuccuucaagugggaccucacggccuucggccuggucgccgagugguuccuggccuacauccucuucacccgguucuucuacgugcuggggcuggcggccaucaugcagcucuucuucagcuacuucgccgugcacuucaucuccaacagcuggcugauguggcugaucaucaaccugguccagauggcccccaucuccgcgauggugcgcauguacaucuucuucgccagcuucuacuacguguggaagagcuacguccacgugguggacggcugcaacuccagcaccugcaugaugugcuacaagcggaaccgcgccacccgggucgagugcacgaccaucgugaacgggguccgccgguccuucuacguguacgccaacggcggcaagggguucugcaagcuccacaacuggaacugcgugaacugcgacaccuucugcgccggcagcaccuucaucuccgacgaggucgcgcgcgaccugagccugcaguucaagcggccgaucaaccccacggaccaguccagcuacaucguggacuccgugaccgucaagaacgggagcauccaccucuacuucgacaaggccggccagaagaccuacgagcgccacucccugagccacuucgugaaccuggacaaccuccgggccaacaacaccaaggggucccugcccaucaacgugaucgucuucgacggcaagagcaagugcgaggaguccagcgccaaguccgccagcguguacuacucccagcugaugugccagcccauccuccugcuggaccaggcgcucgugagcgacgucggcgacagcgccgagguggccgugaagauguucgacgccuacgucaacacguucuccagcaccuucaacgugccgauggagaagcugaagacccugguggccaccgcggaggccgagcucgccaagaacgucucccuggacaacgugcugagcacguucaucuccgccgcgcgccagggguucguggacagcgacgucgagaccaaggacgugguggagugccucaagcugucccaccagagcgacaucgaggucaccggcgacuccugcaacaacuacaugcugaccuacaacaagguggagaacaugacgccccgggaccucggggccugcaucgacugcagcgcccgccacaucaacgcccagguggccaagucccacaacaucgcgcugaucuggaacgucaaggacuucaugagccuguccgagcagcuccggaagcagauccgcagcgccgccaagaagaacaaccugcccuucaagcugaccugcgccaccacccgccagguggugaacgucgugacgaccaagaucgcccucaagggcgggugaggacuaguuauaagacugacuagcccgaugggccucccaacgggcccuccuccccuccuugcaccgagauuaauaaaaaaaaaaaaaaaaaaaaaaaaaaaaaaaaaaaaaaaaaaaaaaaaaaaaaaaaaaaaaaaaugcaucccccccccccccccccccccccccccccccaaaggcucuuuucagagccaccagaauu

SEQ ID NO: 21522 - RNA, 6058 nt, Artificial Sequence
  SARS-CoV-2__MT831173.1__non-structural protein 3 (NSP3) mRNA gc
aggagaaagcuuaccauggcccccaccaaggugaccuucggcgacgacacggucaucgaggugcagggguacaagagcgugaacaucaccuucgagcuggacgagcgcaucgacaagguccucaacgagaagugcuccgccuacaccguggagcugggcaccgaggugaacgaguucgcgugcgucguggccgacgccgugaucaagacgcugcagccggucagcgagcuccugaccccccuggggaucgaccucgacgagugguccauggccaccuacuaccuguucgacgagagcggcgaguucaagcuggccucccacauguacugcagcuucuacccccccgacgaggacgaggaggagggggacugcgaggaggaggaguucgagccguccacccaguacgaguacggcacggaggacgacuaccagggcaagccccucgaguucggggcgaccagcgccgcccugcagcccgaggaggagcaggaggaggacuggcuggacgacgacucccagcagaccgugggccagcaggacgggagcgaggacaaccagaccacgaccauccagaccaucguggagguccagccccagcucgagauggagcugaccccgguggugcagacgaucgaggucaacuccuucagcggcuaccugaagcucaccgacaacguguacaucaagaacgccgacaucguggaggaggcgaagaaggucaagcccaccgugguggucaacgccgccaacguguaccugaagcacgggggcggcguggccggggcccugaacaaggcgaccaacaacgccaugcaggucgaguccgacgacuacaucgccacgaacggcccccucaagguggggggcagcugcguccuguccggccacaaccuggccaagcacugccuccacgugguggggcccaacgucaacaagggcgaggacauccagcugcugaagagcgccuacgagaacuucaaccagcacgaggugcuccuggcgccgcugcucuccgccgggaucuucggcgccgaccccauccacagccugcgggugugcgucgacaccgugcgcaccaacguguaccuggccgucuucgacaagaaccucuacgacaagcugguguccagcuuccuggagaugaagagcgagaagcagguggagcagaagaucgccgagauccccaaggaggaggucaagcccuucaucaccgaguccaagccgagcguggagcagcggaagcaggacgacaagaagaucaaggcgugcguggaggaggucacgaccacccucgaggagaccaaguuccugacggagaaccugcuccuguacaucgacaucaacgggaaccugcaccccgacuccgccacccucgugagcgacaucgacaucaccuuccugaagaaggacgcccccuacaucgugggcgacgucgugcaggagggcgugcugaccgccgucgugauccccacgaagaaggccgggggcaccaccgagaugcucgcgaaggcccugcgcaaggugccgaccgacaacuacaucacgaccuaccccgggcagggccugaacggguacaccgucgaggaggccaagaccgugcucaagaagugcaaguccgccuucuacauccugcccagcaucaucuccaacgagaagcaggagauccugggcaccgugagcuggaaccuccgggagaugcuggcgcacgccgaggagacgcgcaagcugaugcccgucugcguggagaccaaggccaucguguccaccauccagcggaaguacaagggcaucaagauccaggagggggucguggacuacggcgcccgcuucuacuucuacaccagcaagacgaccguggccucccugaucaacacccucaacgaccugaacgagacccuggucacgaugccgcucggguacgugacccacggccugaaccuggaggaggcggcccgguacaugcgcagccucaaggugcccgccaccgucuccgugagcucccccgacgccgugaccgccuacaacggguaccugacgagcuccagcaagacccccgaggagcacuucaucgagaccaucucccuggcgggcagcuacaaggacuggagcuacuccggccagagcacccagcucgggaucgaguuccugaagcggggcgacaaguccgucuacuacacgagcaacccgaccaccuuccaccuggacggggaggugaucaccuucgacaaccucaagacgcugcugucccuccgcgaggugcggaccaucaaggucuucaccaccguggacaacaucaaccugcacacgcagguggucgacaugagcaugaccuacggccagcaguucggccccaccuaccuggacggggccgacgugaccaagaucaagccccacaacucccacgagggcaagacguucuacgugcucccgaacgacgacacccugcgcgucgaggccuucgaguacuaccacaccaccgaccccagcuuccuggggcgguacauguccgcccucaaccacacgaagaaguggaaguacccccaggugaacggccugaccagcaucaagugggccgacaacaacugcuaccuggcgaccgcccuccugacccugcagcagaucgagcucaaguucaaccccccggcccugcaggacgccuacuaccgcgcgcgggccggggaggccgccaacuucugcgcccugauccucgcguacugcaacaagacggugggcgagcugggcgacguccgcgagaccauguccuaccuguuccagcacgccaaccucgacagcugcaagcgggugcugaacgucgugugcaagaccugcgggcagcagcagaccacccugaagggcguggaggccgucauguacauggggacgcucuccuacgagcaguucaagaagggcgugcagauccccugcaccugcgggaagcaggccaccaaguaccuggugcagcaggagagccccuucgucaugauguccgcccccccggcgcaguacgagcugaagcacggcaccuucacgugcgccagcgaguacaccggcaacuaccagugcgggcacuacaagcacaucaccuccaaggagacccucuacugcaucgacggcgcccugcugacgaagagcagcgaguacaaggggcccaucaccgacguguucuacaaggagaacuccuacaccaccacgaucaagcccgugaccuacaagcucgacggcgucgugugcaccgagaucgaccccaagcuggacaacuacuacaagaaggacaacagcuacuucaccgagcagccgaucgaccuggugcccaaccagcccuaccccaacgccuccuucgacaacuucaaguucgucugcgacaacaucaaguucgccgacgaccucaaccagcugacgggguacaagaagccggcgagccgcgagcugaaggugaccuucuuccccgaccucaacggcgacguggucgccaucgacuacaagcacuacacccccuccuucaagaagggcgccaagcugcugcacaagcccaucguguggcacgugaacaacgccaccaacaaggcgacguacaagccgaacaccuggugcauccggugccucuggagcaccaagcccgucgagaccuccaacagcuucgacgugcugaaguccgaggacgcccaggggauggacaaccuggccugcgaggaccucaagcccgugagcgaggaggucguggagaaccccacgauccagaaggacgugcuggagugcaacgucaagaccaccgagguggugggcgacaucauccugaagccggccaacaacucccucaagaucaccgaggaggucgggcacacggaccugauggccgcguacguggacaacagcucccugaccaucaagaagcccaacgagcucagccgcgugcugggccugaagacccucgccacccacgggcuggccgccgucaacuccgugcccugggacacgaucgccaacuacgcgaagccguuccugaacaagguggucagcaccaccaccaacaucgugacgcgcugccucaaccgggugugcaccaacuacaugcccuacuucuucacccugcugcuccagcugugcaccuucacccgcuccacgaacagccggaucaaggccuccaugcccaccaccaucgccaagaacaccgucaagagcgugggcaaguucugccuggaggccagcuucaacuaccucaagucccccaacuucagcaagcugaucaacaucaucaucugguuccugcuccuguccgugugccugggcagccucaucuacuccacggccgcgcuggggguccugaugagcaaccucggcaugccguccuacugcaccggguaccgcgagggcuaccugaacagcaccaacgugaccaucgccacguacugcaccggcuccauccccugcagcgugugccuguccgggcucgacagccuggacaccuaccccucccuggagaccauccagaucacgaucagcuccuucaagugggaccucaccgccuucggccuggucgccgagugguuccuggccuacauccucuucacccgguucuucuacgugcuggggcuggcggccaucaugcagcucuucuucagcuacuucgccgugcacuucaucuccaacagcuggcugauguggcugaucaucaaccugguccagauggcccccaucuccgcgauggugcgcauguacaucuucuucgccagcuucuacuacguguggaagagcuacguccacgugguggacggcugcaacuccagcaccugcaugaugugcuacaagcggaaccgcgccacgcgggucgagugcaccaccaucgugaacgggguccgccgguccuucuacguguacgccaacggcggcaagggguucugcaagcuccacaacuggaacugcgugaacugcgacaccuucugcgccggcagcacguucaucuccgacgaggucgcgcgcgaccugagccugcaguucaagcggccgaucaaccccaccgaccaguccagcuacaucguggacuccgugaccgucaagaacgggagcauccaccucuacuucgacaaggccggccagaagaccuacgagcgccacucccugagccacuucgugaaccuggacaaccuccgggccaacaacacgaaggggucccugcccaucaacgugaucgucuucgacggcaagagcaagugcgaggaguccagcgccaaguccgccagcguguacuacucccagcugaugugccagcccauccuccugcuggaccaggcgcucgugagcgacgucggcgacagcgccgagguggccgugaagauguucgacgccuacgucaacaccuucuccagcaccuucaacgugccgauggagaagcugaagacccugguggccacggcggaggccgagcucgccaagaacgucucccuggacaacgugcugagcaccuucaucuccgccgcgcgccagggguucguggacagcgacgucgagaccaaggacgugguggagugccucaagcugucccaccagagcgacaucgaggucaccggcgacuccugcaacaacuacaugcugacguacaacaagguggagaacaugaccccccgggaccucggggugugcaucgacugcagcgcccgccacaucaacgcccaggucgccaagucccacaacaucgcccugaucuggaacgugaaggacuucaugagccuguccgagcagcuccggaagcagauccgcagcgcggccaagaagaacaaccugcccuucaagcugaccugcgccaccacgcgccagguggucaacguggugaccaccaagaucgcccucaagggcgggugaggacuaguuauaagacugacuagcccgaugggccucccaacgggcccuccuccccuccuugcaccgagauuaauaaaaaaaaaaaaaaaaaaaaaaaaaaaaaaaaaaaaaaaaaaaaaaaaaaaaaaaaaaaaaaaaugcaucccccccccccccccccccccccccccccccaaaggcucuuuucagagccaccagaauu

SEQ ID NO: 21523 - RNA, 6058 nt, Artificial Sequence
  SARS-CoV-2__MT831177.1__non-structural protein 3 (NSP3) mRNA gc
aggagaaagcuuaccauggcccccaccaaggugaccuucggcgacgacacggucaucgaggugcagggguacaagagcgugaacaucaccuucgagcuggacgagcgcaucgacaagguccucaacgagaagugcuccgccuacaccguggagcugggcaccgaggugaacgaguucgcgugcgucguggccgacgccgugaucaagacgcugcagccggucagcgagcuccugaccccccuggggaucgaccucgacgagugguccauggccaccuacuaccuguucgacgagagcggcgaguucaagcuggccucccacauguacugcagcuucuacccccccgacgaggacgaggaggagggggacugcgaggaggaggaguucgagccguccacccaguacgaguacggcacggaggacgacuaccagggcaagccccucgaguucggggcgaccagcgccgcccugcagcccgaggaggagcaggaggaggacuggcuggacgacgacucccagcagaccgugggccagcaggacgggagcgaggacaaccagaccacgaccauccagaccaucguggagguccagccccagcucgagauggagcugaccccgguggugcagacgaucgaggucaacuccuucagcggcuaccugaagcucaccgacaacguguacaucaagaacgccgacaucguggaggaggcgaagaaggucaagcccaccgugguggucaacgccgccaacguguaccugaagcacgggggcggcguggccggggcccugaacaaggcgaccaacaacgccaugcaggucgaguccgacgacuacaucgugacgaacggcccccucaaggucgggggcagcugcgugcuguccggccacaaccuggccaagcacugccuccacguggucgggcccaacgugaacaagggcgaggacauccagcugcugaagagcgccuacgagaacuucaaccagcacgaggugcuccuggccccgcugcucuccgcggggaucuucggcgccgaccccauccacagccugcgggucugcguggacaccgugcgcaccaacgucuaccuggccguguucgacaagaaccucuacgacaagcugguguccagcuuccuggagaugaagagcgagaagcaggucgagcagaagaucgccgagauccccaaggaggaggugaagcccuucaucaccgaguccaagccgagcguggagcagcggaagcaggacgacaagaagaucaaggccugcgucgaggaggugacgaccacccucgaggagaccaaguuccugacggagaaccugcuccuguacaucgacaucaacgggaaccugcaccccgacuccgcgacccucgugagcgacaucgacaucaccuuccugaagaaggacgcccccuacaucgucggcgacguggugcaggagggcguccugaccgccguggugauccccacgaagaaggccgggggcaccaccgagaugcucgccaaggcgcugcgcaaggucccgaccgacaacuacaucacgaccuaccccgggcagggccugaacggguacaccguggaggaggccaagaccgugcucaagaagugcaaguccgccuucuacauccugcccagcaucaucuccaacgagaagcaggagauccugggcaccgucagcuggaaccuccgggagaugcuggcccacgcggaggagacgcgcaagcugaugcccgugugcguggagaccaaggccaucgucuccaccauccagcggaaguacaagggcaucaagauccaggagggggugguggacuacggcgcccgcuucuacuucuacaccagcaagacgaccgucgccucccugaucaacacccucaacgaccugaacgagacccuggugacgaugccgcucggguacgugacccacggccugaaccuggaggaggccgcgcgguacaugcgcagccucaagguccccgccaccguguccgugagcucccccgacgccgucaccgccuacaacggguaccugacgagcuccagcaagacccccgaggagcacuucaucgagaccaucucccuggccggcagcuacaaggacuggagcuacuccggccagagcacccagcucgggaucgaguuccugaagcggggcgacaaguccguguacuacacgagcaacccgaccaccuuccaccuggacggggaggugaucaccuucgacaaccucaagacgcugcugucccuccgcgagguccggaccaucaagguguucaccaccguggacaacaucaaccugcacacgcaggucguggacaugagcaugaccuacggccagcaguucggccccaccuaccuggacggggcggacgugaccaagaucaagccccacaacucccacgagggcaagacguucuacguccucccgaacgacgacacccugcgcguggaggccuucgaguacuaccacaccaccgaccccagcuuccuggggcgguacauguccgcccucaaccacacgaagaaguggaaguacccccaggugaacggccugaccagcaucaagugggccgacaacaacugcuaccuggccaccgcgcuccugacccugcagcagaucgagcucaaguucaaccccccggcccugcaggacgccuacuaccgcgcccgggcgggggaggccgccaacuucugcgcccugauccucgccuacugcaacaagacggucggcgagcugggcgacgugcgcgagaccauguccuaccuguuccagcacgcgaaccucgacagcugcaagcggguccugaacguggugugcaagaccugcgggcagcugcagaccacccucaagggcgucgaggccgugauguacauggggacgcuguccuacgagcaguucaagaagggcgugcagauccccugcaccugcgggaagcaggccaccaaguaccugguccagcaggagagccccuucgugaugauguccgcccccccggcccaguacgagcucaagcacggcaccuucacgugcgcgagcgaguacaccggcaacuaccagugcgggcacuacaagcacaucaccuccaaggagacccuguacugcaucgacggcgcccugcucacgaagagcagcgaguacaaggggcccaucaccgacguguucuacaaggagaacuccuacaccaccacgaucaagcccgucaccuacaagcuggacggcguggugugcaccgagaucgaccccaagcuggacaacuacuacaagaaggacaacagcuacuucaccgagcagccgaucgaccucguccccaaccagcccuaccccaacgccuccuucgacaacuucaaguucgugugcgacaacaucaaguucgccgacgaccugaaccagcugacgggguacaagaagccggccagccgcgagcucaaggugaccuucuuccccgaccugaacggcgacgucguggcgaucgacuacaagcacuacacccccuccuucaagaagggcgccaagcugcuccacaagcccaucguguggcacgucaacaacgccaccaacaaggccacguacaagccgaacaccuggugcauccggugccuguggagcaccaagcccguggagaccuccaacagcuucgacgugcugaaguccgaggacgcgcaggggauggacaaccucgccugcgaggaccugaagcccgucagcgaggaggugguggagaaccccacgauccagaaggacguccuggagugcaacgugaagaccaccgagguggucggcgacaucauccucaagccggccaacaacucccugaagaucaccgaggagguggggcacacggaccugauggccgccuacguggacaacagcucccucaccaucaagaagcccaacgagcugagccgcguccugggccucaagacccuggcgacccacgggcuggccgccgugaacuccgugcccugggacacgaucgccaacuacgccaagccguuccucaacaaggucgugagcaccaccaccaacaucgugacgcgcugccugaaccgggucugcaccaacuacaugcccuacuucuucacccugcuccugcagcugugcaccuucacccgcuccacgaacagccggaucaaggcguccaugcccaccaccaucgccaagaacaccgugaagagcgugggcaaguucugccucgaggccagcuucaacuaccugaagucccccaacuucagcaagcugaucaacaucaucaucugguuccuccugcuguccgucugccucggcagccugaucuacuccacggccgcccugggggugcucaugagcaaccugggcaugccguccuacugcaccggguaccgcgagggcuaccugaacagcaccaacgugaccaucgcgacguacugcaccggcuccauccccugcagcgucugccucuccgggcuggacagccuggacaccuaccccucccucgagaccauccagaucacgaucagcuccuucaagugggaccugaccgccuucggccugguggccgagugguuccucgccuacauccuguucacccgguucuucuacgugcuggggcucgccgcgaucaugcagcuguucuucagcuacuucgccguccacuucaucuccaacagcuggcugauguggcugaucaucaaccucgugcagauggcccccaucuccgccauggugcgcauguacaucuucuucgcgagcuucuacuacgucuggaagagcuacgugcacguggucgacggcugcaacuccagcaccugcaugaugugcuacaagcggaaccgcgccacgcggguggagugcaccaccaucgucaacggggugcgccgguccuucuacguguacgccaacggcggcaagggguucugcaagcugcacaacuggaacugcgucaacugcgacaccuucugcgccggcagcacguucaucuccgacgagguggcccgcgaccugagccuccaguucaagcggccgaucaaccccaccgaccaguccagcuacaucguggacuccgucaccgugaagaacgggagcauccaccuguacuucgacaaggcgggccagaagaccuacgagcgccacucccugagccacuucgugaaccucgacaaccugcgggccaacaacacgaaggggucccugcccaucaacgucaucguguucgacggcaagagcaagugcgaggaguccagcgccaaguccgccagcguguacuacucccagcucaugugccagcccauccugcugcucgaccaggcccuggucagcgacgugggcgacagcgcggagguggccgucaagauguucgacgccuacgugaacaccuucuccagcaccuucaacgugccgauggagaagcugaagacccucgucgccacggccgaggcggagcuggccaagaacgugucccuggacaacgugcucagcaccuucaucuccgccgcccgccagggguucgucgacagcgacguggagaccaaggacguggucgagugccugaagcugucccaccagagcgacaucgaggugaccggcgacuccugcaacaacuacaugcucacguacaacaagguggagaacaugaccccccgggaccugggggcgugcaucgacugcagcgcccgccacaucaacgcccaggucgccaagucccacaacaucgcccugaucuggaacgugaaggacuucaugagccucuccgagcagcugcggaagcagauccgcagcgcggccaagaagaacaaccugcccuucaagcucaccugcgccaccacgcgccagguggucaacguggugaccaccaagaucgcccugaagggcgggugaggacuaguuauaagacugacuagcccgaugggccucccaacgggcccuccuccccuccuugcaccgagauuaauaaaaaaaaaaaaaaaaaaaaaaaaaaaaaaaaaaaaaaaaaaaaaaaaaaaaaaaaaaaaaaaaugcaucccccccccccccccccccccccccccccccaaaggcucuuuucagagccaccagaauu

SEQ ID NO: 21524 - RNA, 6058 nt, Artificial Sequence
  SARS-CoV-2__MT831190.1__non-structural protein 3 (NSP3) mRNA gc
aggagaaagcuuaccauggcccccaccaaggugaccuucggcgacgacacggucaucgaggugcagggguacaagagcgugaacaucaccuucgagcuggacgagcgcaucgacaagguccucaacgagaagugcuccgccuacaccguggagcugggcaccgaggugaacgaguucgcgugcgucguggccgacgccgugaucaagacgcugcagccggucagcgagcuccugaccccccuggggaucgaccucgacgagugguccauggccaccuacuaccuguucgacgagagcggcgaguucaagcuggccucccacauguacugcagcuucuacccccccgacgaggacgaggaggagggggacugcgaggaggaggaguucgagccguccacccaguacgaguacggcacggaggacgacuaccagggcaagccccucgaguucggggcgaccagcgccgcccugcagcccgaggaggagcaggaggaggacuggcuggacgacgacucccagcagaccgugggccagcaggacgggagcgaggacaaccagaccacgaccauccagaccaucguggagguccagccccagcucgagauggagcugaccccgguggugcagacgaucgaggucaacuccuucagcggcuaccugaagcucaccgacaacguguacaucaagaacgccgacaucguggaggaggcgaagaaggucaagcccaccgugguggucaacgccgccaacguguaccugaagcacgggggcggcguggccggggcccugaacaaggcgaccaacaacgccaugcaggucgaguccgacgacuacaucgccacgaacggcccccucaagguggggggcagcugcguccuguccggccacaaccuggccaagcacugccuccacgugguggggcccaacgucaacaagggcgaggacauccagcugcugaagagcgccuacgagaacuucaaccagcacgaggugcuccuggcgccgcugcucuccgccgggaucuucggcgccgaccccauccacagccugcgggugugcgucgacaccgugcgcaccaacguguaccuggccgucuucgacaagaaccucuacgacaagcugguguccagcuuccuggagaugaagagcgagaagcagguggagcagaagaucgccgagauccccaaggaggaggucaagcccuucaucaccgaguccaagccgagcguggagcagcggaagcaggacgacaagaagaucaaggcgugcguggaggaggucacgaccacccucgaggagaccaaguuccugacggagaaccugcuccuguacaucgacaucaacgggaaccugcaccccgacuccgccacccucgugagcgacaucgacaucaccuuccugaagaaggacgcccccuacaucgugggcgacgucgugcaggagggcgugcugaccgccgucgugauccccacgaagaaggccgggggcaccaccgagaugcucgcgaaggcccugcgcaaggugccgaccgacaacuacaucacgaccuaccccgggcagggccugaacggguacaccgucgaggaggccaagaccgugcucaagaagugcaaguccgccuucuacauccugcccagcaucaucuccaacgagaagcaggagauccugggcaccgugagcuggaaccuccgggagaugcuggcgcacgccgaggagacgcgcaagcugaugcccgucugcguggagaccaaggccaucguguccaccauccagcggaaguacaagggcaucaagauccaggagggggucguggacuacggcgcccgcuucuacuucuacaccagcaagacgaccguggccucccugaucaacacccucaacgaccugaacgagacccuggucacgaugccgcucggguacgugacccacggccugaaccuggaggaggcggcccgguacaugcgcagccucaaggugcccgccaccgucuccgugagcucccccgacgccgugaccgccuacaacggguaccugacgagcuccagcaagacccccgaggagcacuucaucgagaccaucucccuggcgggcagcuacaaggacuggagcuacuccggccagagcacccagcucgggaucgaguuccugaagcggggcgacaaguccgucuacuacacgagcaacccgaccaccuuccaccuggacggggaggugaucaccuucgacaaccucaagacgcugcugucccuccgcgaggugcggaccaucaaggucuucaccaccguggacaacaucaaccugcacacgcagguggucgacaugagcaugaccuacggccagcaguucggccccaccuaccuggacggggccgacgugaccaagaucaagccccacaacucccacgagggcaagacguucuacgugcucccgaacgacgacacccugcgcgucgaggccuucgaguacuaccacaccaccgaccccagcuuccuggggcgguacauguccgcccucaaccacacgaagaaguggaaguacccccaggugaacggccugaccagcaucaagugggccgacaacaacugcuaccuggcgaccgcccuccugacccugcagcagaucgagcucaaguucaaccccccggcccugcaggacgccuacuaccgcgcgcgggccggggaggccgccaacuucugcgcccugauccucgcguacugcaacaagacggugggcgagcugggcgacguccgcgagaccauguccuaccuguuccagcacgccaaccucgacagcugcaagcgggugcugaacgucgugugcaagaccugcgggcagcagcagaccacccugaagggcguggaggccgucauguacauggggacgcucuccuacgagcaguucaagaagggcgugcagauccccugcaccugcgggaagcaggccaccaaguaccuggugcagcaggagagccccuucgucaugauguccgcccccccggcgcaguacgagcugaagcacggcaccuucacgugcgccagcgaguacaccggcaacuaccagugcgggcacuacaagcacaucaccuccaaggagacccucuacugcaucgacggcgcccugcugacgaagagcagcgaguacaaggggcccaucaccgacguguucuacaaggagaacuccuacaccaccacgaucaagcccgugaccuacaagcucgacggcgucgugugcaccgagaucgaccccaagcuggacaacuacuacaagaaggacaacagcuacuucaccgagcagccgaucgaccuggugcccaaccagcccuaccccaacgccuccuucgacaacuucaaguucgucugcgacaacaucaaguucgccgacgaccucaaccagcugacgggguacaagaagccggcgagccgcgagcugaaggugaccuucuuccccgaccucaacggcgacguggucgccaucgacuacaagcacuacacccccuccuucaagaagggcgccaagcugcugcacaagcccaucguguggcacgugaacaacgccaccaacaaggcgacguacaagccgaacaccuggugcauccggugccucuggagcaccaagcccgucgagacccccaacuccuucgacgugcugaagagcgaggacgcccaggggauggacaaccuggccugcgaggaccucaagcccguguccgaggaggucguggagaacccgacgauccagaaggacgugcuggagugcaacgucaagaccaccgagguggugggcgacaucauccugaagcccgccaacaacagccucaagaucaccgaggaggucgggcacacggaccugauggccgcguacguggacaacuccagccugaccaucaagaagcccaacgagcucucccgcgugcugggccugaagacccucgccacccacgggcuggccgccgucaacagcgugccgugggacacgaucgccaacuacgcgaagcccuuccugaacaagguggucuccaccaccaccaacaucgugacgcgcugccucaaccgggugugcaccaacuacaugcccuacuucuucacccugcugcuccagcugugcaccuucacccgcagcacgaacucccggaucaaggccagcaugcccaccaccaucgccaagaacaccgucaaguccgugggcaaguucugccuggaggccagcuucaacuaccucaagagcccgaacuucuccaagcugaucaacaucaucaucugguuccugcuccugagcgugugccugggcucccucaucuacagcacggccgcgcuggggguccugauguccaaccucggcaugcccagcuacugcaccggguaccgcgagggcuaccugaacuccaccaacgugaccaucgccacguacugcaccggcagcauccccugcuccgugugccugagcgggcucgacucccuggacaccuaccccagccuggagaccauccagaucacgaucuccagcuucaagugggaccucaccgccuucggccuggucgccgagugguuccuggccuacauccucuucacccgguucuucuacgugcuggggcuggcggccaucaugcagcucuucuucuccuacuucgccgugcacuucaucagcaacuccuggcugauguggcugaucaucaaccugguccagauggccccgaucagcgcgauggugcgcauguacaucuucuucgccuccuucuacuacguguggaagagcuacguccacgugguggacggcugcaacagcuccaccugcaugaugugcuacaagcggaaccgcgccacgcgggucgagugcaccaccaucgugaacgggguccgccggagcuucuacguguacgccaacggcggcaagggguucugcaagcuccacaacuggaacugcgugaacugcgacaccuucugcgccggcuccacguucaucagcgacgaggucgcgcgcgaccugucccugcaguucaagcggcccaucaaccccaccgaccagagcuccuacaucguggacagcgugaccgucaagaacggguccauccaccucuacuucgacaaggccggccagaagaccuacgagcgccacagccugucccacuucgugaaccuggacaaccuccgggccaacaacacgaaggggagccugcccaucaacgugaucgucuucgacggcaaguccaagugcgaggagagcuccgccaagagcgccuccguguacuacagccagcugaugugccagccgauccuccugcuggaccaggcgcucguguccgacgucggcgacagcgccgagguggccgugaagauguucgacgccuacgucaacaccuucagcuccaccuucaacgugcccauggagaagcugaagacccugguggccacggcggaggccgagcucgccaagaacgucagccuggacaacgugcuguccaccuucaucagcgccgcgcgccagggguucguggacuccgacgucgagaccaaggacgugguggagugccucaagcugagccaccaguccgacaucgaggucaccggcgacagcugcaacaacuacaugcugacguacaacaagguggagaacaugaccccccgggaccucggggccugcaucgacugcuccgcccgccacaucaacgcccagguggccaagagccacaacaucgcgcugaucuggaacgucaaggacuucaugucccugagcgagcagcuccggaagcagauccgcuccgccgccaagaagaacaaccugcccuucaagcugaccugcgccaccacgcgccagguggugaacgucgugaccaccaagaucgcccucaagggcgggugaggacuaguuauaagacugacuagcccgaugggccucccaacgggcccuccuccccuccuugcaccgagauuaauaaaaaaaaaaaaaaaaaaaaaaaaaaaaaaaaaaaaaaaaaaaaaaaaaaaaaaaaaaaaaaaaugcaucccccccccccccccccccccccccccccccaaaggcucuuuucagagccaccagaauu

SEQ ID NO: 21525 - RNA, 6058 nt, Artificial Sequence
  SARS-CoV-2__MT831198.1__non-structural protein 3 (NSP3) mRNA gc
aggagaaagcuuaccauggcccccaccaaggugaccuucggcgacgacacggucaucgaggugcagggguacaagagcgugaacaucaccuucgagcuggacgagcgcaucgacaagguccucaacgagaagugcuccgccuacaccguggagcugggcaccgaggugaacgaguucgcgugcgucguggccgacgccgugaucaagacgcugcagccggucagcgagcuccugaccccccuggggaucgaccucgacgagugguccauggccaccuacuaccuguucgacgagagcggcgaguucaagcuggccucccacauguacugcagcuucuacccccccgacgaggacgaggaggagggggacugcgaggaggaggaguucgagccguccacccaguacgaguacggcacggaggacgacuaccagggcaagccccucgaguucggggcgaccagcgccgcccugcagcccgaggaggagcaggaggaggacuggcuggacgacgacucccagcagaccguggugcagcaggacggcagcgaggacaaccagaccacgaccauccagaccaucgucgaggugcagccccagcucgagauggagcugaccccggugguccagacgaucgaggugaacuccuucagcggguaccugaagcucaccgacaacguguacaucaagaacgccgacaucgucgaggaggcgaagaaggugaagcccaccguggucgugaacgccgccaacguguaccugaagcacggcgggggcgucgccggcgcccugaacaaggcgaccaacaacgccaugcagguggaguccgacgacuacaucgccacgaacgggccccucaaggucggcgggagcugcgugcuguccggccacaaccuggccaagcacugccuccacguggucggccccaacgugaacaagggggaggacauccagcugcugaagagcgccuacgagaacuucaaccagcacgaggugcuccuggcgccgcugcucuccgccggcaucuucggggccgaccccauccacagccugcgggucugcguggacaccgugcgcaccaacgucuaccuggccguguucgacaagaaccucuacgacaagcugguguccagcuuccuggagaugaagagcgagaagcaggucgagcagaagaucgccgagauccccaaggaggaggugaagcccuucaucaccgaguccaagccgagcguggagcagcggaagcaggacgacaagaagaucaaggcgugcgucgaggaggugacgaccacccucgaggagaccaaguuccugacggagaaccugcuccuguacaucgacaucaacggcaaccugcaccccgacuccgccacccucgugagcgacaucgacaucaccuuccugaagaaggacgcccccuacaucgucggggacguggugcaggagggcguccugaccgccguggugauccccacgaagaaggccggcgggaccaccgagaugcucgcgaaggcccugcgcaaggucccgaccgacaacuacaucacgaccuaccccggccaggggcugaacggcuacaccguggaggaggccaagaccgugcucaagaagugcaaguccgccuucuacauccugcccagcaucaucuccaacgagaagcaggagauccuggggaccgucagcuggaaccuccgggagaugcuggcgcacgccgaggagacgcgcaagcugaugcccgugugcguggagaccaaggccaucgucuccaccauccagcggaaguacaagggcaucaagauccaggagggcgugguggacuacggggcccgcuucuacuucuacaccagcaagacgaccgucgccucccugaucaacacccucaacgaccugaacgagacccuggugacgaugccgcucggcuacgugacccacgggcugaaccuggaggaggcggcccgguacaugcgcagccucaagguccccgccaccguguccgugagcucccccgacgccgucaccgccuacaacggcuaccugacgagcuccagcaagacccccgaggagcacuucaucgagaccaucucccuggcggggagcuacaaggacuggagcuacuccggccagagcacccagcucggcaucgaguuccugaagcggggggacaaguccguguacuacacgagcaacccgaccaccuuccaccuggacggcgaggugaucaccuucgacaaccucaagacgcugcugucccuccgcgagguccggaccaucaagguguucaccaccguggacaacaucaaccugcacacgcaggucguggacaugagcaugaccuacgggcagcaguucggccccaccuaccuggacggcgccgacgugaccaagaucaagccccacaacucccacgaggggaagacguucuacguccucccgaacgacgacacccugcgcguggaggccuucgaguacuaccacaccaccgaccccagcuuccugggccgguacauguccgcccucaaccacacgaagaaguggaaguacccccaggugaacgggcugaccagcaucaagugggccgacaacaacugcuaccuggcgaccgcccuccugacccugcagcagaucgagcucaaguucaaccccccggcccugcaggacgccuacuaccgcgcgcgggccggcgaggccgccaacuucugcgcccugauccucgcguacugcaacaagacggucggggagcugggcgacgugcgcgagaccauguccuaccuguuccagcacgccaaccucgacagcugcaagcggguccugaacguggugugcaagaccugcggccagcagcagaccacccugaagggggucgaggccgugauguacaugggcacgcucuccuacgagcaguucaagaagggggugcagauccccugcaccugcggcaagcaggccaccaaguaccugguccagcaggagagccccuucgugaugauguccgcccccccggcgcaguacgagcugaagcacgggaccuucacgugcgccagcgaguacaccggcaacuaccagugcggccacuacaagcacaucaccuccaaggagacccucuacugcaucgacggggcccugcugacgaagagcagcgaguacaagggccccaucaccgacguguucuacaaggagaacuccuacaccaccacgaucaagcccgucaccuacaagcucgacgggguggugugcaccgagaucgaccccaagcuggacaacuacuacaagaaggacaacagcuacuucaccgagcagccgaucgaccugguccccaaccagcccuaccccaacgccuccuucgacaacuucaaguucgugugcgacaacaucaaguucgccgacgaccucaaccagcugacgggcuacaagaagccggcgagccgcgagcugaaggugaccuucuuccccgaccucaacggggacgucguggccaucgacuacaagcacuacacccccuccuucaagaagggcgccaagcugcugcacaagcccaucguguggcacgucaacaacgccaccaacaaggcgacguacaagccgaacaccuggugcauccggugccucuggagcaccaagcccguggagaccuccaacagcuucgacgugcugaaguccgaggacgcccagggcauggacaaccuggccugcgaggaccucaagcccgucagcgaggaggugguggagaaccccacgauccagaaggacguccuggagugcaacgugaagaccaccgagguggucggggacaucauccugaagccggccaacaacucccucaagaucaccgaggaggugggccacacggaccugauggccgcguacguggacaacagcucccugaccaucaagaagcccaacgagcucagccgcguccuggggcugaagacccucgccacccacggccuggccgccgugaacuccgugcccugggacacgaucgccaacuacgcgaagccguuccugaacaaggucgugagcaccaccaccaacaucgugacgcgcugccucaaccgggucugcaccaacuacaugcccuacuucuucacccugcugcuccagcugugcaccuucacccgcuccacgaacagccggaucaaggccuccaugcccaccaccaucgccaagaacaccgugaagagcguggggaaguucugccuggaggccagcuucaacuaccucaagucccccaacuucagcaagcugaucaacaucaucaucugguuccugcuccuguccgucugccugggcagccucaucuacuccacggccgcgcugggcgugcugaugagcaaccucgggaugccguccuacugcaccggcuaccgcgagggguaccugaacagcaccaacgugaccaucgccacguacugcaccggcuccauccccugcagcgucugccuguccggccucgacagccuggacaccuaccccucccuggagaccauccagaucacgaucagcuccuucaagugggaccucaccgccuucgggcugguggccgagugguuccuggccuacauccucuucacccgguucuucuacgugcugggccuggcggccaucaugcagcucuucuucagcuacuucgccguccacuucaucuccaacagcuggcugauguggcugaucaucaaccuggugcagauggcccccaucuccgcgauggugcgcauguacaucuucuucgccagcuucuacuacgucuggaagagcuacgugcacguggucgacgggugcaacuccagcaccugcaugaugugcuacaagcggaaccgcgccacgcggguggagugcaccaccaucgucaacggcgugcgccgguccuucuacguguacgccaacgggggcaagggcuucugcaagcuccacaacuggaacugcgucaacugcgacaccuucugcgccgggagcacguucaucuccgacgagguggcgcgcgaccugagccugcaguucaagcggccgaucaaccccaccgaccaguccagcuacaucguggacuccgucaccgugaagaacggcagcauccaccucuacuucgacaaggccgggcagaagaccuacgagcgccacucccugagccacuucgugaaccuggacaaccuccgggccaacaacacgaagggcucccugcccaucaacgucaucguguucgacgggaagagcaagugcgaggaguccagcgccaaguccgccagcguguacuacucccagcugaugugccagcccauccuccugcuggaccaggcgcucgucagcgacgugggcgacagcgccgagguggccgucaagauguucgacgccuacgugaacaccuucuccagcaccuucaacaucccgauggagaagcugaagacccugguggccacggcggaggccgagcucgccaagaacgucucccuggacaacgugcugagcaccuucaucuccgccgcgcgccagggcuucguggacagcgacgucgagaccaaggacgugguggagugccucaagcugucccaccagagcgacaucgaggucaccggggacuccugcaacaacuacaugcugacguacaacaagguggagaacaugaccccccgggaccucggcgccugcaucgacugcagcgcccgccacaucaacgcccagguggccaagucccacaacaucgcgcugaucuggaacgucaaggacuucaugagccuguccgagcagcuccggaagcagauccgcagcgccgccaagaagaacaaccugcccuucaagcugaccugcgccaccacgcgccagguggugaacgucgugaccaccaagaucgcccucaaggggggcugaggacuaguuauaagacugacuagcccgaugggccucccaacgggcccuccuccccuccuugcaccgagauuaauaaaaaaaaaaaaaaaaaaaaaaaaaaaaaaaaaaaaaaaaaaaaaaaaaaaaaaaaaaaaaaaaugcaucccccccccccccccccccccccccccccccaaaggcucuuuucagagccaccagaauu

SEQ ID NO: 21526 - RNA, 6058 nt, Artificial Sequence
  SARS-CoV-2__MT831202.1__non-structural protein 3 (NSP3) mRNA gc
aggagaaagcuuaccauggcccccaccaaggugaccuucggcgacgacacggucaucgaggugcagggguacaagagcgugaacaucaccuucgagcuggacgagcgcaucgacaagguccucaacgagaagugcuccgccuacaccguggagcugggcaccgaggugaacgaguucgcgugcgucguggccgacgccgugaucaagacgcugcagccggucagcgagcuccugaccccccuggggaucgaccucgacgagugguccauggccaccuacuaccuguucgacgagagcggcgaguucaagcuggccucccacauguacugcagcuucuacccccccgacgaggacgaggaggagggggacugcgaggaggaggaguucgagccguccacccaguacgaguacggcacggaggacgacuaccagggcaagccccucgaguucggggcgaccagcgccgcccugcagcccgaggaggagcaggaggaggacuggcuggacgacgacucccagcagaccgugggccagcaggacgggagcgaggacaaccagaccacgaccauccagaccaucguggagguccagccccagcucgagauggagcugaccccgguggugcagacgaucgaggucaacuccuucagcggcuaccugaagcucaccgacaacguguacaucaagaacgccgacaucguggaggaggcgaagaaggucaagcccaccgugguggucaacgccgccaacguguaccugaagcacgggggcggcguggccggggcccugaacaaggcgaccaacaacgccaugcaggucgaguccgacgacuacaucgccacgaacggcccccucaagguggggggcagcugcguccuguccggccacaaccuggccaagcacugccuccacgugguggggcccaacgucaacaagggcgaggacauccagcugcugaagagcgccuacgagaacuucaaccagcacgaggugcuccuggcgccgcugcucuccgccgggaucuucggcgccgaccccauccacagccugcgggugugcgucgacaccgugcgcaccaacguguaccuggccgucuucgacaagaaccucuacgacaagcugguguccagcuuccuggagaugaagagcgagaagcagguggagcagaagaucgccgagauccccaaggaggaggucaagcccuucaucaccgaguccaagccgagcguggagcagcggaagcaggacgacaagaagaucaaggcgugcguggaggaggucacgaccacccucgaggagaccaaguuccugacggagaaccugcuccuguacaucgacaucaacgggaaccugcaccccgacuccgccacccucgugagcgacaucgacaucaccuuccugaagaaggacgcccccuacaucgugggcgacgucgugcaggagggcgugcugaccgccgucgugauccccacgaagaaggccgggggcaccaccgagaugcucgcgaaggcccugcgcaaggugccgaccgacaacuacaucacgaccuaccccgggcagggccugaacggguacaccgucgaggaggccaagaccgugcucaagaagugcaaguccgccuucuacauccugcccagcaucaucuccaacgagaagcaggagauccugggcaccgugagcuggaaccuccgggagaugcuggcgcacgccgaggagacgcgcaagcugaugcccgucugcguggagaccaaggccaucguguccaccauccagcggaaguacaagggcaucaagauccaggagggggucguggacuacggcgcccgcuucuacuucuacaccagcaagacgaccguggccucccugaucaacacccucaacgaccugaacgagacccuggucacgaugccgcucggguacgugacccacggccugaaccuggaggaggcggcccgguacaugcgcagccucaaggugcccgccaccgucuccgugagcucccccgacgccgugaccgccuacaacggguaccugacgagcuccagcaagacccccgaggagcacuucaucgagaccaucucccuggcgggcagcuacaaggacuggagcuacuccggccagagcacccagcucgggaucgaguuccugaagcggggcgacaaguccgucuacuacacgagcaacccgaccaccuuccaccuggacggggaggugaucaccuucgacaaccucaagacgcugcugucccuccgcgaggugcggaccaucaaggucuucaccaccguggacaacaucaaccugcacacgcagguggucgacaugagcaugaccuacggccagcaguucggccccaccuaccuggacggggccgacgugaccaagaucaagccccacaacucccacgagggcaagacguucuacgugcucccgaacgacgacacccugcgcgucgaggccuucgaguacuaccacaccaccgaccccagcuuccuggggcgguacauguccgcccucaaccacacgaagaaguggaaguacccccaggugaacggccugaccagcaucaagugggccgacaacaacugcuaccuggcgaccgcccuccugacccugcagcagaucgagcucaaguucaaccccccggcccugcaggacgccuacuaccgcgcgcgggccggggaggccgccaacuucugcgcccugauccucgcguacugcaacaagacggugggcgagcugggcgacguccgcgagaccauguccuaccuguuccagcacgccaaccucgacagcugcaagcgggugcugaacgucgugugcaagaccugcgggcagcagcagaccacccugaagggcguggaggccgucauguacauggggacgcucuccuacgagcaguucaagaagggcgugcagauccccugcaccugcgggaagcaggccaccaaguaccuggugcagcaggagagccccuucgucaugauguccgcccccccggcgcaguacgagcugaagcacggcaccuucacgugcgccagcgaguacaccggcaacuaccagugcgggcacuacaagcacaucaccuccaaggagacccucuacugcaucgacggcgcccugcugacgaagagcagcgaguacaaggggcccaucaccgacguguucuacaaggagaacuccuacaccaccacgaucaagcccgugaccuacaagcucgacggcgucgugugcaccgagaucgaccccaagcuggacaacuacuacaagaaggacaacagcuacuucaccgagcagccgaucgaccuggugcccaaccagcccuaccccaacgccuccuucgacaacuucaaguucgucugcgacaacaucaaguucgccgacgaccucaaccagcugacgggguacaagaagccggcgagccgcgagcugaaggugaccuucuuccccgaccucaacggcgacguggucgccaucgacuacaagcacuacacccccuccuucaagaagggcgccaagcugcugcacaagcccaucguguggcacgugaacaacgccaccaacaaggcgacguacaagccgaacaccuggugcauccggugccucuggagcaccaagcccgucgagaccuccaacagcuucgacgugcugaaguccgaggacgcccaggggauggacaaccuggccugcgaggaccucaagcccgugagcgaggaggucguggagaaccccacgauccagaaggacgugcuggagugcaacgucaagaccaccgagguggugggcgacaucauccugaagccggccaacaacucccucaagaucaccgaggaggucgggcacacggaccugauggccgcguacguggacaacuucagccugaccaucaagaagcccaacgagcucucccgcgugcugggccugaagacccucgccacccacgggcuggccgccgucaacagcgugcccugggacacgaucgccaacuacgcgaagccguuccugaacaagguggucuccaccaccaccaacaucgugacgcgcugccucaaccgggugugcaccaacuacaugcccuacuucuucacccugcugcuccagcugugcaccuucacccgcagcacgaacucccggaucaaggccagcaugcccaccaccaucgccaagaacaccgucaaguccgugggcaaguucugccuggaggccagcuucaacuaccucaagagccccaacuucuccaagcugaucaacaucaucaucugguuccugcuccugagcgugugccugggcucccucaucuacagcacggccgcgcuggggguccugauguccaaccucggcaugccgagcuacugcaccggguaccgcgagggcuaccugaacuccaccaacgugaccaucgccacguacugcaccggcagcauccccugcuccgugugccugagcgggcucgacucccuggacaccuaccccagccuggagaccauccagaucacgaucuccagcuucaagugggaccucaccgccuucggccuggucgccgagugguuccuggccuacauccucuucacccgguucuucuacgugcuggggcuggcggccaucaugcagcucuucuucuccuacuucgccgugcacuucaucagcaacuccuggcugauguggcugaucaucaaccugguccagauggcccccaucagcgcgauggugcgcauguacaucuucuucgccuccuucuacuacguguggaagagcuacguccacgugguggacggcugcaacagcuccaccugcaugaugugcuacaagcggaaccgcgccacgcgggucgagugcaccaccaucgugaacgggguccgccggagcuucuacguguacgccaacggcggcaagggguucugcaagcuccacaacuggaacugcgugaacugcgacaccuucugcgccggcuccacguucaucagcgacgaggucgcgcgcgaccugucccugcaguucaagcggccgaucaaccccaccgaccagagcuccuacaucguggacagcgugaccgucaagaacggguccauccaccucuacuucgacaaggccggccagaagaccuacgagcgccacagccugucccacuucgugaaccuggacaaccuccgggccaacaacacgaaggggagccugcccaucaacgugaucgucuucgacggcaaguccaagugcgaggagagcuccgccaagagcgccuccguguacuacagccagcugaugugccagcccauccuccugcuggaccaggcgcucguguccgacgucggcgacagcgccgagguggccgugaagauguucgacgccuacgucaacaccuucagcuccaccuucaacgugccgauggagaagcugaagacccugguggccacggcggaggccgagcucgccaagaacgucagccuggacaacgugcuguccaccuucaucagcgccgcgcgccagggguucguggacuccgacgucgagaccaaggacgugguggagugccucaagcugagccaccaguccgacaucgaggucaccggcgacagcugcaacaacuacaugcugacguacaacaagguggagaacaugaccccccgggaccucggggccugcaucgacugcuccgcccgccacaucaacgcccagguggccaagagccacaacaucgcgcugaucuggaacgucaaggacuucaugucccugagcgagcagcuccggaagcagauccgcuccgccgccaagaagaacaaccugcccuucaagcugaccugcgccaccacgcgccagguggugaacgucgugaccaccaagaucgcccucaagggcgggugaggacuaguuauaagacugacuagcccgaugggccucccaacgggcccuccuccccuccuugcaccgagauuaauaaaaaaaaaaaaaaaaaaaaaaaaaaaaaaaaaaaaaaaaaaaaaaaaaaaaaaaaaaaaaaaaugcaucccccccccccccccccccccccccccccccaaaggcucuuuucagagccaccagaauu

SEQ ID NO: 21527 - RNA, 6058 nt, Artificial Sequence
  SARS-CoV-2__MT831205.1__non-structural protein 3 (NSP3) mRNA gc
aggagaaagcuuaccauggcccccaccaaggugaccuucggcgacgacacggucaucgaggugcagggguacaagagcgugaacaucaccuucgagcuggacgagcgcaucgacaagguccucaacgagaagugcuccgccuacaccguggagcugggcaccgaggugaacgaguucgcgugcgucguggccgacgccgugaucaagacgcugcagccggucagcgagcuccugaccccccuggggaucgaccucgacgagugguccauggccaccuacuaccuguucgacgagagcggcgaguucaagcuggccucccacauguacugcagcuucuacccccccgacgaggacgaggaggagggggacugcgaggaggaggaguucgagccguccacccaguacgaguacggcacggaggacgacuaccagggcaagccccucgaguucggggcgaccagcgccgcccugcagcccgaggaggagcaggaggaggacuggcuggacgacgacucccagcagaccgugggccagcaggacgggagcgaggacaaccagaccacgaccauccagaccaucguggagguccagccccagcucgagauggagcugaccccgguggugcagacgaucgaggucaacuccuucagcggcuaccugaagcucaccgacaacguguacaucaagaacgccgacaucguggaggaggcgaagaaggucaagcccaccgugguggucaacgccgccaacguguaccugaagcacgggggcggcguggccggggcccugaacaaggcgaccaacaacgccaugcaggucgaguccgacgacuacaucgccacgaacggcccccucaagguggggggcagcugcguccuguccggccacaaccuggccaagcacugccuccacgugguggggcccaacgucaacaagggcgaggacauccagcugcugaagagcgccuacgagaacuucaaccagcacgaggugcuccuggcgccgcugcucuccgccgggaucuucggcgccgaccccauccacagccugcgggugugcgucgacaccgugcgcaccaacguguaccuggccgucuucgacaagaaccucuacgacaagcugguguccagcuuccuggagaugaagagcgagaagcagguggagcagaagaucgccgagauccccaaggaggaggucaagcccuucaucaccgaguccaagccgagcguggagcagcggaagcaggacgacaagaagaucaaggcgugcguggaggaggucacgaccacccucgaggagaccaaguuccugacggagaaccugcuccuguacaucgacaucaacgggaaccugcaccccgacuccgccacccucgugagcgacaucgacaucaccuuccugaagaaggacgcccccuacaucgugggcgacgucgugcaggagggcgugcugaccgccgucgugauccccacgaagaaggccgggggcaccaccgagaugcucgcgaaggcccugcgcaaggugccgaccgacaacuacaucacgaccuaccccgggcagggccugaacggguacaccgucgaggaggccaagaccgugcucaagaagugcaaguccgccuucuacauccugcccagcaucaucuccaacgagaagcaggagauccugggcaccgugagcuggaaccuccgggagaugcuggcgcacgccgaggagacgcgcaagcugaugcccgucugcguggagaccaaggccaucguguccaccauccagcggaaguacaagggcaucaagauccaggagggggucguggacuacggcgcccgcuucuacuucuacaccagcaagacgaccguggccucccugaucaacacccucaacgaccugaacgagacccuggucacgaugccgcucggguacgugacccacggccugaaccuggaggaggcggcccgguacaugcgcagccucaaggugcccgccaccgucuccgugagcucccccgacgccgugaccgccuacaacggguaccugacgagcuccagcaagacccccgaggagcacuucaucgagaccaucucccuggcgggcagcuacaaggacuggagcuacuccggccagagcacccagcucgggaucgaguuccugaagcggggcgacaaguccgucuacuacacgagcaacccgaccaccuuccaccuggacggggaggugaucaccuucgacaaccucaagacgcugcugucccuccgcgaggugcggaccaucaaggucuucaccaccguggacaacaucaaccugcacacgcagguggucgacaugagcaugaccuacggccagcaguucggccccaccuaccuggacggggccgacgugaccaagaucaagccccacaacucccacgagggcaagacguucuacgugcucccgaacgacgacacccugcgcgucgaggccuucgaguacuaccacaccaccaaccccagcuuccuggggcgguacauguccgcccucaaccacacgaagaaguggaaguacccccaggugaacggccugaccagcaucaagugggccgacaacaacugcuaccuggcgaccgcccuccugacccugcagcagaucgagcucaaguucaaccccccggcccugcaggacgccuacuaccgcgcgcgggccggggaggccgccaacuucugcgcccugauccucgcguacugcaacaagacggugggcgagcugggcgacguccgcgagaccauguccuaccuguuccagcacgccaaccucgacagcugcaagcgggugcugaacgucgugugcaagaccugcgggcagcagcagaccacccugaagggcguggaggccgucauguacauggggacgcucuccuacgagcaguucaagaagggcgugcagauccccugcaccugcgggaagcaggccaccaaguaccuggugcagcaggagagccccuucgucaugauguccgcccccccggcgcaguacgagcugaagcacggcaccuucacgugcgccagcgaguacaccggcaacuaccagugcgggcacuacaagcacaucaccuccaaggagacccucuacugcaucgacggcgcccugcugacgaagagcagcgaguacaaggggcccaucaccgacguguucuacaaggagaacuccuacaccaccacgaucaagcccgugaccuacaagcucgacggcgucgugugcaccgagaucgaccccaagcuggacaacuacuacaagaaggacaacagcuacuucaccgagcagccgaucgaccuggugcccaaccagcccuaccccaacgccuccuucgacaacuucaaguucgucugcgacaacaucaaguucgccgacgaccucaaccagcugacgggguacaagaagccggcgagccgcgagcugaaggugaccuucuuccccgaccucaacggcgacguggucgccaucgacuacaagcacuacacccccuccuucaagaagggcgccaagcugcugcacaagcccaucguguggcacgugaacaacgccaccaacaaggcgacguacaagccgaacaccuggugcauccggugccucuggagcaccaagcccgucgagaccuccaacagcuucgacgugcugaaguccgaggacgcccaggggauggacaaccuggccugcgaggaccucaagcccgugagcgaggaggucguggagaaccccacgauccagaaggacgugcuggagugcaacgucaagaccaccgagguggugggcgacaucauccugaagccggccaacaacucccucaagaucaccgaggaggucgggcacacggaccugauggccgcguacguggacaacagcucccugaccaucaagaagcccaacgagcucagccgcgugcugggccugaagacccucgccacccacgggcuggccgccgucaacuccgugcccugggacacgaucgccaacuacgcgaagccguuccugaacaagguggucagcaccaccaccaacaucgugacgcgcugccucaaccgggugugcaccaacuacaugcccuacuucuucacccugcugcuccagcugugcaccuucacccgcuccacgaacagccggaucaaggccuccaugcccaccaccaucgccaagaacaccgucaagagcgugggcaaguucugccuggaggccagcuucaacuaccucaagucccccaacuucagcaagcugaucaacaucaucaucugguuccugcuccuguccgugugccugggcagccucaucuacuccacggccgcgcuggggguccugaugagcaaccucggcaugccguccuacugcaccggguaccgcgagggcuaccugaacagcaccaacgugaccaucgccacguacugcaccggcuccauccccugcagcgugugccuguccgggcucgacagccuggacaccuaccccucccuggagaccauccagaucacgaucagcuccuucaagugggaccucaccgccuucggccuggucgccgagugguuccuggccuacauccucuucacccgguucuucuacgugcuggggcuggcggccaucaugcagcucuucuucagcuacuucgccgugcacuucaucuccaacagcuggcugauguggcugaucaucaaccugguccagauggcccccaucuccgcgauggugcgcauguacaucuucuucgccagcuucuacuacguguggaagagcuacguccacgugguggacggcugcaacuccagcaccugcaugaugugcuacaagcggaaccgcgccacgcgggucgagugcaccaccaucgugaacgggguccgccgguccuucuacguguacgccaacggcggcaagggguucugcaagcuccacaacuggaacugcgugaacugcgacaccuucugcgccggcagcacguucaucuccgacgaggucgcgcgcgaccugagccugcaguucaagcggccgaucaaccccaccgaccaguccagcuacaucguggacuccgugaccgucaagaacgggagcauccaccucuacuucgacaaggccggccagaagaccuacgagcgccacucccugagccacuucgugaaccuggacaaccuccgggccaacaacacgaaggggucccugcccaucaacgugaucgucuucgacggcaagagcaagugcgaggaguccagcgccaaguccgccagcguguacuacucccagcugaugugccagcccauccuccugcuggaccaggcgcucgugagcgacgucggcgacagcgccgagguggccgugaagauguucgacgccuacgucaacaccuucuccagcaccuucaacgugccgauggagaagcugaagacccugguggccacggcggaggccgagcucgccaagaacgucucccuggacaacgugcugagcaccuucaucuccgccgcgcgccagggguucguggacagcgacgucgagaccaaggacgugguggagugccucaagcugucccaccagagcgacaucgaggucaccggcgacuccugcaacaacuacaugcugacguacaacaagguggagaacaugaccccccgggaccucggggccugcaucgacugcagcgcccgccacaucaacgcccagguggccaagucccacaacaucgcgcugaucuggaacgucaaggacuucaugagccuguccgagcagcuccggaagcagauccgcagcgccgccaagaagaacaaccugcccuucaagcugaccugcgccaccacgcgccagguggugaacgucgugaccaccaagaucgcccucaagggcgggugaggacuaguuauaagacugacuagcccgaugggccucccaacgggcccuccuccccuccuugcaccgagauuaauaaaaaaaaaaaaaaaaaaaaaaaaaaaaaaaaaaaaaaaaaaaaaaaaaaaaaaaaaaaaaaaaugcaucccccccccccccccccccccccccccccccaaaggcucuuuucagagccaccagaauu

SEQ ID NO: 21528 - RNA, 6058 nt, Artificial Sequence
  SARS-CoV-2__MT831223.1__non-structural protein 3 (NSP3) mRNA gc
aggagaaagcuuaccauggcccccaccaaggugaccuucggcgacgacacggucaucgaggugcagggguacaagagcgugaacaucaccuucgagcuggacgagcgcaucgacaagguccucaacgagaagugcuccgccuacaccguggagcugggcaccgaggugaacgaguucgcgugcgucguggccgacgccgugaucaagacgcugcagccggucagcgagcuccugaccccccuggggaucgaccucgacgagugguccauggccaccuacuaccuguucgacgagagcggcgaguucaagcuggccucccacauguacugcagcuucuacccccccgacgaggacgaggaggagggggacugcgaggaggaggaguucgagccguccacccaguacgaguacggcacggaggacgacuaccagggcaagccccucgaguucggggcgaccagcgccgcccugcagcccgaggaggagcaggaggaggacuggcuggacgacgacucccagcagaccgugggccagcaggacgggagcgaggacaaccagaccacgaccauccagaccaucguggagguccagccccagcucgagauggagcugaccccgguggugcagacgaucgaggucaacuccuucagcggcuaccugaagcucaccgacaacguguacaucaagaacgccgacaucguggaggaggcgaagaaggucaagcccaccgugguggucaacgccgccaacguguaccugaagcacgggggcggcguggccggggcccugaacaaggcgaccaacaacgccaugcaggucgaguccgacgacuacaucgccacgaacggcccccucaagguggggggcagcugcguccuguccggccacaaccuggccaagcacugccuccacgugguggggcccaacgucaacaagggcgaggacauccagcugcugaagagcgccuacgagaacuucaaccagcacgaggugcuccuggcgccgcugcucuccgccgggaucuucggcgccgaccccauccacagccugcgggugugcgucgacaccgugcgcaccaacguguaccuggccgucuucgacaagaaccucuacgacaagcugguguccagcuuccuggagaugaagagcgagaagcagguggagcagaagaucgccgagauccccaaggaggaggucaagcccuucaucaccgaguccaagccgagcguggagcagcggaagcaggacgacaagaagaucaaggcgugcguggaggaggucacgaccacccucgaggagaccaaguuccugacggagaaccugcuccuguacaucgacaucaacgggaaccugcaccccgacuccgccacccucgugagcgacaucgacaucaccuuccugaagaaggacgcccccuacaucgugggcgacgucgugcaggagggcgugcugaccgccgucgugauccccacgaagaaggccgggggcaccaccgagaugcucgcgaaggcccugcgcaaggugccgaccgacaacuacaucacgaccuaccccgggcagggccugaacggguacaccgucgaggaggccaagaccgugcucaagaagugcaaguccgccuucuacauccugcccagcaucaucuccaacgagaagcaggagauccugggcaccgugagcuggaaccuccgggagaugcuggcgcacgccgaggagacgcgcaagcugaugcccgucugcguggagaccaaggccaucguguccaccauccagcggaaguacaagggcaucaagauccaggagggggucguggacuacggcgcccgcuucuacuucuacaccagcaagacgaccguggccucccugaucaacacccucaacgaccugaacgagacccuggucacgaugccgcucggguacgugacccacggccugaaccuggaggaggcggcccgguacaugcgcagccucaaggugcccgccaccgucuccgugagcucccccgacgccgugaccgccuacaacggguaccugacgagcuccagcaagacccccgaggagcacuucaucgagaccaucucccuggcgggcagcuacaaggacuggagcuacuccggccagagcacccagcucgggaucgaguuccugaagcggggcgacaaguccgucuacuacacgagcaacccgaccaccuuccaccuggacggggaggugaucaccuucgacaaccucaagacgcugcugucccuccgcgaggugcggaccaucaaggucuucaccaccguggacaacaucaaccugcacacgcagguggucgacaugagcaugaccuacggccagcaguucggccccaccuaccuggacggggccgacgugaccaagaucaagccccacaacucccacgagggcaagacguucuacgugcucccgaacgacgacacccugcgcgucgaggccuucgaguacuaccacaccaccgaccccagcuuccuggggcgguacauguccgcccucaaccacacgaagaaguggaaguacccccaggugaacggccugaccagcaucaagugggccgacaacaacugcuaccuggcgaccgcccuccugacccugcagcagaucgagcucaaguucaaccccccggcccugcaggacgccuacuaccgcgcgcgggccggggaggccgccaacuucugcgcccugauccucgcguacugcaacaagacggugggcgagcugggcgacguccgcgagaccauguccuaccuguuccagcacgccaaccucgacagcugcaagcgggugcugaacgucgugugcaagaccugcgggcagcagcagaccacccugaagggcguggaggccgucauguacauggggacgcucuccuacgagcaguucaagaagggcgugcagauccccugcaccugcgggaagcaggccaccaaguaccuggugcagcaggagagccccuucgucaugauguccgcccccccggcgcaguacgagcugaagcacggcaccuucacgugcgccagcgaguacaccggcaacuaccagugcgggcacuacaagcacaucaccuccaaggagacccucuacugcaucgacggcgcccugcugacgaagagcagcgaguacaaggggcccaucaccgacguguucuacaaggagaacuccuacaccaccacgaucaagcccgugaccuacaagcucgacggcgucgugugcaccgagaucgaccccaagcuggacaacuacuacaagaaggacaacagcuacuucaccgagcagccgaucgaccuggugcccaaccagcccuaccccaacgccuccuucgacaacuucaaguucgucugcgacaacaucaaguucgccgacgaccucaaccagcugacgggguacaagaagccggcgagccgcgagcugaaggugaccuucuuccccgaccucaacggcgacguggucgccaucgacuacaagcacuacacccccuccuucaagaagggcgccaagcugcugcacaagcccaucguguggcacgugaacaacgccaccaacaaggcgacguacaagccgaacaccuggugcauccggugccucuggagcaccaagcccgucgagaccuccaacagcuucgacgugcugaaguccgaggacgcccaggggauggacaaccuggccugcgaggaccucaagcccuucagcgaggagguggucgagaaccccacgauccagaaggacgugcuggagugcaacgugaagaccaccgaggucgugggcgacaucauccugaagccggccaacaacucccucaagaucaccgaggagguggggcacacggaccugauggccgcguacgucgacaacagcucccugaccaucaagaagcccaacgagcucagccgcgugcugggccugaagacccucgccacccacgggcuggccgccgugaacuccguccccugggacacgaucgccaacuacgcgaagccguuccugaacaagguggugagcaccaccaccaacaucgucacgcgcugccucaaccgggugugcaccaacuacaugcccuacuucuucacccugcugcuccagcugugcaccuucacccgcuccacgaacagccggaucaaggccuccaugcccaccaccaucgccaagaacaccgugaagagcgucggcaaguucugccuggaggccagcuucaacuaccucaagucccccaacuucagcaagcugaucaacaucaucaucugguuccugcuccuguccgugugccugggcagccucaucuacuccacggccgcgcugggggugcugaugagcaaccucggcaugccguccuacugcaccggguaccgcgagggcuaccugaacagcaccaacgucaccaucgccacguacugcaccggcuccauccccugcagcgugugccuguccgggcucgacagccuggacaccuaccccucccuggagaccauccagaucacgaucagcuccuucaagugggaccucaccgccuucggccugguggccgagugguuccuggccuacauccucuucacccgguucuucuacguccuggggcuggcggccaucaugcagcucuucuucagcuacuucgccgugcacuucaucuccaacagcuggcugauguggcugaucaucaaccuggugcagauggcccccaucuccgcgaugguccgcauguacaucuucuucgccagcuucuacuacguguggaagagcuacgugcacgucguggacggcugcaacuccagcaccugcaugaugugcuacaagcggaaccgcgccacgcggguggagugcaccaccaucgucaacggggugcgccgguccuucuacgucuacgccaacggcggcaagggguucugcaagcuccacaacuggaacugcgugaacugcgacaccuucugcgccggcagcacguucaucuccgacgagguggcgcgcgaccugagccugcaguucaagcggccgaucaaccccaccgaccaguccagcuacaucgucgacuccgugaccgugaagaacgggagcauccaccucuacuucgacaaggccggccagaagaccuacgagcgccacucccugagccacuucgucaaccuggacaaccuccgggccaacaacacgaaggggucccugcccaucaacgugaucguguucgacggcaagagcaagugcgaggaguccagcgccaaguccgccagcgucuacuacucccagcugaugugccagcccauccuccugcuggaccaggcgcucgugagcgacgugggcgacagcgccgaggucgccgugaagauguucgacgccuacgugaacaccuucuccagcaccuucaacgucccgauggagaagcugaagacccugguggccacggcggaggccgagcucgccaagaacgugucccuggacaacguccugagcaccuucaucuccgccgcgcgccagggguucguggacagcgacguggagaccaaggacgucguggagugccucaagcugucccaccagagcgacaucgaggugaccggcgacuccugcaacaacuacaugcugacguacaacaaggucgagaacaugaccccccgggaccucggggccugcaucgacugcagcgcccgccacaucaacgcccagguggccaagucccacaacaucgcgcugaucuggaacgugaaggacuucaugagccuguccgagcagcuccggaagcagauccgcagcgccgccaagaagaacaaccugcccuucaagcugaccugcgccaccacgcgccaggucgugaacguggucaccaccaagaucgcccucaagggcgggugaggacuaguuauaagacugacuagcccgaugggccucccaacgggcccuccuccccuccuugcaccgagauuaauaaaaaaaaaaaaaaaaaaaaaaaaaaaaaaaaaaaaaaaaaaaaaaaaaaaaaaaaaaaaaaaaugcaucccccccccccccccccccccccccccccccaaaggcucuuuucagagccaccagaauu

SEQ ID NO: 21529 - RNA, 6058 nt, Artificial Sequence
  SARS-CoV-2__MT831261.1__non-structural protein 3 (NSP3) mRNA gc
aggagaaagcuuaccauggcccccaccaaggugaccuucggcgacgacacggucaucgaggugcagggguacaagagcgugaacaucaccuucgagcuggacgagcgcaucgacaagguccucaacgagaagugcuccgccuacaccguggagcugggcaccgaggugaacgaguucgcgugcgucguggccgacgccgugaucaagacgcugcagccggucagcgagcuccugaccccccuggggaucgaccucgacgagugguccauggccaccuacuaccuguucgacgagagcggcgaguucaagcuggccucccacauguacugcagcuucuacccccccgacgaggacgaggaggagggggacugcgaggaggaggaguucgagccguccacccaguacgaguacggcacggaggacgacuaccagggcaagccccucgaguucggggcgaccagcgccgcccugcagcccgaggaggagcaggaggaggacuggcuggacgacgacucccagcagaccgugggccagcaggacgggagcgaggacaaccagaccacgaccauccagaccaucguggagguccagccccagcucgagauggagcugaccccgguggugcagacgaucgaggucaacuccuucagcggcuaccugaagcucaccgacaacguguacaucaagaacgccgacaucguggaggaggcgaagaaggucaagcccaccgugguggucaacgccgccaacguguaccugaagcacgggggcggcguggccggggcccugaacaaggcgaccaacaacgccaugcaggucgaguccgacgacuacaucgccacgaacggcccccucaagguggggggcagcugcguccuguccggccacaaccuggccaagcacugccuccacgugguggggcccaacgucaacaagggcgaggacauccagcugcugaagagcgccuacgagaacuucaaccagcacgaggugcuccuggcgccgcugcucuccgccgggaucuucggcgccgaccccauccacagccugcgggugugcgucgacaccgugcgcaccaacguguaccuggccgucuucgacaagaaccucuacgacaagcugguguccagcuuccuggagaugaagagcgagaagcagguggagcagaagaucgccgagauccccaaggaggaggucaagcccuucaucaccgaguccaagccgagcguggagcagcggaagcaggacgacaagaagaucaaggcgugcguggaggaggucacgaccacccucgaggagaccaaguuccugacggagaaccugcuccuguacaucgacaucaacgggaaccugcaccccgacuccgccacccucgugagcgacaucgacaucaccuuccugaagaaggacgcccccuacaucgugggcgacgucgugcaggagggcgugcugaccgccgucgugauccccacgaagaaggccgggggcaccaccgagaugcucgcgaaggcccugcgcaaggugccgaccgacaacuacaucacgaccuaccccgggcagggccugaacggguacaccgucgaggaggccaagaccgugcucaagaagugcaaguccgccuucuacauccugcccagcaucaucuccaacgagaagcaggagauccugggcaccgugagcuggaaccuccgggagaugcuggcgcacgccgaggagacgcgcaagcugaugcccgucugcguggagaccaaggccaucguguccaccauccagcggaaguacaagggcaucaagauccaggagggggucguggacuacggcgcccgcuucuacuucuacaccagcaagacgaccguggccucccugaucaacacccucaacgaccugaacgagacccuggucacgaugccgcucggguacgugacccacggccugaaccuggaggaggcggcccgguacaugcgcagccucaaggugcccgccaccgucuccgugagcucccccgacgccgugaccgccuacaacggguaccugacgagcuccagcaagacccccgaggagcacuucaucgagaccaucucccuggcgggcagcuacaaggacuggagcuacuccggccagagcacccagcucgggaucgaguuccugaagcggggcgacaaguccgucuacuacacgagcaacccgaccaccuuccaccuggacggggaggugaucaccuucgacaaccucaagacgcugcugucccuccgcgaggugcggaccaucaaggucuucaccaccguggacaacaucaaccugcacacgcagguggucgacaugagcaugaccuacggccagcaguucggccccaccuaccuggacggggccgacgugaccaagaucaagccccacaacucccacgagggcaagacguucuacgugcucccgaacgacgacacccugcgcgucgaggccuucgaguacuaccacaccaccgaccccagcuuccuggggcgguacauguccgcccucaaccacacgaagaaguggaaguacccccaggugaacggccugaccagcaucaagugggccgacaacaacugcuaccuggcgaccgcccuccugacccugcagcagaucgagcucaaguucaaccccccggcccugcaggacgccuacuaccgcgcgcgggccggggaggccgccaacuucugcgcccugauccucgcguacugcaacaagacggugggcgagcugggcgacguccgcgagaccauguccuaccuguuccagcacgccaaccucgacagcugcaagcgggugcugaacgucgugugcaagaccugcgggcagcagcagaccacccugaagggcguggaggccgucauguacauggggacgcucuccuacgagcaguucaagaagggcgugcagauccccugcaccugcgggaagcaggccaccaaguaccuggugcagcaggagagccccuucgucaugauguccgcccccccggcgcaguacgagcugaagcacggcaccuucacgugcgccagcgaguacaccggcaacuaccagugcgggcacuacaagcacaucaccuccaaggagacccucuacugcaucgacggcgcccugcugacgaagagcagcgaguacaaggggcccaucaccgacguguucuacaaggagaacuccuacaccaccacgaucaagcccgugaccuacaagcucgacggcgucgugugcaccgagaucgaccccaagcuggacaacuacuacaagaaggacaacagcuacuucaccgagcagccgaucgaccuggugcccaaccagcccuaccccaacgucuccuucgacaacuucaaguucgugugcgacaacaucaaguucgccgacgaccucaaccagcugacgggguacaagaagccggccagccgcgagcugaaggugaccuucuuccccgaccucaacggcgacgucguggcgaucgacuacaagcacuacacccccuccuucaagaagggcgccaagcugcugcacaagcccaucguguggcacgucaacaacgccaccaacaaggccacguacaagccgaacaccuggugcauccggugccucuggagcaccaagcccguggagaccuccaacagcuucgacgugcugaaguccgaggacgcgcaggggauggacaaccuggccugcgaggaccucaagcccgucagcgaggaggugguggagaaccccacgauccagaaggacguccuggagugcaacgugaagaccaccgagguggucggcgacaucauccugaagccggccaacaacucccucaagaucaccgaggagguggggcacacggaccugauggccgccuacguggacaacagcucccugaccaucaagaagcccaacgagcucagccgcguccugggccugaagacccucgcgacccacgggcuggccgccgugaacuccgugcccugggacacgaucgccaacuacgccaagccguuccugaacaaggucgugagcaccaccaccaacaucgugacgcgcugccucaaccgggucugcaccaacuacaugcccuacuucuucacccugcugcuccagcugugcaccuucacccgcuccacgaacagccggaucaaggcguccaugcccaccaccaucgccaagaacaccgugaagagcgugggcaaguucugccuggaggccagcuucaacuaccucaagucccccaacuucagcaagcugaucaacaucaucaucugguuccugcuccuguccgucugccugggcagccucaucuacuccacggccgcccugggggugcugaugagcaaccucggcaugccguccuacugcaccggguaccgcgagggcuaccugaacagcaccaacgugaccaucgcgacguacugcaccggcuccauccccugcagcgucugccuguccgggcucgacagccuggacaccuaccccucccuggagaccauccagaucacgaucagcuccuucaagugggaccucaccgccuucggccugguggccgagugguuccuggccuacauccucuucacccgguucuucuacgugcuggggcuggccgcgaucaugcagcucuucuucagcuacuucgccguccacuucaucuccaacagcuggcugauguggcugaucaucaaccuggugcagauggcccccaucuccgccauggugcgcauguacaucuucuucgcgagcuucuacuacgucuggaagagcuacgugcacguggucgacggcugcaacuccagcaccugcaugaugugcuacaagcggaaccgcgccacgcggguggagugcaccaccaucgucaacggggugcgccgguccuucuacguguacgccaacggcggcaagggguucugcaagcuccacaacuggaacugcgucaacugcgacaccuucugcgccggcagcacguucaucuccgacgagguggcccgcgaccugagccugcaguucaagcggccgaucaaccccaccgaccaguccagcuacaucguggacuccgucaccgugaagaacgggagcauccaccucuacuucgacaaggcgggccagaagaccuacgagcgccacucccugagccacuucgugaaccuggacaaccuccgggccaacaacacgaaggggucccugcccaucaacgucaucguguucgacggcaagagcaagugcgaggaguccagcgccaaguccgccagcguguacuacucccagcugaugugccagcccauccuccugcuggaccaggcccucgucagcgacgugggcgacagcgcggagguggccgucaagauguucgacgccuacgugaacaccuucuccagcaccuucaacgugccgauggagaagcugaagacccuggucgccacggccgaggcggagcucgccaagaacgugucccuggacaacgugcugagcaccuucaucuccgccgcccgccagggguucgucgacagcgacguggagaccaaggacguggucgagugccucaagcugucccaccagagcgacaucgaggugaccggcgacuccugcaacaacuacaugcugacguacaacaagguggagaacaugaccccccgggaccucggggcgugcaucgacugcagcgcccgccacaucaacgcccaggucgccaagucccacaacaucgcccugaucuggaacgugaaggacuucaugagccuguccgagcagcuccggaagcagauccgcagcgcggccaagaagaacaaccugcccuucaagcugaccugcgccaccacgcgccagguggucaacguggugaccaccaagaucgcccucaagggcgggugaggacuaguuauaagacugacuagcccgaugggccucccaacgggcccuccuccccuccuugcaccgagauuaauaaaaaaaaaaaaaaaaaaaaaaaaaaaaaaaaaaaaaaaaaaaaaaaaaaaaaaaaaaaaaaaaugcaucccccccccccccccccccccccccccccccaaaggcucuuuucagagccaccagaauu

SEQ ID NO: 21530 - RNA, 6058 nt, Artificial Sequence
  SARS-CoV-2__MT831296.1__non-structural protein 3 (NSP3) mRNA gc
aggagaaagcuuaccauggcccccaccaaggugaccuucggcgacgacacggucaucgaggugcagggguacaagagcgugaacaucaccuucgagcuggacgagcgcaucgacaagguccucaacgagaagugcuccgccuacaccguggagcugggcaccgaggugaacgaguucgcgugcgucguggccgacgccgugaucaagacgcugcagccggucagcgagcuccugaccccccuggggaucgaccucgacgagugguccauggccaccuacuaccuguucgacgagagcggcgaguucaagcuggccucccacauguacugcagcuucuacccccccgacgaggacgaggaggagggggacugcgaggaggaggaguucgagccguccacccaguacgaguacggcacggaggacgacuaccagggcaagccccucgaguucggggcgaccagcgccgcccugcagcccgaggaggagcaggaggaggacuggcuggacgacgacucccagcagaccgugggccagcaggacgggagcgaggacaaccagaccacgaccauccagaccaucguggagguccagccccagcucgagauggagcugaccccgguggugcagacgaucgaggucaacuccuucagcggcuaccugaagcucaccgacaacguguacaucaagaacgccgacaucguggaggaggcgaagaaggucaagcccaccgugguggucaacgccgccaacguguaccugaagcacgggggcggcguggccggggcccugaacaaggcgaccaacaacgccaugcaggucgaguccgacgacuacaucgccacgaacggcccccucaagguggggggcagcugcguccuguccggccacaaccuggccaagcacugccuccacgugguggggcccaacgucaacaagggcgaggacauccagcugcugaagagcgccuacgagaacuucaaccagcacgaggugcuccuggcgccgcugcucuccgccgggaucuucggcgccgaccccauccacagccugcgggugugcgucgacaccgugcgcaccaacguguaccuggccgucuucgacaagaaccucuacgacaagcugguguccagcuuccuggagaugaagagcgagaagcagguggagcagaagaucgccgagauccccaaggaggaggucaagcccuucaucaccgaguccaagccgagcguggagcagcggaagcaggacgacaagaagaucaaggcgugcguggaggaggucacgaccacccucgaggagaccaaguuccugacggagaaccugcuccuguacaucgacaucaacgggaaccugcaccccgacuccgccacccucgugagcgacaucgacaucaccuuccugaagaaggacgcccccuacaucgugggcgacgucgugcaggagggcgugcugaccgccgucgugauccccacgaagaaggccgggggcaccaccgagaugcucgcgaaggcccugcgcaaggugccgaccgacaacuacaucacgaccuaccccgggcagggccugaacggguacaccgucgaggaggccaagaccgugcucaagaagugcaaguccgccuucuacauccugcccagcaucaucuccaacgagaagcaggagauccugggcaccgugagcuggaaccuccgggagaugcuggcgcacgccgaggagacgcgcaagcugaugcccgucugcguggagaccaaggccaucguguccaccauccagcggaaguacaagggcaucaagauccaggagggggucguggacuacggcgcccgcuucuacuucuacaccagcaagacgaccguggccucccugaucaacacccucaacgaccugaacgagacccuggucacgaugccgcucggguacgugacccacggccugaaccuggaggaggcggcccgguacaugcgcagccucaaggugcccgccaccgucuccgugagcucccccgacgccgugaccgccuacaacggguaccugacgagcuccagcaagacccccgaggagcacuucaucgagaccaucucccuggcgggcagcuacaaggacuggagcuacuccggccagagcacccagcucgggaucgaguuccugaagcggggcgacaaguccgucuacuacacgagcaacccgaccaccuuccaccuggacggggaggugaucaccuucgacaaccucaagacgcugcugucccuccgcgaggugcggaccaucaaggucuucaccaccguggacaacaucaaccugcacacgcagguggucgacaugagcaugaccuacggccagcaguucggccccaccuaccuggacggggccgacgugaccaagaucaagccccacaacucccacgagggcaagacguucuacgugcucccgaacgacgacacccugcgcgucgaggccuucgaguacuaccacaccaccgaccccagcuuccuggggcgguacauguccgcccucaaccacacgaagaaguggaaguacccccaggugaacggccugaccagcaucaagugggccgacaacaacugcuaccuggcgaccgcccuccugacccugcagcagaucgagcucaaguucaaccccccggcccugcaggacgccuacuaccgcgcgcgggccggggaggccgccaacuucugcgcccugauccucgcguacugcaacaagacggugggcgagcugggcgacguccgcgagaccauguccuaccuguuccagcacgccaaccucgacagcugcaagcgggugcugaacgucgugugcaagaccugcgggcagcagcagaccacccugaagggcguggaggccgucauguacauggggacgcucuccuacgagcaguucaagaagggcgugcagauccccugcaccugcgggaagcaggugaccaaguaccugguccagcaggagagccccuucgugaugauguccgcccccccggcccaguacgagcugaagcacggcaccuucacgugcgcgagcgaguacaccggcaacuaccagugcgggcacuacaagcacaucaccuccaaggagacccucuacugcaucgacggcgcccugcugacgaagagcagcgaguacaaggggcccaucaccgacguguucuacaaggagaacuccuacaccaccacgaucaagcccgucaccuacaagcucgacggcguggugugcaccgagaucgaccccaagcuggacaacuacuacaagaaggacaacagcuacuucaccgagcagccgaucgaccugguccccaaccagcccuaccccaacgccuccuucgacaacuucaaguucgugugcgacaacaucaaguucgccgacgaccucaaccagcugacgggguacaagaagccggccagccgcgagcugaaggugaccuucuuccccgaccucaacggcgacgucguggcgaucgacuacaagcacuacacccccuccuucaagaagggcgccaagcugcugcacaagcccaucguguggcacgucaacaacgccaccaacaaggccacguacaagccgaacaccuggugcauccggugccucuggagcaccaagcccguggagaccuccaacagcuucgacgugcugaaguccgaggacgcgcaggggauggacaaccuggccugcgaggaccucaagcccgucagcgaggaggugguggagaaccccacgauccagaaggacguccuggagugcaacgugaagaccaccgagguggucggcgacaucauccugaagccggccaacaacucccucaagaucaccgaggagguggggcacacggaccugauggccgccuacguggacaacagcucccugaccaucaagaagcccaacgagcucagccgcguccugggccugaagacccucgcgacccacgggcuggccgccgugaacuccgugcccugggacacgaucgccaacuacgccaagccguuccugaacaaggucgugagcaccaccaccaacaucgugacgcgcugccucaaccgggucugcaccaacuacaugcccuacuucuucacccugcugcuccagcugugcaccuucacccgcuccacgaacagccggaucaaggcguccaugcccaccaccaucgccaagaacaccgugaagagcgugggcaaguucugccuggaggccagcuucaacuaccucaagucccccaacuucagcaagcugaucaacaucaucaucugguuccugcuccuguccgucugccugggcagccucaucuacuccacggccgcccugggggugcugaugagcaaccucggcaugccguccuacugcaccggguaccgcgagggcuaccugaacagcaccaacgugaccaucgcgacguacugcaccggcuccauccccugcagcgucugccuguccgggcucgacagccuggacaccuaccccucccuggagaccauccagaucacgaucagcuccuucaagugggaccucaccgccuucggccugguggccgagugguuccuggccuacauccucuucacccgguucuucuacgugcuggggcuggccgcgaucaugcagcucuucuucagcuacuucgccguccacuucaucuccaacagcuggcugauguggcugaucaucaaccuggugcagauggcccccaucuccgccauggugcgcauguacaucuucuucgcgagcuucuacuacgucuggaagagcuacgugcacguggucgacggcugcaacuccagcaccugcaugaugugcuacaagcggaaccgcgccacgcggguggagugcaccaccaucgucaacggggugcgccgguccuucuacguguacgccaacggcggcaagggguucugcaagcuccacaacuggaacugcgucaacugcgacaccuucugcgccggcagcacguucaucuccgacgagguggcccgcgaccugagccugcaguucaagcggccgaucaaccccaccgaccaguccagcuacaucguggacuccgucaccgugaagaacgggagcauccaccucuacuucgacaaggcgggccagaagaccuacgagcgccacucccugagccacuucgugaaccuggacaaccuccgggccaacaacacgaaggggucccugcccaucaacgucaucguguucgacggcaagagcaagugcgaggaguccagcgccaaguccgccagcguguacuacucccagcugaugugccagcccauccuccugcuggaccaggcccucgucagcgacgugggcgacagcgcggagguggccgucaagauguucgacgccuacgugaacaccuucuccagcaccuucaacgugccgauggagaagcugaagacccuggucgccacggccgaggcggagcucgccaagaacgugucccuggacaacgugcugagcaccuucaucuccgccgcccgccagggguucgucgacagcgacguggagaccaaggacguggucgagugccucaagcugucccaccagagcgacaucgaggugaccggcgacuccugcaacaacuacaugcugacguacaacaagguggagaacaugaccccccgggaccucggggcgugcaucgacugcagcgcccgccacaucaacgcccaggucgccaagucccacaacaucgcccugaucuggaacgugaaggacuucaugagccuguccgagcagcuccggaagcagauccgcagcgcggccaagaagaacaaccugcccuucaagcugaccugcgccaccacgcgccagguggucaacguggugaccaccaagaucgcccucaagggcgggugaggacuaguuauaagacugacuagcccgaugggccucccaacgggcccuccuccccuccuugcaccgagauuaauaaaaaaaaaaaaaaaaaaaaaaaaaaaaaaaaaaaaaaaaaaaaaaaaaaaaaaaaaaaaaaaaugcaucccccccccccccccccccccccccccccccaaaggcucuuuucagagccaccagaauu

SEQ ID NO: 21531 - RNA, 6058 nt, Artificial Sequence
  SARS-CoV-2__MT831301.1__non-structural protein 3 (NSP3) mRNA gc
aggagaaagcuuaccauggcccccaccaaggugaccuucggcgacgacacggucaucgaggugcagggguacaagagcgugaacaucaccuucgagcuggacgagcgcaucgacaagguccucaacgagaagugcuccgccuacaccguggagcugggcaccgaggugaacgaguucgcgugcgucguggccgacgccgugaucaagacgcugcagccggucagcgagcuccugaccccccuggggaucgaccucgacgagugguccauggccaccuacuaccuguucgacgagagcggcgaguucaagcuggccucccacauguacugcagcuucuacccccccgacgaggacgaggaggagggggacugcgaggaggaggaguucgagccguccacccaguacgaguacggcacggaggacgacuaccagggcaagccccucgaguucggggcgaccagcgccgcccugcagcccgaggaggagcaggaggaggacuggcuggacgacgacucccagcagaccgugggccagcaggacgggagcgaggacaaccagaccacgaccauccagaccaucguggagguccagccccagcucgagauggagcugaccccgguggugcagacgaucgaggucaacuccuucagcggcuaccugaagcucaccgacaacguguacaucaagaacgccgacaucguggaggaggcgaagaaggucaagcccaccgugguggucaacgccgccaacguguaccugaagcacgggggcggcguggccggggcccugaacaaggcgaccaacaacgccaugcaggucgaguccgacgacuacaucgccacgaacggcccccucaagguggggggcagcugcguccuguccggccacaaccuggccaagcacugccuccacgugguggggcccaacgucaacaagggcgaggacauccagcugcugaagagcgccuacgagaacuucaaccagcacgaggugcuccuggcgccgcugcucuccgccgggaucuucggcgccgaccccauccacagccugcgggugugcgucgacaccgugcgcaccaacguguaccuggccgucuucgacaagaaccucuacgacaagcugguguccagcuuccuggagaugaagagcgagaagcagguggagcagaagaucgccgagauccccaaggaggaggucaagcccuucaucaccgaguccaagccgagcguggagcagcggaagcaggacgacaagaagaucaaggcgugcguggaggaggucacgaccacccucgaggagaccaaguuccugacggagaaccugcuccuguacaucgacaucaacgggaaccugcaccccgacuccgccacccucgugagcgacaucgacaucaccuuccugaagaaggacgcccccuacaucgugggcgacgucgugcaggagggcgugcugaccgccgucgugauccccacgaagaaggccgggggcaccaccgagaugcucgcgaaggcccugcgcaaggugccgaccgacaacuacaucacgaccuaccccgggcagggccugaacggguacaccgucgaggaggccaagaccgugcucaagaagugcaaguccgccuucuacauccugcccagcaucaucuccaacgagaagcaggagauccugggcaccgugagcuggaaccuccgggagaugcuggcgcacgccgaggagacgcgcaagcugaugcccgucugcguggagaccaaggccaucguguccaccauccagcggaaguacaagggcaucaagauccaggagggggucguggacuacggcgcccgcuucuacuucuacaccagcaagacgaccguggccucccugaucaacacccucaacgaccugaacgagacccuggucacgaugccgcucggguacgugacccacggccugaaccuggaggaggcggcccgguacaugcgcagccucaaggugcccgccaccgucuccgugagcucccccgacgccgugaccgccuacaacggguaccugacgagcuccagcaagacccccgaggagcacuucaucgagaccaucucccuggcgggcagcuacaaggacuggagcuacuccggccagagcacccagcucgggaucgaguuccugaagcggggcgacaaguccgucuacuacacgagcaacccgaccaccuuccaccuggacggggaggugaucaccuucgacaaccucaagacgcugcugucccuccgcgaggugcggaccaucaaggucuucaccaccguggacaacaucaaccugcacacgcagguggucgacaugagcaugaccuacggccagcaguucggccccaccuaccuggacggggccgacgugaccaagaucaagccccacaacucccacgagggcaagacguucuacgugcucccgaacgacgacacccugcgcgucgaggccuucgaguacuaccacaccaccgaccccagcuuccuggggcgguacauguccgcccucaaccacacgaagaaguggaaguacccccaggugaacggccugaccagcaucaagugggccgacaacaacugcuaccuggcgaccgcccuccugacccugcagcagaucgagcucaaguucaaccccccggcccugcaggacgccuacuaccgcgcgcgggccggggaggccgccaacuucugcgcccugauccucgcguacugcaacaagacggugggcgagcugggcgacguccgcgagaccauguccuaccuguuccagcacgccaaccucgacagcugcaagcgggugcugaacgucgugugcaagaccugcgggcagcagcagaccacccugaagggcguggaggccgucauguacauggggacgcucuccuacgagcaguucaagaagggcgugcagauccccugcaccugcgggaagcaggccaccaaguaccuggugcagcaggagagccccuucgucaugauguccgcccccccggcgcaguacgagcugaagcacggcaccuucacgugcgccagcgaguacaccggcaacuaccagugcgggcacuacaagcacaucaccuccaaggagacccucuacugcaucgacggcgcccugcugacgaagagcagcgaguacaaggggcccaucaccgacguguucuacaaggagaacuccuacaccaccacgaucaagcccgugaccuacaagcucgacggcgucgugugcaccgagaucgaccccaagcuggacaacuacuacaagaaggacaacagcuacuucaccgagcagccgaucgaccuggugcccaaccagcccuaccccaacgccuccuucgacaacuucaaguucgucugcgacaacaucaaguucgccgacgaccucaaccagcugacgggguacaagaagccggcgagccgcgagcugaaggugaccuucuuccccgaccucaacggcgacguggucgccaucgacuacaagcacuacacccccuccuucaagaagggcgccaagcugcugcacaagcccaucguguggcacgugaacaacgccaccaacaaggcgacguacaagccgaacaccuggugcauccggugccucuggagcaccaagcccgucgagaccuccaacagcuucgacgugcugaaguccgaggacgcccaggggauggacaaccuggccugcgaggaccucaagcccgugagcgaggaggucguggagaaccccacgauccagaaggacgugcuggagugcaacgucaagaccaccgagguggugggcgacaucauccugaagccggccaacaacucccucaagaucaccgaggaggucgggcacacggaccugauggccgcguacguggacaacagcucccugaccaucaagaagcccaacgagcucagccgcgugcugggccugaagacccucgccacccacgggcuggccgccgucaacuccgugcccugggacacgaucgccaacuacgcgaagccguuccugaacaagguggucagcaccaccaccaacaucgugacgcgcugccucaaccgggugugcaccaacuacaugcccuacuucuucacccugcugcuccagcugugcaccuucacccgcuccacgaacagccggaucaaggccuccaugcccaccaccaucgccaagaacaccgucaagagcgugggcaaguucugccuggaggccagcuucaacuaccucaagucccccaacuucagcaagcugaucaacaucaucaucugguuccugcuccuguccgugugccugggcagccucaucuacuccacggccgcgcuggggguccugaugagcaaccucggcaugccguccuacugcaccggguaccgcgagggcuaccugaacagcaccaacgugaccaucgccacguacugcaccggcuccauccccugcagcgugugccuguccgggcucgacagccuggacaccuaccccucccuggagaccauccagaucacgaucagcuccuucaagugggaccucaccgccuucggccuggucgccgagugguuccuggccuacauccucuucacccgguucuucuacgugcuggggcuggcggccaucaugcagcucuucuucagcuacuucgccgugcacuucaucuccaacagcuggcugauguggcugaucaucaaccugguccagauggcccccaucuccgcgauggugcgcauguacaucuucuucgccagcuucuacuacguguggaagagcuacguccacgugguggacggcugcaacuccagcaccugcaugaugugcuacaagcggaaccgcgccacgcgggucgagugcaccaccaucgugaacgggguccgccgguccuucuacguguacgccaacggcggcaagggguucugcaagcuccacaacuggaacugcgugaacugcgacaccuucugcgccggcagcacguucaucuccgacgaggucgcgcgcgaccugagccugcaguucaagcggccgaucaaccccaccgaccaguccagcuacaucguggacuccgugaccgucaagaacgggagcauccaccucuacuucgacaaggccggccagaagaccuacgagcgccacucccugagccacuucgugaaccuggacaaccuccgggccaacaacacgaaggggucccugcccaucaacgugaucgucuucgacggcaagagcaagugcgaggaguccagcgccaaguccgccagcguguacuacucccagcugaugugccagcccauccuccugcuggaccaggcgcucgugagcgacgucggcgacagcgccgagguggccgugaagauguucgacgccuacgucaacaccuucuccagcaccuucaacgugccgauggagaagcugaagacccugguggccacggcggaggccgagcucgccaagaacgucucccuggacaacgugcugagcaacuucaucuccgccgcgcgccagggguucguggacagcgacgucgagaccaaggacgugguggagugccucaagcugucccaccagagcgacaucgaggucaccggcgacuccugcaacaacuacaugcugaccuacaacaagguggagaacaugacgccccgggaccucggggccugcaucgacugcagcgcccgccacaucaacgcccagguggccaagucccacaacaucgcgcugaucuggaacgucaaggacuucaugagccuguccgagcagcuccggaagcagauccgcagcgccgccaagaagaacaaccugcccuucaagcugaccugcgccaccacccgccagguggugaacgucgugacgaccaagaucgcccucaagggcgggugaggacuaguuauaagacugacuagcccgaugggccucccaacgggcccuccuccccuccuugcaccgagauuaauaaaaaaaaaaaaaaaaaaaaaaaaaaaaaaaaaaaaaaaaaaaaaaaaaaaaaaaaaaaaaaaaugcaucccccccccccccccccccccccccccccccaaaggcucuuuucagagccaccagaauu

SEQ ID NO: 21532 - RNA, 6058 nt, Artificial Sequence
  SARS-CoV-2__MT831340.1__non-structural protein 3 (NSP3) mRNA gc
aggagaaagcuuaccauggcccccaccaaggugaccuucggcgacgacacggucaucgaggugcagggguacaagagcgugaacaucaccuucgagcuggacgagcgcaucgacaagguccucaacgagaagugcuccgccuacaccguggagcugggcaccgaggugaacgaguucgcgugcgucguggccgacgccgugaucaagacgcugcagccggucagcgagcuccugaccccccuggggaucgaccucgacgagugguccauggccaccuacuaccuguucgacgagagcggcgaguucaagcuggccucccacauguacugcagcuucuacccccccgacgaggacgaggaggagggggacugcgaggaggaggaguucgagccguccacccaguacgaguacggcacggaggacgacuaccagggcaagccccucgaguucggggcgaccagcgccgcccugcagcccgaggaggagcaggaggaggacuggcuggacgacgacucccagcagaccgugggccagcaggacgggagcgaggacaaccagaccacgaccauccagaccaucguggagguccagccccagcucgagauggagcugaccccgguggugcagacgaucgaggucaacaucuucuccggcuaccugaagcucaccgacaacguguacaucaagaacgccgacaucguggaggaggcgaagaaggucaagcccaccgugguggucaacgccgccaacguguaccugaagcacgggggcggcguggccggggcccugaacaaggcgaccaacaacgccaugcaggucgagagcgacgacuacaucgccacgaacggcccccucaagguggggggcuccugcguccugagcggccacaaccuggccaagcacugccuccacgugguggggcccaacgucaacaagggcgaggacauccagcugcugaaguccgccuacgagaacuucaaccagcacgaggugcuccuggcgccgcugcucagcgccgggaucuucggcgccgaccccauccacucccugcgggugugcgucgacaccgugcgcaccaacguguaccuggccgucuucgacaagaaccucuacgacaagcuggugagcuccuuccuggagaugaagagcgagaagcagguggagcagaagaucgccgagauccccaaggaggaggucaagcccuucaucaccgagagcaagccguccguggagcagcggaagcaggacgacaagaagaucaaggcgugcguggaggaggucacgaccacccucgaggagaccaaguuccugacggagaaccugcuccuguacaucgacaucaacgggaaccugcaccccgacagcgccacccucguguccgacaucgacaucaccuuccugaagaaggacgcccccuacaucgugggcgacgucgugcaggagggcgugcugaccgccgucgugauccccacgaagaaggccgggggcaccaccgagaugcucgcgaaggcccugcgcaaggugccgaccgacaacuacaucacgaccuaccccgggcagggccugaacggguacaccgucgaggaggccaagaccgugcucaagaagugcaagagcgccuucuacauccugcccuccaucaucagcaacgagaagcaggagauccugggcaccguguccuggaaccuccgggagaugcuggcgcacgccgaggagacgcgcaagcugaugcccgucugcguggagaccaaggccaucgugagcaccauccagcggaaguacaagggcaucaagauccaggagggggucguggacuacggcgcccgcuucuacuucuacaccuccaagacgaccguggccagccugaucaacacccucaacgaccugaacgagacccuggucacgaugccgcucggguacgugacccacggccugaaccuggaggaggcggcccgguacaugcgcucccucaaggugcccgccaccgucagcguguccagccccgacgccgugaccgccuacaacggguaccugacguccagcuccaagacccccgaggagcacuucaucgagaccaucagccuggcgggcuccuacaaggacuggagcuacagcggccaguccacccagcucgggaucgaguuccugaagcggggcgacaagagcgucuacuacacguccaacccgaccaccuuccaccuggacggggaggugaucaccuucgacaaccucaagacgcugcugagccuccgcgaggugcggaccaucaaggucuucaccaccguggacaacaucaaccugcacacgcagguggucgacauguccaugaccuacggccagcaguucggccccaccuaccuggacggggccgacgugaccaagaucaagccccacaacagccacgagggcaagacguucuacgugcucccgaacgacgacacccugcgcgucgaggccuucgaguacuaccacaccaccgaccccuccuuccuggggcgguacaugagcgcccucaaccacacgaagaaguggaaguacccccaggugaacggccugaccuccaucaagugggccgacaacaacugcuaccuggcgaccgcccuccugacccugcagcagaucgagcucaaguucaaccccccggcccugcaggacgccuacuaccgcgcgcgggccggggaggccgccaacuucugcgcccugauccucgcguacugcaacaagacggugggcgagcugggcgacguccgcgagaccaugagcuaccuguuccagcacgccaaccucgacuccugcaagcgggugcugaacgucgugugcaagaccugcgggcagcagcagaccacccugaagggcguggaggccgucauguacauggggacgcucagcuacgagcaguucaagaagggcgugcagauccccugcaccugcgggaagcaggccaccaaguaccuggugcagcaggagucccccuucgucaugaugagcgcccccccggcgcaguacgagcugaagcacggcaccuucacgugcgccuccgaguacaccggcaacuaccagugcgggcacuacaagcacaucaccagcaaggagacccucuacugcaucgacggcgcccugcugacgaaguccagcgaguacaaggggcccaucaccgacguguucuacaaggagaacagcuacaccaccacgaucaagcccgugaccuacaagcucgacggcgucgugugcaccgagaucgaccccaagcuggacaacuacuacaagaaggacaacuccuacuucaccgagcagccgaucgaccuggugcccaaccagcccuaccccaacgccagcuucgacaacuucaaguucgucugcgacaacaucaaguucgccgacgaccucaaccagcugacgggguacaagaagccggcgucccgcgagcugaaggugaccuucuuccccgaccucaacggcgacguggucgccaucgacuacaagcacuacacccccagcuucaagaagggcgccaagcugcugcacaagcccaucguguggcacgugaacaacgccaccaacaaggcgacguacaagccgaacaccuggugcauccggugccucugguccaccaagcccgucgagaccagcaacuccuucgacgugcugaagagcgaggacgcccaggggauggacaaccuggccugcgaggaccucaagcccguguccgaggaggucguggagaaccccacgauccagaaggacgugcuggagugcaacgucaagaccaccgagguggugggcgacaucauccugaagccggccaacaacagccucaagaucaccgaggaggucgggcacacggaccugauggccgcguacguggacaacuccagccugaccaucaagaagcccaacgagcucucccgcgugcugggccugaagacccucgccacccacgggcuggccgccgucaacagcgugcccugggacacgaucgccaacuacgcgaagccguuccugaacaagguggucuccaccaccaccaacaucgugacgcgcugccucaaccgggugugcaccaacuacaugcccuacuucuucacccugcugcuccagcugugcaccuucacccgcagcacgaacucccggaucaaggccagcaugcccaccaccaucgccaagaacaccgucaaguccgugggcaaguucugccuggaggccagcuucaacuaccucaagagccccaacuucuccaagcugaucaacaucaucaucugguuccugcuccugagcgugugccugggcucccucaucuacagcacggccgcgcuggggguccugauguccaaccucggcaugccgagcuacugcaccggguaccgcgagggcuaccugaacuccaccaacgugaccaucgccacguacugcaccggcagcauccccugcuccgugugccugagcgggcucgacucccuggacaccuaccccagccuggagaccauccagaucacgaucuccagcuucaagugggaccucaccgccuucggccuggucgccgagugguuccuggccuacauccucuucacccgguucuucuacgugcuggggcuggcggccaucaugcagcucuucuucuccuacuucgccgugcacuucaucagcaacuccuggcugauguggcugaucaucaaccugguccagauggcccccaucagcgcgauggugcgcauguacaucuucuucgccuccuucuacuacguguggaagagcuacguccacgugguggacggcugcaacagcuccaccugcaugaugugcuacaagcggaaccgcgccacgcgggucgagugcaccaccaucgugaacgggguccgccggagcuucuacguguacgccaacggcggcaagggguucugcaagcuccacaacuggaacugcgugaacugcgacaccuucugcgccggcuccacguucaucagcgacgaggucgcgcgcgaccugucccugcaguucaagcggccgaucaaccccaccgaccagagcuccuacaucguggacagcgugaccgucaagaacggguccauccaccucuacuucgacaaggccggccagaagaccuacgagcgccacagccugucccacuucgugaaccuggacaaccuccgggccaacaacacgaaggggagccugcccaucaacgugaucgucuucgacggcaaguccaagugcgaggagagcuccgccaagagcgccuccguguacuacagccagcugaugugccagcccauccuccugcuggaccaggcgcucguguccgacgucggcgacagcgccgagguggccgugaagauguucgacgccuacgucaacaccuucagcuccaccuucaacgugccgauggagaagcugaagacccugguggccacggcggaggccgagcucgccaagaacgucagccuggacaacgugcuguccaccuucaucagcgccgcgcgccagggguucguggacuccgacgucgagaccaaggacgugguggagugccucaagcugagccaccaguccgacaucgaggucaccggcgacagcugcaacaacuacaugcugacguacaacaagguggagaacaugaccccccgggaccucggggccugcaucgacugcuccgcccgccacaucaacgcccagguggccaagagccacaacaucgcgcugaucuggaacgucaaggacuucaugucccugagcgagcagcuccggaagcagauccgcuccgccgccaagaagaacaaccugcccuucaagcugaccugcgccaccacgcgccagguggugaacgucgugaccaccaagaucgcccucaagggcgggugaggacuaguuauaagacugacuagcccgaugggccucccaacgggcccuccuccccuccuugcaccgagauuaauaaaaaaaaaaaaaaaaaaaaaaaaaaaaaaaaaaaaaaaaaaaaaaaaaaaaaaaaaaaaaaaaugcaucccccccccccccccccccccccccccccccaaaggcucuuuucagagccaccagaauu

SEQ ID NO: 21533 - RNA, 6058 nt, Artificial Sequence
  SARS-CoV-2__MT831347.1__non-structural protein 3 (NSP3) mRNA gc
aggagaaagcuuaccauggcccccaccaaggugaccuucggcgacgacacggucaucgaggugcagggguacaagagcgugaacaucaccuucgagcuggacgagcgcaucgacaagguccucaacgagaagugcuccgccuacaccguggagcugggcaccgaggugaacgaguucgcgugcgucguggccgacgccgugaucaagacgcugcagccggucagcgagcuccugaccccccuggggaucgaccucgacgagugguccauggccaccuacuaccuguucgacgagagcggcgaguucaagcuggccucccacauguacugcagcuucuacccccccgacgaggacgaggaggagggggacugcgaggaggaggaguucgagccguccacccaguacgaguacggcacggaggacgacuaccagggcaagccccucgaguucggggcgaccagcgccgcccugcagcccgaggaggagcaggaggaggacuggcuggacgacgacucccagcagaccgugggccagcaggacgggagcgaggacaaccagaccacgaccauccagaccaucguggagguccagccccagcucgagauggagcugaccccgguggugcagacgaucgaggucaacuccuucagcggcuaccugaagcucaccgacaacguguacaucaagaacgccgacaucguggaggaggcgaagaaggucaagcccaccgugguggucaacgccgccaacguguaccugaagcacgggggcggcguggccggggcccugaacaaggcgaccaacaacgccaugcaggucgaguccgacgacuacaucgccacgaacggcccccucaagguggggggcagcugcguccuguccggccacaaccuggccaagcacugccuccacgugguggggcccaacgucaacaagggcgaggacauccagcugcugaagagcgccuacgagaacuucaaccagcacgaggugcuccuggcgccgcugcucuccgccgggaucuucggcgccgaccccauccacagccugcgggugugcgucgacaccgugcgcaccaacguguaccuggccgucuucgacaagaaccucuacgacaagcugguguccagcuuccuggagaugaagagcgagaagcagguggagcagaagaucgccgagauccccaaggaggaggucaagcccuucaucaccgaguccaagccgagcguggagcagcggaagcaggacgacaagaagaucaaggcgugcguggaggaggucacgaccacccucgaggagaccaaguuccugacggagaaccugcuccuguacaucgacaucaacgggaaccugcaccccgacuccgccacccucgugagcgacaucgacaucaccuuccugaagaaggacgcccccuacaucgugggcgacgucgugcaggagggcgugcugaccgccgucgugauccccacgaagaaggccgggggcaccaccgagaugcucgcgaaggcccugcgcaaggugccgaccgacaacuacaucacgaccuaccccgggcagggccugaacggguacaccgucgaggaggccaagaccgugcucaagaagugcaaguccgccuucuacauccugcccagcaucaucuccaacgagaagcaggagauccugggcaccgugagcuggaaccuccgggagaugcuggcgcacgccgaggagacgcgcaagcugaugcccgucugcguggagaccaaggccaucguguccaccauccagcggaaguacaagggcaucaagauccaggagggggucguggacuacggcgcccgcuucuacuucuacaccagcaagacgaccguggccucccugaucaacacccucaacgaccugaacgagacccuggucacgaugccgcucggguacgugacccacggccugaaccuggaggaggcggcccgguacaugcgcagccucaaggugcccgccaccgucuccgugagcucccccgacgccgugaccgccuacaacggguaccugacgagcuccagcaagacccccgaggagcacuucaucgagaccaucucccuggcgggcagcuacaaggacuggagcuacuccggccagagcacccagcucgggaucgaguuccugaagcggggcgacaaguccgucuacuacacgagcaacccgaccaccuuccaccuggacggggaggugaucaccuucgacaaccucaagacgcugcugucccuccgcgaggugcggaccaucaaggucuucaccaccguggacaacaucaaccugcacacgcagguggucgacaugagcaugaccuacggccagcaguucggccccaccuaccuggacggggccgacgugaccaagaucaagccccacaacucccacgagggcaagacguucuacgugcucccgaacgacgacacccugcgcgucgaggccuucgaguacuaccacaccaccgaccccagcuuccuggggcgguacauguccgcccucaaccacacgaagaaguggaaguacccccaggugaacggccugaccagcaucaagugggccgacaacaacugcuaccuggcgaccgcccuccugacccugcagcagaucgagcucaaguucaaccccccggcccugcaggacgccuacuaccgcgcgcgggccggggaggccgccaacuucugcgcccugauccucgcguacugcaacaagacggugggcgagcugggcgacguccgcgagaccauguccuaccuguuccagcacgccaaccucgacagcugcaagcgggugcugaacgucgugugcaagaccugcgggcagcagcagaccacccugaagggcguggaggccgucauguacauggggacgcucuccuacgagcaguucaagaagggcgugcagauccccugcaccugcgggaagcaggccaccaaguaccuggugcagcaggagagccccuucgucaugauguccgcccccccggcgcaguacgagcugaagcacggcaccuucacgugcgccagcgaguacaccggcaacuaccagugcgggcacuacaagcacaucaccuccaaggagacccucuacugcaucgacggcgcccugcugacgaagagcagcgaguacaaggggcccaucaccgacguguucuacaaggagaacuccuacaccaccacgaucaagcccgugaccuacaagcucgacggcgucgugugcaccgagaucgaccccaagcuggacaacuacuacaagaaggacaacagcuacuucaccgagcagccgaucgaccuggugcccaaccagcccuaccccaacgccuccuucgacaacuucaaguucgucugcgacaacaucaaguucgccgacgaccucaaccagcugacgggguacaagaagccggcgagccgcgagcugaaggugaccuucuuccccgaccucaacggcgacguggucgccaucgacuacaagcacuacacccccuccuucaagaagggcgccaagcugcugcacaagcccaucguguggcacgugaacaacgccaccaacaaggcgacguacaagccgaacaccuggugcauccggugccucuggagcaccaagcccgucgagaccuccaacagcuucgacgugcugaaguccgaggacgcccaggggauggacaaccuggccugcgaggaccucaagcccgugagcgaggaggucguggagaaccccacgauccagaaggacgugcuggagugcaacgucaagaccaccgagguggugggcgacaucauccugaagccggccaacaacucccucaagaucaccgaggaggucgggcacacggaccugauggccgcguacguggacaacagcucccugaccaucaagaagcccaacgagcucagccgcgugcugggccugaagacccucgccacccacgggcuggccgccgucaacuccgugcccugggacacgaucgccaacuacgcgaagccguuccugaacaagguggucagcaccaccaccaacaucgugacgcgcugccucaaccgggugugcaccaacuacaugcccuacuucuucacccugcugcuccagcugugcaccuucacccgcuccacgaacagccggaucaaggccuccaugcccaccaccaucgccaagaacaccgucaagagcgugggcaaguucugccuggaggccagcuucaacuaccucaagucccccaacuucagcaagcugaucaacaucaucaucugguuccugcuccuguccgugugccugggcagccucaucuacuccacggccgcgcuggggguccugaugagcaaccucggcaugccguccuacugcaccggguaccgcgagggcuaccugaacagcaccaacgugaccaucgccacguacugcaccggcuccauccccugcagcgugugccuguccgggcucgacagccuggacaccuaccccucccuggagaccauccagaucacgaucagcuccuucaagugggaccucaccgccuucggccuggucgccgagugguuccuggccuacauccucuucacccgguucuucuacgugcuggggcuggcggccaucaugcagcucuucuucagcuacuucgccgugcacuucaucuccaacagcuggcugauguggcugaucaucaaccugguccagauggcccccaucuccgcgauggugcgcauguacaucuucuucgugagcuucuacuacgucuggaagagcuacgugcacguggucgacggcugcaacuccagcaccugcaugaugugcuacaagcggaaccgcgccacgcggguggagugcaccaccaucgucaacggggugcgccgguccuucuacguguacgccaacggcggcaagggguucugcaagcuccacaacuggaacugcgucaacugcgacaccuucugcgccggcagcacguucaucuccgacgagguggcccgcgaccugagccugcaguucaagcggccgaucaaccccaccgaccaguccagcuacaucguggacuccgucaccgugaagaacgggagcauccaccucuacuucgacaaggcgggccagaagaccuacgagcgccacucccugagccacuucgugaaccuggacaaccuccgggccaacaacacgaaggggucccugcccaucaacgucaucguguucgacggcaagagcaagugcgaggaguccagcgccaaguccgccagcguguacuacucccagcugaugugccagcccauccuccugcuggaccaggcccucgucagcgacgugggcgacagcgcggagguggccgucaagauguucgacgccuacgugaacaccuucuccagcaccuucaacgugccgauggagaagcugaagacccuggucgccacggccgaggcggagcucgccaagaacgugucccuggacaacgugcugagcaccuucaucuccgccgcccgccagggguucgucgacagcgacguggagaccaaggacguggucgagugccucaagcugucccaccagagcgacaucgaggugaccggcgacuccugcaacaacuacaugcugacguacaacaagguggagaacaugaccccccgggaccucggggcgugcaucgacugcagcgcccgccacaucaacgcccaggucgccaagucccacaacaucgcccugaucuggaacgugaaggacuucaugagccuguccgagcagcuccggaagcagauccgcagcgcggccaagaagaacaaccugcccuucaagcugaccugcgccaccacgcgccagguggucaacguggugaccaccaagaucgcccucaagggcgggugaggacuaguuauaagacugacuagcccgaugggccucccaacgggcccuccuccccuccuugcaccgagauuaauaaaaaaaaaaaaaaaaaaaaaaaaaaaaaaaaaaaaaaaaaaaaaaaaaaaaaaaaaaaaaaaaugcaucccccccccccccccccccccccccccccccaaaggcucuuuucagagccaccagaauu

SEQ ID NO: 21534 - RNA, 6058 nt, Artificial Sequence
  SARS-CoV-2__MT831353.1__non-structural protein 3 (NSP3) mRNA gc
aggagaaagcuuaccauggcccccaccaaggugaccuucggcgacgacacggucaucgaggugcagggguacaagagcgugaacaucaccuucgagcuggacgagcgcaucgacaagguccucaacgagaagugcuccgccuacaccguggagcugggcaccgaggugaacgaguucgcgugcgucguggccgacgccgugaucaagacgcugcagccggucagcgagcuccugaccccccuggggaucgaccucgacgagugguccauggccaccuacuaccuguucgacgagagcggcgaguucaagcuggccucccacauguacugcagcuucuacccccccgacgaggacgaggaggagggggacugcgaggaggaggaguucgagccguccacccaguacgaguacggcacggaggacgacuaccagggcaagccccucgaguucggggcgaccagcgccgcccugcagcccgaggaggagcaggaggaggacuggcuggacgacgacucccagcagaccgugggccagcaggacgggagcgaggacaaccagaccacgaccauccagaccaucguggagguccagccccagcucgagauggagcugaccccgguggugcagacgaucgaggucaacuccuucagcggcuaccugaagcucaccgacaacguguacaucaagaacgccgacaucguggaggaggcgaagaaggucaagcccaccgugguggucaacgccgccaacguguaccugaagcacgggggcggcguggccggggcccugaacaaggcgaccaacaacgccaugcaggucgaguccgacgacuacaucgccacgaacggcccccucaagguggggggcagcugcguccuguccggccacaaccuggccaagcacugccuccacgugguggggcccaacgucaacaagggcgaggacauccagcugcugaagagcgccuacgagaacuucaaccagcacgaggugcuccuggcgccgcugcucuccgccgggaucuucggcgccgaccccauccacagccugcgggugugcgucgacaccgugcgcaccaacguguaccuggccgucuucgacaagaaccucuacgacaagcugguguccagcuuccuggagaugaagagcgagaagcagguggagcagaagaucgccgagauccccaaggaggaggucaagcccuucaucaccgaguccaagccgagcguggagcagcggaagcaggacgacaagaagaucaaggcgugcguggaggaggucacgaccacccucgaggagaccaaguuccugacggagaaccugcuccuguacaucgacaucaacgggaaccugcaccccgacuccgccacccucgugagcgacaucgacaucaccuuccugaagaaggacgcccccuacaucgugggcgacgucgugcaggagggcgugcugaccgccgucgugauccccacgaagaaggccgggggcaccaccgagaugcucgcgaaggcccugcgcaaggugccgaccgacaacuacaucacgaccuaccccgggcagggccugaacggguacaccgucgaggaggccaagaccgugcucaagaagugcaaguccgccuucuacauccugcccagcaucaucuccaacgagaagcaggagauccugggcaccgugagcuggaaccuccgggagaugcuggcgcacgccgaggagacgcgcaagcugaugcccgucugcguggagaccaaggccaucguguccaccauccagcggaaguacaagggcaucaagauccaggagggggucguggacuacggcgcccgcuucuacuucuacaccagcaagacgaccguggccucccugaucaacacccucaacgaccugaacgagacccuggucacgaugccgcucggguacgugacccacggccugaaccuggaggaggcggcccgguacaugcgcagccucaaggugcccgccaccgucuccgugagcucccccgacgccgugaccgccuacaacggguaccugacgagcuccagcaagacccccgaggagcacuucaucgagaccaucucccuggcgggcagcuacaaggacuggagcuacuccggccagagcacccagcucgggaucgaguuccugaagcggggcgacaaguccgucuacuacacgagcaacccgaccaccuuccaccuggacggggaggugaucaccuucgacaaccucaagacgcugcugucccuccgcgaggugcggaccaucaaggucuucaccaccguggacaacaucaaccugcacacgcagguggucgacaugagcaugaccuacggccagcaguucggccccaccuaccuggacggggccgacgugaccaagaucaagccccacaacucccacgagggcaagacguucuacgugcucccgaacgacgacacccugcgcgucgaggccuucgaguacuaccacaccaccgaccccagcuuccuggggcgguacauguccgcccucaaccacacgaagaaguggaaguacccccaggugaacggccugaccagcaucaagugggccgacaacaacugcuaccuggcgaccgcccuccugacccugcagcagaucgagcucaaguucaaccccccggcccugcaggacgccuacuaccgcgcgcgggccggggaggccgccaacuucugcgcccugauccucgcguacugcaacaagacggugggcgagcugggcgacguccgcgagaccauguccuaccuguuccagcacgccaaccucgacagcugcaagcgggugcugaacgucgugugcaagaccugcgggcagcagcagaccacccugaagggcguggaggccgucauguacauggggacgcucuccuacgagcaguucaagaagggcgugcagauccccugcaccugcgggaagcaggccaccaaguaccuggugcagcaggagagccccuucgucaugauguccgcccccccggcgcaguacgagcugaagcacggcaccuucacgugcgccagcgaguacaccggcaacuaccagugcgggcacuacaagcacaucaccuccaaggagacccucuacugcaucgacggcgcccugcugacgaagagcagcgaguacaaggggcccaucaccgacguguucuacaaggagaacuccuacaccaccacgaucaagcccgugaccuacaagcucgacggcgucgugugcaccgagaucgaccccaagcuggacaacuacuacaagaaggacaacagcuacuucaccgagcagccgaucgaccuggugcccaaccagcccuaccccaacgccuccuucgacaacuucaaguucgucugcgacaacaucaaguucgccgacgaccucaaccagcugacgggguacaagaagccggcgagccgcgagcugaaggugaccuucuuccccgaccucaacggcgacguggucgccaucgacuacaagcacuacacccccuccuucaagaagggcgccaagcugcugcacaagcccaucguguggcacgugaacaacgccaccaacaaggcgacguacaagccgaacaccuggugcauccggugccucuggagcaccaagcccgucgagaccuccaacagcuucgacgugcugaaguccgaggacgcccaggggauggacaaccuggccugcgaggaccucaagcccgugagcgaggaggucguggagaaccccacgauccagaaggacgugcuggagugcaacgucaagaccaccgagguggugggcgacaucauccugaagccggccaacaacucccucaagaucaccgaggaggucgggcacacggaccugauggccgcguacguggacaacagcucccugaccaucaagaagcccaacgagcucagccgcgugcugggccugaagacccucgccacccacgggcuggccgccgucaacuccgugcccugggacacgaucgccaacuacgcgaagccguuccugaacaagguggucagcaccaccaccaacaucgugacgcgcugccucaaccgggugugcaccaacuacaugcccuacuucuucacccugcugcuccagcugugcaccuucacccgcuccacgaacagccggaucaaggccuccaugcccaccaccaucgccaagaacaccgucaagagcgugggcaaguucugccuggaggccagcuucaacuaccucaagucccccaacuucagcaagcugaucaacaucaucaucugguuccugcuccuguccgugugccugggcagccucaucuacuccacggccgcgcuggggguccugaugagcaaccucggcaugccguccuacugcaccggguaccgcgagggcuaccugaacagcaccaacgugaccaucgccacguacugcaccggcuccauccccugcagcgugugccuguccgggcucgacagccuggacaccuaccccucccuggagaccauccagaucacgaucagcuccuucaagugggaccucaccgccuucggccuggucgccgagugguuccuggccuacauccucuucacccgguucuucuacgugcuggggcuggcggccaucaugcagcucuucuucagcuacuucgccgugcacuucaucuccaacagcuggcugauguggcugaucaucaaccugguccagauggcccccaucuccgcgauggugcgcauguacaucuucuucgccagcuucuacuacguguggaagagcuacguccacgugguggacggcugcaacuccagcaccugcaugaugugcuacaagcggaaccgcgccacgcgggucgagugcaccaccaucgugaacgggguccgccgguccuucuacguguacgccaacggcggcaagggguucugcaagcuccacaacuggaacugcgugaacugcgacaccuucugcgccggcagcacguucaucuccgacgaggucgcgcgcgaccugagccugcaguucaagcggccgaucaaccccaccgaccaguccagcuacaucguggacuccgugaccgucaagaacgggagcauccaccucuacuucgacaaggccggccagaagaccuacgagcgccacucccugagccacuucgugaaccuggacaaccuccgggccaacaacacgaaggggucccugcccaucaacgugaucgucuucgacggcaagagcaagugcgaggaguccagcgccaaguccgccagcguguacuacucccagcugaugugccagcccauccuccugcuggaccaggcgcucgugagcgacgucggcgacagcgccgagguggccgugaagauguucgacgccuacgucaacaccuucuccagcaccuucaacgugccgauggagaagcugaagacccugguggccacggcggaggccgagcucgccaagaacgucucccuggacaacgugcugagcaccuucaucuccgccgugcgccagggguucgucgacagcgacguggagaccaaggacguggucgagugccucaagcugucccaccagagcgacaucgaggugaccggcgacuccugcaacaacuacaugcugacguacaacaagguggagaacaugaccccccgggaccucggggcgugcaucgacugcagcgcccgccacaucaacgcccaggucgccaagucccacaacaucgcccugaucuggaacgugaaggacuucaugagccuguccgagcagcuccggaagcagauccgcagcgcggccaagaagaacaaccugcccuucaagcugaccugcgccaccacgcgccagguggucaacguggugaccaccaagaucgcccucaagggcgggugaggacuaguuauaagacugacuagcccgaugggccucccaacgggcccuccuccccuccuugcaccgagauuaauaaaaaaaaaaaaaaaaaaaaaaaaaaaaaaaaaaaaaaaaaaaaaaaaaaaaaaaaaaaaaaaaugcaucccccccccccccccccccccccccccccccaaaggcucuuuucagagccaccagaauu

SEQ ID NO: 21535 - RNA, 6058 nt, Artificial Sequence
  SARS-CoV-2__MT831405.1__non-structural protein 3 (NSP3) mRNA gc
aggagaaagcuuaccauggcccccaccaaggugaccuucggcgacgacacggucaucgaggugcagggguacaagagcgugaacaucaccuucgagcuggacgagcgcaucgacaagguccucaacgagaagugcuccgccuacaccguggagcugggcaccgaggugaacgaguucgcgugcgucguggccgacgccgugaucaagacgcugcagccggucagcgagcuccugaccccccuggggaucgaccucgacgagugguccauggccaccuacuaccuguucgacgagagcggcgaguucaagcuggccucccacauguacugcagcuucuacccccccgacgaggacgaggaggagggggacugcgaggaggaggaguucgagccguccacccaguacgaguacggcacggaggacgacuaccagggcaagccccucgaguucggggcgaccagcgccgcccugcagcccgaggaggagcaggaggaggacuggcuggacgacgacucccagcagaccgugggccagcaggacgggagcgaggacaaccagaccacgaccauccagaccaucguggagguccagccccagcucgagauggagcugaccccgguggugcagacgaucgaggucaacuccuucagcggcuaccugaagcucaccgacaacguguacaucaagaacgccgacaucguggaggaggcgaagaaggucaagcccaccgugguggucaacgccgccaacguguaccugaagcacgggggcggcguggccggggcccugaacaaggcgaccaacaacgccaugcaggucgaguccgacgacuacaucgccacgaacggcccccucaagguggggggcagcugcguccuguccggccacaaccuggccaagcacugccuccacgugguggggcccaacgucaacaagggcgaggacauccagcugcugaagagcgccuacgagaacuucaaccagcacgaggugcuccuggcgccgcugcucuccgccgggaucuucggcgccgaccccauccacagccugcgggugugcgucgacaccgugcgcaccaacguguaccuggccgucuucgacaagaaccucuacgacaagcugguguccagcuuccuggagaugaagagcgagaagcagguggagcagaagaucgccgagauccccaaggaggaggucaagcccuucaucaccgaguccaagccgagcguggagcagcggaagcaggacgacaagaagaucaaggcgugcguggaggaggucacgaccacccucgaggagaccaaguuccugacggagaaccugcuccuguacaucgacaucaacgggaaccugcaccccgacuccgccacccucgugagcgacaucgacaucaccuuccugaagaaggacgcccccuacaucgugggcgacgucgugcaggagggcgugcugaccgccgucgugauccccacgaagaaggccgggggcaccaccgagaugcucgcgaaggcccugcgcaaggugccgaccgacaacuacaucacgaccuaccccgggcagggccugaacggguacaccgucgaggaggccaagaccgugcucaagaagugcaaguccgccuucuacauccugcccagcaucaucuccaacgagaagcaggagauccugggcaccgugagcuggaaccuccgggagaugcuggcgcacgccgaggagacgcgcaagcugaugcccgucugcguggagaccaaggccaucguguccaccauccagcggaaguacaagggcaucaagauccaggagggggucguggacuacggcgcccgcuucuacuucuacaccagcaagacgaccguggccucccugaucaacacccucaacgaccugaacgagacccuggucacgaugccgcucggguacgugacccacggccugaaccuggaggaggcggcccgguacaugcgcagccucaaggugcccgccaccgucuccgugagcucccccgacgccgugaccgccuacaacggguaccugacgagcuccagcaagacccccgaggagcacuucaucgagaccaucucccuggcgggcagcuacaaggacuggagcuacuccggccagagcacccagcucgggaucgaguuccugaagcggggcgacaaguccgucuacuacacgagcaacccgaccaccuuccaccuggacggggaggugaucaccuucgacaaccucaagacgcugcugucccuccgcgaggugcggaccaucaaggucuucaccaccguggacaacaucaaccugcacacgcagguggucgacaugagcaugaccuacggccagcaguucggccccaccuaccuggacggggccgacgugaccaagaucaagccccacaacucccacgagggcaagacguucuacgugcucccgaacgacgacacccugcgcgucgaggccuucgaguacuaccacaccaccgaccccagcuuccuggggcgguacauguccgcccucaaccacacgaagaaguggaaguacccccaggugaacggccugaccagcaucaagugggccgacaacaacugcuaccuggcgaccgcccuccugacccugcagcagaucgagcucaaguucaaccccccggcccugcaggacgccuacuaccgcgcgcgggccggggaggccgccaacuucugcgcccugauccucgcguacugcaacaagacggugggcgagcugggcgacguccgcgagaccauguccuaccuguuccagcacgccaaccucgacagcugcaagcgggugcugaacgucgugugcaagaccugcgggcagcagcagaccacccugaagggcguggaggccgucauguacauggggacgcucuccuacgagcaguucaagaagggcgugcagauccccugcaccugcgggaagcaggccaccaaguaccuggugcagcaggagagccccuucgucaugauguccgcccccccggcgcaguacgagcugaagcacggcaccuucacgugcgccagcgaguacaccggcaacuaccagugcgggcacuacaagcacaucaccuccaaggagacccucuacugcaucgacggcgcccugcugacgaagagcagcgaguacaaggggcccaucaccgacguguucuacaaggagaacuccuacaccaccacgaucaagcccgugaccuacaagcucgacggcgucgugugcaccgagaucgaccccaagcuggacaacuacuacaagaaggacaacagcuacuucaccgagcagccgaucgaccuggugcccaaccagcccuaccccaacgccuccuucgacaacuucaaguucgucugcgacaacaucaaguucgccgacgaccucaaccagcugacgggguacaagaagccggcgagccgcgagcugaaggugaccuucuuccccgaccucaacggcgacguggucgccaucgacuacaagcacuacacccccuccuucaagaagggcgccaagcugcugcacaagcccaucguguggcacgugaacaacgccaccaacaaggcgacguacaagccgaacaccuggugcauccggugccucuggagcaccaagcccgucgagaccuccaacagcuucgacgugcugaaguccgaggacgcccaggggauggacaaccuggccugcgaggaccucaagcccgugagcgaggaggucguggagaaccccacgauccagaaggacgugcuggagugcaacgucaagaccaccgagguggugggcgacaucauccugaagccggccaacaacucccucaagaucaccgaggaggucgggcacacggaccugauggccgcguacguggacaacagcucccugaccaucaagaagcccaacgagcucagccgcgugcugggccugaagacccucgccacccacgggcuggccgccgucaacuccgugcccugggacacgaucgccaacuacgcgaagccguuccugaacaagguggucagcaccaccaccaacaucgugacgcgcugccucaaccgggugugcaccaacuacaugcccuacuucuucacccugcugcuccagcugugcaccuucacccgcuccacgaacagccggaucaaggccuccaugcccaccaccaucgccaagaacaccgucaagagcgugggcaaguucugccuggaggccagcuucaacuaccucaagucccccaacuucagcaagcugaucaacaucaucaucugguuccugcuccuguccgugugccugggcagccucaucuacuccacggccgcgcuggggguccugaugagcaaccucggcaugccguccuacugcaccggguaccgcgagggcuaccugaacagcaccaacgugaccaucgccacguacugcaccggcuccauccccugcagcgugugccuguccgggcucgacagccuggacaccuaccccucccuggagaccauccagaucacgaucagcuccuucaagugggaccucaccgccuucggccuggucgccgagugguuccuggccuacauccucuucacccgguucuucuacgugcuggggcuggcggccaucaugcagcucuucuucagcuacuucgccgugcacuucaucuccaacagcuggcugauguggcugaucaucaaccugguccagauggcccccaucuccgcgauggugcgcauguacaucuucuucgccagcuucuacuacguguggaagagcuacguccacgugguggacggcugcaacuccagcaccugcaugaugugcuacaagcggaaccgcgccacgcgggucgagugcaccaccaucgugaacgggguccgccgguccuucuacguguacgccaacggcggcaagggguucugcaagcuccacaacuggaacugcgugaacugcgacaccuucugcgccggcagcacguucaucuccgacgaggucgcgcgcgaccugagccugcaguucaagcggccgaucaaccccaccgaccaguccagcuacaucguggacuccgugaccgucaagaacgggagcauccaccucuacuucgacaaggccggccagaacaccuacgagcgccacucccugagccacuucgugaaccuggacaaccuccgggccaacaacacgaaggggucccugcccaucaacgugaucgucuucgacggcaagagcaagugcgaggaguccagcgccaaguccgccagcguguacuacucccagcugaugugccagcccauccuccugcuggaccaggcgcucgugagcgacgucggcgacagcgccgagguggccgugaagauguucgacgccuacgucaacaccuucuccagcaccuucaacgugccgauggagaagcugaagacccugguggccacggcggaggccgagcucgccaagaacgucucccuggacaacgugcugagcaccuucaucuccgccgcgcgccagggguucguggacagcgacgucgagaccaaggacgugguggagugccucaagcugucccaccagagcgacaucgaggucaccggcgacuccugcaacaacuacaugcugacguacaacaagguggagaacaugaccccccgggaccucggggccugcaucgacugcagcgcccgccacaucaacgcccagguggccaagucccacaacaucgcgcugaucuggaacgucaaggacuucaugagccuguccgagcagcuccggaagcagauccgcagcgccgccaagaagaacaaccugcccuucaagcugaccugcgccaccacgcgccagguggugaacgucgugaccaccaagaucgcccucaagggcgggugaggacuaguuauaagacugacuagcccgaugggccucccaacgggcccuccuccccuccuugcaccgagauuaauaaaaaaaaaaaaaaaaaaaaaaaaaaaaaaaaaaaaaaaaaaaaaaaaaaaaaaaaaaaaaaaaugcaucccccccccccccccccccccccccccccccaaaggcucuuuucagagccaccagaauu

SEQ ID NO: 21536 - RNA, 6058 nt, Artificial Sequence
  SARS-CoV-2__MT831416.1__non-structural protein 3 (NSP3) mRNA gc
aggagaaagcuuaccauggcccccaccaaggugaccuucggcgacgacacggucaucgaggugcagggguacaagagcgugaacaucaccuucgagcuggacgagcgcaucgacaagguccucaacgagaagugcuccgccuacaccguggagcugggcaccgaggugaacgaguucgcgugcgucguggccgacgccgugaucaagacgcugcagccggucagcgagcuccugaccccccuggggaucgaccucgacgagugguccauggccaccuacuaccuguucgacgagagcggcgaguucaagcuggccucccacauguacugcagcuucuacccccccgacgaggacgaggaggagggggacugcgaggaggaggaguucgagccguccacccaguacgaguacggcacggaggacgacuaccagggcaagccccucgaguucggggcgaccagcgccgcccugcagcccgaggaggagcaggaggaggacuggcuggacgacgacucccagcagaccgugggccagcaggacgggagcgaggacaaccagaccacgaccauccagaccaucguggagguccagccccagcucgagauggagcugaccccgguggugcagacgaucgaggucaacuccuucagcggcuaccugaagcucaccgacaacguguacaucaagaacgccgacaucguggaggaggcgaagaaggucaagcccaccgugguggucaacgccgccaacguguaccugaagcacgggggcggcguggccggggcccugaacaaggcgaccaacaacgccaugcaggucgaguccgacgacuacaucgccacgaacggcccccucaagguggggggcagcugcguccuguccggccacaaccuggccaagcacugccuccacgugguggggcccaacgucaacaagggcgaggacauccagcugcugaagagcgccuacgagaacuucaaccagcacgaggugcuccuggcgccgcugcucuccgccgggaucuucggcgccgaccccauccacagccugcgggugugcgucgacaccgugcgcaccaacguguaccuggccgucuucgacaagaaccucuacgacaagcugguguccagcuuccuggagaugaagagcgagaagcagguggagcagaagaucgccgagauccccaaggaggaggucaagcccuucaucaccgaguccaagccgagcguggagcagcggaagcaggacgacaagaagaucaaggcgugcguggaggaggucacgaccacccucgaggagaccaaguuccugacggagaaccugcuccuguacaucgacaucaacgggaaccugcaccccgacuccgccacccucgugagcgacaucgacaucaccuuccugaagaaggacgcccccuacaucgugggcgacgucgugcaggagggcgugcugaccgccgucgugauccccacgaagaaggccgggggcaccaccgagaugcucgcgaaggcccugcgcaaggugccgaccgacaacuacaucacgaccuaccccgggcagggccugaacggguacaccgucgaggaggccaagaccgugcucaagaagugcaaguccgccuucuacauccugcccagcaucaucuccaacgagaagcaggagauccugggcaccgugagcuggaaccuccgggagaugcuggcgcacgccgaggagacgcgcaagcugaugcccgucugcguggagaccaaggccaucguguccaccauccagcggaaguacaagggcaucaagauccaggagggggucguggacuacggcgcccgcuucuacuucuacaccagcaagacgaccguggccucccugaucaacacccucaacgaccugaacgagacccuggucacgaugccgcucggguacgugacccacggccugaaccuggaggaggcggcccgguacaugcgcagccucaaggugcccgccaccgucuccgugagcucccccgacgccgugaccgccuacaacggguaccugacgagcuccagcaagacccccgaggagcacuucaucgagaccaucucccuggcgggcagcuacaaggacuggagcuacuccggccagagcacccagcucgggaucgaguuccugaagcggggcgacaaguccgucuacuacacgagcaacccgaccaccuuccaccuggacggggaggugaucaccuucgacaaccucaagacgcugcugucccuccgcgaggugcggaccaucaaggucuucaccaccguggacaacaucaaccugcacacgcagguggucgacaugagcaugaccuacggccagcaguucggccccaccuaccuggacggggccgacgugaccaagaucaagccccacaacucccacgagggcaagacguucuacgugcucccgaacgacgacacccugcgcgucgaggccuucgaguacuaccacaccaccgaccccagcuuccuggggcgguacauguccgcccucaaccacacgaagaaguggaaguacccccaggugaacggccugaccagcaucaagugggccgacaacaacugcuaccuggcgaccgcccuccugacccugcagcagaucgagcucaaguucaaccccccggcccugcaggacgccuacuaccgcgcgcgggccggggaggccgccaacuucugcgcccugauccucgcguacugcaacaagacggugggcgagcugggcgacguccgcgagaccauguccuaccuguuccagcacgccaaccucgacagcugcaagcgggugcugaacgucgugugcaagaccugcgggcagcagcagaccacccugaagggcguggaggccgucauguacauggggacgcucuccuacgagcaguucaagaagggcgugcagauccccugcaccugcgggaagcaggccaccaaguaccuggugcagcaggagagccccuucgucaugauguccgcccccccggcgcaguacgagcugaagcacggcaccuucacgugcgccagcgaguacaccggcaacuaccagugcgggcacuacaagcacaucaccuccaaggagacccucuacugcaucgacggcgcccugcugacgaagagcagcgaguacaaggggcccaucaccgacguguucuacaaggagaacuccuacaccaccacgaucaagcccgugaccuacaagcucgacggcgucgugugcaccgagaucgaccccaagcuggacaacuacuacaagaaggacaacagcuacuucaccgagcagccgaucgaccuggugcccaaccagcccuaccccaacgccuccuucgacaacuucaaguucgucugcgacaacaucaaguucgccgacgaccucaaccagcugacgggguacaagaagccggcgagccgcgagcugaaggugaccuucuuccccgaccucaacggcgacguggucgccaucgacuacaagcacuacacccccuccuucaagaagggcgccaagcugcugcacaagcccaucguguggcacgugaacaacgccaccaacaaggcgacguacaagccgaacaccuggugcauccggugccucuggagcaccaagcccgucgagaccuccaacagcuucgacgugcugaaguccgaggacgcccaggggauggacaaccuggccugcgaggaccucaagcccgugagcgaggaggucguggagaaccccacgauccagaaggacgugcuggagugcaacgucaagaccaccgagguggugggcgacaucauccugaagccggccaacaacucccucaagaucaccgaggaggucgggcacacggaccugauggccgcguacguggacaacagcucccugaccaucaagaagcccaacgagcucagccgcgugcugggccugaagacccucgccacccacgggcuggccgccgucaacuccgugcccugggacacgaucgccaacuacgcgaagccguuccugaacaagguggucagcaccaccaccaacaucgugacgcgcugccucaaccgggugugcaccaacuacaugcccuacuucuucacccugcugcuccagcugugcaccuucacccgcuccacgaacagccggaucaaggccuccaugcccaccaccaucgccaagaacaccgucaagagcgugggcaaguucugccuggaggccagcuucaacuaccucaagucccccaacuucagcaagcugaucaacaucaucaucugguuccugcuccuguccgugugccugggcagccucaucuacuccacggccgcgcuggggguccugaugagcaaccucggcaugccguccuacugcaccggguaccgcgagggcuaccugaacagcaccaacgugaccaucgccacguacugcaccggcuccauccccugcagcgugugccuguccgggcucgacagccuggacaccuaccccucccuggagaccauccagaucacgaucagcuccuucaagugggaccucaccgccuucggccuggucgccgagugguuccuggccuacauccucuucacccgguucuucuacgugcuggggcuggcggccaucaugcagcucuucuucagcuacuucgccgugcacuucaucuccaacagcuggcugauguggcugaucaucaaccugguccagauggcccccaucuccgcgauggugcgcauguacaucuucuucgccagcuucuacuacguguggaagagcuacguccacgugguggacggcugcaacuccagcaccugcaugaugugcuacaagcggaaccgcgccacgcgggucgagugcaccaccaucgugaacgggguccgccgguccuucuacguguacgccaacggcggcaagggguucugcaagcuccacaacuggaacugcgugaacugcgacaccuucugcgccggcagcacguucaucuccgacgaggucgcgcgcgaccugagccugcaguucaagcggccgaucaaccccaccgaccaguccagcuacaucguggacuccgugaccgucaagaacgggagcauccaccucuacuucgacaaggccggccagaagaccuacgagcgccacucccugagccacuucgugaaccuggacaaccuccgggccaacaacacgaaggggucccugcccaucagcgugaucgucuucgacggcaaguccaagugcgaggagagcuccgccaagagcgccuccguguacuacagccagcugaugugccagcccauccuccugcuggaccaggcgcucgugagcgacgucggcgacuccgccgagguggccgugaagauguucgacgccuacgucaacaccuucagcuccaccuucaacgugccgauggagaagcugaagacccugguggccacggcggaggccgagcucgccaagaacgucagccuggacaacgugcuguccaccuucaucagcgccgcgcgccagggguucguggacuccgacgucgagaccaaggacgugguggagugccucaagcugagccaccaguccgacaucgaggucaccggcgacagcugcaacaacuacaugcugacguacaacaagguggagaacaugaccccccgggaccucggggccugcaucgacugcuccgcccgccacaucaacgcccagguggccaagagccacaacaucgcgcugaucuggaacgucaaggacuucaugucccugagcgagcagcuccggaagcagauccgcuccgccgccaagaagaacaaccugcccuucaagcugaccugcgccaccacgcgccagguggugaacgucgugaccaccaagaucgcccucaagggcgggugaggacuaguuauaagacugacuagcccgaugggccucccaacgggcccuccuccccuccuugcaccgagauuaauaaaaaaaaaaaaaaaaaaaaaaaaaaaaaaaaaaaaaaaaaaaaaaaaaaaaaaaaaaaaaaaaugcaucccccccccccccccccccccccccccccccaaaggcucuuuucagagccaccagaauu

SEQ ID NO: 21537 - RNA, 6058 nt, Artificial Sequence
  SARS-CoV-2__MT831444.1__non-structural protein 3 (NSP3) mRNA gc
aggagaaagcuuaccauggcccccaccaaggugaccuucggcgacgacacggucaucgaggugcagggguacaagagcgugaacaucaccuucgagcuggacgagcgcaucgacaagguccucaacgagaagugcuccgccuacaccguggagcugggcaccgaggugaacgaguucgcgugcgucguggccgacgccgugaucaagacgcugcagccggucagcgagcuccugaccccccuggggaucgaccucgacgagugguccauggccaccuacuaccuguucgacgagagcggcgaguucaagcuggccucccacauguacugcagcuucuacccccccgacgaggacgaggaggagggggacugcgaggaggaggaguucgagccguccacccaguacgaguacggcacggaggacgacuaccagggcaagccccucgaguucggggcgaccagcgccgcccugcagcccgaggaggagcaggaggaggacuggcuggacgacgacucccagcagaccgugggccagcaggacgggagcgaggacaaccagaccacgaccauccagaccaucguggagguccagccccagcucgagauggagcugaccccgguggugcagacgaucgaggucaacuccuucagcggcuaccugaagcucaccaacaacguguacaucaagaacgccgacaucguggaggaggcgaagaaggucaagcccaccgugguggucaacgccgccaacguguaccugaagcacgggggcggcguggccggggcccugaacaaggcgaccaacaacgccaugcaggucgaguccgacgacuacaucgccacgaacggcccccucaagguggggggcagcugcguccuguccggccacaaccuggccaagcacugccuccacgugguggggcccaacgucaacaagggcgaggacauccagcugcugaagagcgccuacgagaacuucaaccagcacgaggugcuccuggcgccgcugcucuccgccgggaucuucggcgccgaccccauccacagccugcgggugugcgucgacaccgugcgcaccaacguguaccuggccgucuucgacaagaaccucuacgacaagcugguguccagcuuccuggagaugaagagcgagaagcagguggagcagaagaucgccgagauccccaaggaggaggucaagcccuucaucaccgaguccaagccgagcguggagcagcggaagcaggacgacaagaagaucaaggcgugcguggaggaggucacgaccacccucgaggagaccaaguuccugacggagaaccugcuccuguacaucgacaucaacgggaaccugcaccccgacuccgccacccucgugagcgacaucgacaucaccuuccugaagaaggacgcccccuacaucgugggcgacgucgugcaggagggcgugcugaccgccgucgugauccccacgaagaaggccgggggcaccaccgagaugcucgcgaaggcccugcgcaaggugccgaccgacaacuacaucacgaccuaccccgggcagggccugaacggguacaccgucgaggaggccaagaccgugcucaagaagugcaaguccgccuucuacauccugcccagcaucaucuccaacgagaagcaggagauccugggcaccgugagcuggaaccuccgggagaugcuggcgcacgccgaggagacgcgcaagcugaugcccgucugcguggagaccaaggccaucguguccaccauccagcggaaguacaagggcaucaagauccaggagggggucguggacuacggcgcccgcuucuacuucuacaccagcaagacgaccguggccucccugaucaacacccucaacgaccugaacgagacccuggucacgaugccgcucggguacgugacccacggccugaaccuggaggaggcggcccgguacaugcgcagccucaaggugcccgccaccgucuccgugagcucccccgacgccgugaccgccuacaacggguaccugacgagcuccagcaagacccccgaggagcacuucaucgagaccaucucccuggcgggcagcuacaaggacuggagcuacuccggccagagcacccagcucgggaucgaguuccugaagcggggcgacaaguccgucuacuacacgagcaacccgaccaccuuccaccuggacggggaggugaucaccuucgacaaccucaagacgcugcugucccuccgcgaggugcggaccaucaaggucuucaccaccguggacaacaucaaccugcacacgcagguggucgacaugagcaugaccuacggccagcaguucggccccaccuaccuggacggggccgacgugaccaagaucaagccccacaacucccacgagggcaagacguucuacgugcucccgaacgacgacacccugcgcgucgaggccuucgaguacuaccacaccaccgaccccagcuuccuggggcgguacauguccgcccucaaccacacgaagaaguggaaguacccccaggugaacggccugaccagcaucaagugggccgacaacaacugcuaccuggcgaccgcccuccugacccugcagcagaucgagcucaaguucaaccccccggcccugcaggacgccuacuaccgcgcgcgggccggggaggccgccaacuucugcgcccugauccucgcguacugcaacaagacggugggcgagcugggcgacguccgcgagaccauguccuaccuguuccagcacgccaaccucgacagcugcaagcgggugcugaacgucgugugcaagaccugcgggcagcagcagaccacccugaagggcguggaggccgucauguacauggggacgcucuccuacgagcaguucaagaagggcgugcagauccccugcaccugcgggaagcaggccaccaaguaccuggugcagcaggagagccccuucgucaugauguccgcccccccggcgcaguacgagcugaagcacggcaccuucacgugcgccagcgaguacaccggcaacuaccagugcgggcacuacaagcacaucaccuccaaggagacccucuacugcaucgacggcgcccugcugacgaagagcagcgaguacaaggggcccaucaccgacguguucuacaaggagaacuccuacaccaccacgaucaagcccgugaccuacaagcucgacggcgucgugugcaccgagaucgaccccaagcuggacaacuacuacaagaaggacaacagcuacuucaccgagcagccgaucgaccuggugcccaaccagcccuaccccaacgccuccuucgacaacuucaaguucgucugcgacaacaucaaguucgccgacgaccucaaccagcugacgggguacaagaagccggcgagccgcgagcugaaggugaccuucuuccccgaccucaacggcgacguggucgccaucgacuacaagcacuacacccccuccuucaagaagggcgccaagcugcugcacaagcccaucguguggcacgugaacaacgccaccaacaaggcgacguacaagccgaacaccuggugcauccggugccucuggagcaccaagcccgucgagaccuccaacagcuucgacgugcugaaguccgaggacgcccaggggauggacaaccuggccugcgaggaccucaagcccgugagcgaggaggucguggagaaccccacgauccagaaggacgugcuggagugcaacgucaagaccaccgagguggugggcgacaucauccugaagccggccaacaacucccucaagaucaccgaggaggucgggcacacggaccugauggccgcguacguggacaacagcucccugaccaucaagaagcccaacgagcucagccgcgugcugggccugaagacccucgccacccacgggcuggccgccgucaacuccgugcccugggacacgaucgccaacuacgcgaagccguuccugaacaagguggucagcaccaccaccaacaucgugacgcgcugccucaaccgggugugcaccaacuacaugcccuacuucuucacccugcugcuccagcugugcaccuucacccgcuccacgaacagccggaucaaggccuccaugcccaccaccaucgccaagaacaccgucaagagcgugggcaaguucugccuggaggccagcuucaacuaccucaagucccccaacuucagcaagcugaucaacaucaucaucugguuccugcuccuguccgugugccugggcagccucaucuacuccacggccgcgcuggggguccugaugagcaaccucggcaugccguccuacugcaccggguaccgcgagggcuaccugaacagcaccaacgugaccaucgccacguacugcaccggcuccauccccugcagcgugugccuguccgggcucgacagccuggacaccuaccccucccuggagaccauccagaucacgaucagcuccuucaagugggaccucaccgccuucggccuggucgccgagugguuccuggccuacauccucuucacccgguucuucuacgugcuggggcuggcggccaucaugcagcucuucuucagcuacuucgccgugcacuucaucuccaacagcuggcugauguggcugaucaucaaccugguccagauggcccccaucuccgcgauggugcgcauguacaucuucuucgccagcuucuacuacguguggaagagcuacguccacgugguggacggcugcaacuccagcaccugcaugaugugcuacaagcggaaccgcgccacgcgggucgagugcaccaccaucgugaacgggguccgccgguccuucuacguguacgccaacggcggcaagggguucugcaagcuccacaacuggaacugcgugaacugcgacaccuucugcgccggcagcacguucaucuccgacgaggucgcgcgcgaccugagccugcaguucaagcggccgaucaaccccaccgaccaguccagcuacaucguggacuccgugaccgucaagaacgggagcauccaccucuacuucgacaaggccggccagaagaccuacgagcgccacucccugagccacuucgugaaccuggacaaccuccgggccaacaacacgaaggggucccugcccaucaacgugaucgucuucgacggcaagagcaagugcgaggaguccagcgccaaguccgccagcguguacuacucccagcugaugugccagcccauccuccugcuggaccaggcgcucgugagcgacgucggcgacagcgccgagguggccgugaagauguucgacgccuacgucaacaccuucuccagcaccuucaacgugccgauggagaagcugaagacccugguggccacggcggaggccgagcucgccaagaacgucucccuggacaacgugcugagcaccuucaucuccgccgcgcgccagggguucguggacagcgacgucgagaccaaggacgugguggagugccucaagcugucccaccagagcgacaucgaggucaccggcgacuccugcaacaacuacaugcugacguacaacaagguggagaacaugaccccccgggaccucggggccugcaucgacugcagcgcccgccacaucaacgcccagguggccaagucccacaacaucgcgcugaucuggaacgucaaggacuucaugagccuguccgagcagcuccggaagcagauccgcagcgccgccaagaagaacaaccugcccuucaagcugaccugcgccaccacgcgccagguggugaacgucgugaccaccaagaucgcccucaagggcgggugaggacuaguuauaagacugacuagcccgaugggccucccaacgggcccuccuccccuccuugcaccgagauuaauaaaaaaaaaaaaaaaaaaaaaaaaaaaaaaaaaaaaaaaaaaaaaaaaaaaaaaaaaaaaaaaaugcaucccccccccccccccccccccccccccccccaaaggcucuuuucagagccaccagaauu

SEQ ID NO: 21538 - RNA, 6058 nt, Artificial Sequence
  SARS-CoV-2__MT831463.1__non-structural protein 3 (NSP3) mRNA gc
aggagaaagcuuaccauggcccccaccaaggugaccuucggcgacgacacggucaucgaggugcagggguacaagagcgugaacaucaccuucgagcuggacgagcgcaucgacaagguccucaacgagaagugcuccgccuacaccguggagcugggcaccgaggugaacgaguucgcgugcgucguggccgacgccgugaucaagacgcugcagccggucagcgagcuccugaccccccuggggaucgaccucgacgagugguccauggccaccuacuaccuguucgacgagagcggcgaguucaagcuggccucccacauguacugcagcuucuacccccccgacgaggacgaggaggagggggacugcgaggaggaggaguucgagccguccacccaguacgaguacggcacggaggacgacuaccagggcaagccccucgaguucggggcgaccagcgccgcccugcagcccgaggaggagcaggaggaggacuggcuggacgacgacucccagcagaccgugggccagcaggacgggagcgaggacaaccagaccacgaccauccagaccaucguggagguccagccccagcucgagauggagcugaccccgguggugcagacgaucgaggucaacuccuucagcggcuaccugaagcucaccgacaacguguacaucaagaacgccgacaucguggaggaggcgaagaaggucaagcccaccgugguggucaacgccgccaacguguaccugaagcacgggggcggcguggccggggcccugaacaaggcgaccaacaacgccaugcaggucgaguccgacgacuacaucgccacgaacggcccccucaagguggggggcagcugcguccuguccggccacaaccuggccaagcacugccuccacgugguggggcccaacgucaacaagggcgaggacauccagcugcugaagagcgccuacgagaacuucaaccagcacgaggugcuccuggcgccgcugcucuccgccgggaucuucggcgccgaccccauccacagccugcgggugugcgucgacaccgugcgcaccaacguguaccuggccgucuucgacaagaaccucuacgacaagcugguguccagcuuccuggagaugaagagcgagaagcagguggagcagaagaucgccgagauccccaaggaggaggucaagcccuucaucaccgaguccaagccgagcguggagcagcggaagcaggacgacaagaagaucaaggcgugcguggaggaggucacgaccacccucgaggagaccaaguuccugacggagaaccugcuccuguacaucgacaucaacgggaaccugcaccccgacuccgccacccucgugagcgacaucgacaucaccuuccugaagaaggacgcccccuacaucgugggcgacgucgugcaggagggcgugcugaccgccgucgugauccccacgaagaaggccgggggcaccaccgagaugcucgcgaaggcccugcgcaaggugccgaccgacaacuacaucacgaccuaccccgggcagggccugaacggguacaccgucgaggaggccaagaccgugcucaagaagugcaaguccgccuucuacauccugcccagcaucaucuccaacgagaagcaggagauccugggcaccgugagcuggaaccuccgggagaugcuggcgcacgccgaggagacgcgcaagcugaugcccgucugcguggagaccaaggccaucguguccaccauccagcggaaguacaagggcaucaagauccaggagggggucguggacuacggcgcccgcuucuacuucuacaccagcaagacgaccguggccucccugaucaacacccucaacgaccugaacgagacccuggucacgaugccgcucggguacgugacccacggccugaaccuggaggaggcggcccgguacaugcgcagccucaaggugcccgccaccgucuccgugagcucccccgacgccgugaccgccuacaacggguaccugacgagcuccagcaagacccccgaggagcacuucaucgagaccaucucccuggcgggcagcuacaaggacuggagcuacuccggccagagcacccagcucgggaucgaguuccugaagcggggcgacaaguccgucuacuacacgagcaacccgaccaccuuccaccuggacggggaggugaucaccuucgacaaccucaagacgcugcugucccuccgcgaggugcggaccaucaaggucuucaccaccguggacaacaucaaccugcacacgcagguggucgacaugagcaugaccuacggccagcaguucggccccaccuaccuggacggggccgacgugaccaagaucaagccccacaacucccacgagggcaagacguucuacgugcucccgaacgacgacacccugcgcgucgaggccuucgaguacuaccacaccaccgaccccagcuuccuggggcgguacauguccgcccucaaccacacgaagaaguggaaguacccccaggugaacggccugaccagcaucaagugggccgacaacaacugcuaccuggcgaccgcccuccugacccugcagcagaucgagcucaaguucaaccccccggcccugcaggacgccuacuaccgcgcgcgggccggggaggccgccaacuucugcgcccugauccucgcguacugcaacaagacggugggcgagcugggcgacguccgcgagaccauguccuaccuguuccagcacgccaaccucgacagcugcaagcgggugcugaacgucgugugcaagaccugcgggcagcagcagaccacccugaagggcguggaggccgucauguacauggggacgcucuccuacgagcaguucaagaagggcgugcagauccccugcaccugcgggaagcaggccaccaaguaccuggugcagcaggagagccccuucgucaugauguccgcccccccggcgcaguacgagcugaagcacggcaccuucacgugcgccagcgaguacaccggcaacuaccagugcgggcacuacaagcacaucaccuccaaggagacccucuacugcaucgacggcgcccugcugacgaagagcagcgaguacaaggggcccaucaccgacguguucuacaaggagaacuccuacaccaccacgaucaagcccgugaccuacaagcucgacggcgucgugugcaccgagaucgaccccaagcuggacaacuacuacaagaaggacaacagcuacuucaccgagcagccgaucgaccuggugcccaaccagcccuaccccaacgccuccuucgacaacuucaaguucgucugcgacaacaucaaguucgccgacgaccucaaccagcugacgggguacaagaagccggcgagccgcgagcugaaggugaccuucuuccccgaccucaacggcgacguggucgccaucgacuacaagcacuacacccccuccuucaagaagggcgccaagcugcugcacaagcccaucguguggcacgugaacaacgccaccaacaaggcgacguacaagccgaacaucuggugcauccggugccucuggagcaccaagcccgucgagaccuccaacagcuucgacgugcugaaguccgaggacgcccaggggauggacaaccuggccugcgaggaccucaagcccgugagcgaggaggucguggagaaccccaccauccagaaggacgugcuggagugcaacgucaagacgaccgagguggugggcgacaucauccugaagccggccaacaacucccucaagaucaccgaggaggucgggcacaccgaccugauggccgcguacguggacaacagcucccugacgaucaagaagcccaacgagcucagccgcgugcugggccugaagacccucgccacccacgggcuggccgccgucaacuccgugcccugggacaccaucgccaacuacgcgaagccguuccugaacaagguggucagcacgaccaccaacaucgugacccgcugccucaaccgggugugcacgaacuacaugcccuacuucuucacccugcugcuccagcugugcaccuucacccgcuccaccaacagccggaucaaggccuccaugcccacgaccaucgccaagaacaccgucaagagcgugggcaaguucugccuggaggccagcuucaacuaccucaagucccccaacuucagcaagcugaucaacaucaucaucugguuccugcuccuguccgugugccugggcagccucaucuacuccaccgccgcgcuggggguccugaugagcaaccucggcaugccguccuacugcacgggguaccgcgagggcuaccugaacagcaccaacgugaccaucgccaccuacugcacgggcuccauccccugcagcgugugccuguccgggcucgacagccuggacaccuaccccucccuggagaccauccagaucaccaucagcuccuucaagugggaccucacggccuucggccuggucgccgagugguuccuggccuacauccucuucacccgguucuucuacgugcuggggcuggcggccaucaugcagcucuucuucagcuacuucgccgugcacuucaucuccaacagcuggcugauguggcugaucaucaaccugguccagauggcccccaucuccgcgauggugcgcauguacaucuucuucgccagcuucuacuacguguggaagagcuacguccacgugguggacggcugcaacuccagcaccugcaugaugugcuacaagcggaaccgcgccacccgggucgagugcacgaccaucgugaacgggguccgccgguccuucuacguguacgccaacggcggcaagggguucugcaagcuccacaacuggaacugcgugaacugcgacaccuucugcgccggcagcaccuucaucuccgacgaggucgcgcgcgaccugagccugcaguucaagcggccgaucaaccccacggaccaguccagcuacaucguggacuccgugaccgucaagaacgggagcauccaccucuacuucgacaaggccggccagaagaccuacgagcgccacucccugagccacuucgugaaccuggacaaccuccgggccaacaacaccaaggggucccugcccaucaacgugaucgucuucgacggcaagagcaagugcgaggaguccagcgccaaguccgccagcguguacuacucccagcugaugugccagcccauccuccugcuggaccaggcgcucgugagcgacgucggcgacagcgccgagguggccgugaagauguucgacgccuacgucaacacguucuccagcaccuucaacgugccgauggagaagcugaagacccugguggccaccgcggaggccgagcucgccaagaacgucucccuggacaacgugcugagcacguucaucuccgccgcgcgccagggguucguggacagcgacgucgagaccaaggacgugguggagugccucaagcugucccaccagagcgacaucgaggucaccggcgacuccugcaacaacuacaugcugaccuacaacaagguggagaacaugacgccccgggaccucggggccugcaucgacugcagcgcccgccacaucaacgcccagguggccaagucccacaacaucgcgcugaucuggaacgucaaggacuucaugagccuguccgagcagcuccggaagcagauccgcagcgccgccaagaagaacaaccugcccuucaagcugaccugcgccaccacccgccagguggugaacgucgugacgaccaagaucgcccucaagggcgggugaggacuaguuauaagacugacuagcccgaugggccucccaacgggcccuccuccccuccuugcaccgagauuaauaaaaaaaaaaaaaaaaaaaaaaaaaaaaaaaaaaaaaaaaaaaaaaaaaaaaaaaaaaaaaaaaugcaucccccccccccccccccccccccccccccccaaaggcucuuuucagagccaccagaauu

SEQ ID NO: 21539 - RNA, 6058 nt, Artificial Sequence
  SARS-CoV-2__MT831464.1__non-structural protein 3 (NSP3) mRNA gc
aggagaaagcuuaccauggcccccaccaaggugaccuucggcgacgacacggucaucgaggugcagggguacaagagcgugaacaucaccuucgagcuggacgagcgcaucgacaagguccucaacgagaagugcuccgccuacaccguggagcugggcaccgaggugaacgaguucgcgugcgucguggccgacgccgugaucaagacgcugcagccggucagcgagcuccugaccccccuggggaucgaccucgacgagugguccauggccaccuacuaccuguucgacgagagcggcgaguucaagcuggccucccacauguacugcagcuucuacccccccgacgaggacgaggaggagggggacugcgaggaggaggaguucgagccguccacccaguacgaguacggcacggaggacgacuaccagggcaagccccucgaguucggggcgaccagcgccgcccugcagcccgaggaggagcaggaggaggacuggcuggacgacgacucccagcagaccgugggccagcaggacgggagcgaggacaaccagaccacgaccauccagaccaucguggagguccagccccagcucgagauggagcugaccccgguggugcagacgaucgaggucaacuccuucagcggcuaccugaagcucaccgacaacguguacaucaagaacgccgacaucguggaggaggcgaagaaggucaagcccaccgugguggucaacgccgccaacguguaccugaagcacgggggcggcguggccggggcccugaacaaggcgaccaacaacgccaugcaggucgaguccgacgacuacaucgccacgaacggcccccucaagguggggggcagcugcguccuguccggccacaaccuggccaagcacugccuccacgugguggggcccaacgucaacaagggcgaggacauccagcugcugaagagcgccuacgagaacuucaaccagcacgaggugcuccuggcgccgcugcucuccgccgggaucuucggcgccgaccccauccacagccugcgggugugcgucgacaccgugcgcaccaacguguaccuggccgucuucgacaagaaccucuacgacaagcugguguccagcuuccuggagaugaagagcgagaagcagguggagcagaagaucgccgagauccccaaggaggaggucaagcccuucaucaccgaguccaagccgagcguggagcagcggaagcaggacgacaagaagaucaaggcgugcguggaggaggucacgaccacccucgaggagaccaaguuccugacggagaaccugcuccuguacaucgacaucaacgggaaccugcaccccgacuccgccacccucgugagcgacaucgacaucaccuuccugaagaaggacgcccccuacaucgugggcgacgucgugcaggagggcgugcugaccgccgucgugauccccacgaagaaggccgggggcaccaccgagaugcucgcgaaggcccugcgcaaggugccgaccgacaacuacaucacgaccuaccccgggcagggccugaacggguacaccgucgaggaggccaagaccgugcucaagaagugcaaguccgccuucuacauccugcccagcaucaucuccaacgagaagcaggagauccugggcaccgugagcuggaaccuccgggagaugcuggcgcacgccgaggagacgcgcaagcugaugcccgucugcguggagaccaaggccaucguguccaccauccagcggaaguacaagggcaucaagauccaggagggggucguggacuacggcgcccgcuucuacuucuacaccagcaagacgaccguggccucccugaucaacacccucaacgaccugaacgagacccuggucacgaugccgcucggguacgugacccacggccugaaccuggaggaggcggcccgguacaugcgcagccucaaggugcccgccaccgucuccgugagcucccccgacgccgugaccgccuacaacggguaccugacgagcuccagcaagacccccgaggagcacuucaucgagaccaucucccuggcgggcagcuacaaggacuggagcuacuccggccagagcacccagcucgggaucgaguuccugaagcggggcgacaaguccgucuacuacacgagcaacccgaccaccuuccaccuggacggggaggugaucaccuucgacaaccucaagacgcugcugucccuccgcgaggugcggaccaucaaggucuucaccaccguggacaacaucaaccugcacacgcagguggucgacaugagcaugaccuacggccagcaguucggccccaccuaccuggacggggccgacgugaccaagaucaagccccacaacucccacgagggcaagacguucuacgugcucccgaacgacgacacccugcgcgucgaggccuucgaguacuaccacaccaccgaccccagcuuccuggggcgguacauguccgcccucaaccacacgaagaaguggaaguacccccaggugaacggccugaccagcaucaagugggccgacaacaacugcuaccuggcgaccgcccuccugacccugcagcagaucgagcucaaguucaaccccccggcccugcaggacgccuacuaccgcgcgcgggccggggaggccgccaacuucugcgcccugauccucgcguacugcaacaagacggugggcgagcugggcgacguccgcgagaccauguccuaccuguuccagcacgccaaccucgacagcugcaagcgggugcugaacgucgugugcaagaccugcgggcagcagcagaccacccugaagggcguggaggccgucauguacauggggacgcucuccuacgagcaguucaagaagggcgugcagauccccugcaccugcgggaagcaggccaccaaguaccuggugcagcaggagagccccuucgucaugauguccgcccccccggcgcaguacgagcugaagcacggcaccuucacgugcgccagcgaguacaccggcaacuaccagugcgggcacuacaagcacaucaccuccaaggagacccucuacugcaucgacggcgcccugcugacgaagagcagcgaguacaaggggcccaucaccgacguguucuacaaggagaacuccuacaccaccacgaucaagcccgugaccuacaagcucgacggcgucgugugcaccgagaucgaccccaagcuggacaacuacuacaagaaggacaacagcuacuucaccgagcagccgaucgaccuggugcccaaccagcccuaccccaacgccuccuucgacaacuucaaguucgucugcgacaacaucaaguucgccgacgaccucaaccagcugacgggguacaagaagccggcgagccgcgagcugaaggugaccuucuuccccgaccucaacggcgacguggucgccaucgacuacaagcacuacacccccuccuucaagaagggcgccaagcugcugcacaagcccaucguguggcacgugaacaacgccaccaacaaggcgacguacaagccgaacaccuggugcauccggugccucuggagcaccaagcccgucgagaccuccaacagcuucgacgugcugaaguccgaggacgcccaggggauggacaaccuggccugcgaggaccucaagcccgugagcgaggaggucguggagaaccccacgauccagaaggacgugcuggagugcaacgucaagaccaccgagguggugggcgacaucauccugaagccggccaacaacucccucaagaucaccgaggaggucgggcacacggaccugauggccgcguacguggacaacagcucccugaccaucaagaagcccaacgagcucagccgcgugcugggccugaagacccucgccacccacgggcuggccgccgucaacuccgugcccugggacacgaucgccaacuacgcgaagccguuccugaacaagguggucagcaccaccaccaacaucgugacgcgcugccucaaccgggugugcaccaacuacaugcccuacuucuucacccugcugcuccagcugugcaccuucacccgcuccacgaacagccggaucaaggccuccaugcccaccaccaucgccaagaacaccgucaagagcgugggcaaguucugccuggaggccagcuucaacuaccucaagucccccaacuucagcaagcugaucaacaucaucaucugguuccugcuccuguccgugugccugggcagccucaucuacuccacggccgcgcuggggguccugaugagcaaccucggcaugccguccuacugcaccggguaccgcgagggcuaccugaacagcaccaacgugaccaucgccacguacugcaccggcuccauccccugcagcgugugccuguccgggcucgacagccuggacaccuaccccucccuggagaccauccagaucacgaucagcuccuucaagcgggaccucaccgccuucggccuggucgccgagugguuccuggccuacauccucuucacccgcuucuucuacgugcuggggcuggcggccaucaugcagcucuucuucagcuacuucgccgugcacuucaucuccaacagcuggcugauguggcugaucaucaaccugguccagauggcccccaucuccgcgauggugcggauguacaucuucuucgccagcuucuacuacguguggaagagcuacguccacgugguggacggcugcaacuccagcaccugcaugaugugcuacaagcgcaaccgggccacgcgcgucgagugcaccaccaucgugaacgggguccggcgcuccuucuacguguacgccaacggcggcaagggguucugcaagcuccacaacuggaacugcgugaacugcgacaccuucugcgccggcagcacguucaucuccgacgaggucgcgcgggaccugagccugcaguucaagcgcccgaucaaccccaccgaccaguccagcuacaucguggacuccgugaccgucaagaacgggagcauccaccucuacuucgacaaggccggccagaagaccuacgagcggcacucccugagccacuucgugaaccuggacaaccuccgcgccaacaacacgaaggggucccugcccaucaacgugaucgucuucgacggcaagagcaagugcgaggaguccagcgccaaguccgccagcguguacuacucccagcugaugugccagcccauccuccugcuggaccaggcgcucgugagcgacgucggcgacagcgccgagguggccgugaagauguucgacgccuacgucaacaccuucuccagcaccuucaacgugccgauggagaagcugaagacccugguggccacggcggaggccgagcucgccaagaacgucucccuggacaacgugcugagcaccuucaucuccgccgcgcggcagggguucguggacagcgacgucgagaccaaggacgugguggagugccucaagcugucccaccagagcgacaucgaggucaccggcgacuccugcaacaacuacaugcugacguacaacaagguggagaacaugaccccccgcgaccucggggccugcaucgacugcagcgcccggcacaucaacgcccagguggccaagucccacaacaucgcgcugaucuggaacgucaaggacuucaugagccuguccgagcagcuccgcaagcagauccgcagcgccgccaagaagaacaaccugcccuucaagcugaccugcgccaccacgcggcagguggugaacgucgugaccaccaagaucgcccucaagggcgggugaggacuaguuauaagacugacuagcccgaugggccucccaacgggcccuccuccccuccuugcaccgagauuaauaaaaaaaaaaaaaaaaaaaaaaaaaaaaaaaaaaaaaaaaaaaaaaaaaaaaaaaaaaaaaaaaugcaucccccccccccccccccccccccccccccccaaaggcucuuuucagagccaccagaauu

SEQ ID NO: 21540 - RNA, 6058 nt, Artificial Sequence
  SARS-CoV-2__MT831471.1__non-structural protein 3 (NSP3) mRNA gc
aggagaaagcuuaccauggcccccaccaaggugaccuucggcgacgacacggucaucgaggugcagggguacaagagcgugaacaucaccuucgagcuggacgagcgcaucgacaagguccucaacgagaagugcuccgccuacaccguggagcugggcaccgaggugaacgaguucgcgugcgucguggccgacgccgugaucaagacgcugcagccggucagcgagcuccugaccccccuggggaucgaccucgacgagugguccauggccaccuacuaccuguucgacgagagcggcgaguucaagcuggccucccacauguacugcagcuucuacccccccgacgaggacgaggaggagggggacugcgaggaggaggaguucgagccguccacccaguacgaguacggcacggaggacgacuaccagggcaagccccucgaguucggggcgaccagcgccgcccugcagcccgaggaggagcaggaggaggacuggcuggacgacgacucccagcagaccgugggccagcaggacgggagcgaggacaaccagaccacgaccauccagaccaucguggagguccagccccagcucgagauggagaucaccccgguggugcagacgaucgaggucaacuccuucagcggcuaccugaagcugaccgacaacguguacaucaagaacgccgacaucguggaggaggcgaagaaggucaagcccaccgugguggucaacgccgccaacguguaccucaagcacgggggcggcguggccggggcccugaacaaggcgaccaacaacgccaugcaggucgaguccgacgacuacaucgccacgaacggcccccugaagguggggggcagcugcguccucuccggccacaaccuggccaagcacugccugcacgugguggggcccaacgucaacaagggcgaggacauccagcuccugaagagcgccuacgagaacuucaaccagcacgaggugcugcucgcgccgcugcuguccgccgggaucuucggcgccgaccccauccacagccuccgggugugcgucgacaccgugcgcaccaacguguaccuggccgucuucgacaagaaccuguacgacaagcucguguccagcuuccuggagaugaagagcgagaagcagguggagcagaagaucgccgagauccccaaggaggaggucaagcccuucaucaccgaguccaagccgagcguggagcagcggaagcaggacgacaagaagaucaaggcgugcguggaggaggucacgaccacccuggaggagaccaaguuccucacggagaaccugcugcucuacaucgacaucaacgggaaccugcaccccgacuccgccacccuggugagcgacaucgacaucaccuuccucaagaaggacgcccccuacaucgugggcgacgucgugcaggagggcgugcugaccgccgucgugauccccacgaagaaggccgggggcaccaccgagaugcuggcgaaggcccuccgcaaggugccgaccgacaacuacaucacgaccuaccccgggcagggccugaacggguacaccgucgaggaggccaagaccgugcugaagaagugcaaguccgccuucuacauccuccccagcaucaucuccaacgagaagcaggagauccugggcaccgugagcuggaaccugcgggagaugcucgcgcacgccgaggagacgcgcaagcugaugcccgucugcguggagaccaaggccaucguguccaccauccagcggaaguacaagggcaucaagauccaggagggggucguggacuacggcgcccgcuucuacuucuacaccagcaagacgaccguggccucccugaucaacacccugaacgaccucaacgagacccuggucacgaugccgcugggguacgugacccacggccucaaccuggaggaggcggcccgguacaugcgcagccugaaggugcccgccaccgucuccgugagcucccccgacgccgugaccgccuacaacggguaccucacgagcuccagcaagacccccgaggagcacuucaucgagaccaucucccuggcgggcagcuacaaggacuggagcuacuccggccagagcacccagcuggggaucgaguuccucaagcggggcgacaaguccgucuacuacacgagcaacccgaccaccuuccaccuggacggggaggugaucaccuucgacaaccugaagacgcuccugucccugcgcgaggugcggaccaucaaggucuucaccaccguggacaacaucaaccuccacacgcagguggucgacaugagcaugaccuacggccagcaguucggccccaccuaccuggacggggccgacgugaccaagaucaagccccacaacucccacgagggcaagacguucuacgugcugccgaacgacgacacccuccgcgucgaggccuucgaguacuaccacaccaccgaccccagcuuccuggggcgguacauguccgcccugaaccacacgaagaaguggaaguacccccaggugaacggccucaccagcaucaagugggccgacaacaacugcuaccuggcgaccgcccugcucacccugcagcagaucgagcugaaguucaaccccccggcccuccaggacgccuacuaccgcgcgcgggccggggaggccgccaacuucugcgcccugauccuggcguacugcaacaagacggugggcgagcucggcgacguccgcgagaccauguccuaccuguuccagcacgccaaccuggacagcugcaagcgggugcucaacgucgugugcaagaccugcgggcagcagcagaccacccugaagggcguggaggccgucauguacauggggacgcuguccuacgagcaguucaagaagggcgugcagauccccugcaccugcgggaagcaggccaccaaguaccucgugcagcaggagagccccuucgucaugauguccgcccccccggcgcaguacgagcugaagcacggcaccuucacgugcgccagcgaguacaccggcaacuaccagugcgggcacuacaagcacaucaccuccaaggagacccuguacugcaucgacggcgcccuccugacgaagagcagcgaguacaaggggcccaucaccgacguguucuacaaggagaacuccuacaccaccacgaucaagcccgugaccuacaagcuggacggcgucgugugcaccgagaucgaccccaagcucgacaacuacuacaagaaggacaacagcuacuucaccgagcagccgaucgaccuggugcccaaccagcccuaccccaacgccuccuucgacaacuucaaguucgucugcgacaacaucaaguucgccgacgaccugaaccagcucacgggguacaagaagccggcgagccgcgagcugaaggugaccuucuuccccgaccugaacggcgacguggucgccaucgacuacaagcacuacacccccuccuucaagaagggcgccaagcuccugcacaagcccaucguguggcacgugaacaacgccaccaacaaggcgacguacaagccgaacaccuggugcauccggugccuguggagcaccaagcccgucgagaccuccaacagcuucgacgugcucaaguccgaggacgcccaggggauggacaaccuggccugcgaggaccugaagcccgugagcgaggaggucguggagaaccccacgauccagaaggacgugcucgagugcaacgucaagaccaccgagguggugggcgacaucauccugaagccggccaacaacucccugaagaucaccgaggaggucgggcacacggaccucauggccgcguacguggacaacagcucccugaccaucaagaagcccaacgagcugagccgcgugcucggccugaagacccuggccacccacgggcucgccgccgucaacuccgugcccugggacacgaucgccaacuacgcgaagccguuccugaacaagguggucagcaccaccaccaacaucgugacgcgcugccugaaccgggugugcaccaacuacaugcccuacuucuucacccuccugcugcagcucugcaccuucacccgcuccacgaacagccggaucaaggccuccaugcccaccaccaucgccaagaacaccgucaagagcgugggcaaguucugccuggaggccagcuucaacuaccugaagucccccaacuucagcaagcucaucaacaucaucaucugguuccugcugcucuccgugugccugggcagccugaucuacuccacggccgcgcucgggguccugaugagcaaccugggcaugccguccuacugcaccggguaccgcgagggcuaccucaacagcaccaacgugaccaucgccacguacugcaccggcuccauccccugcagcgugugccuguccgggcuggacagccucgacaccuaccccucccuggagaccauccagaucacgaucagcuccuucaagugggaccugaccgccuucggccucgucgccgagugguuccuggccuacauccuguucacccgguucuucuacgugcucgggcuggcggccaucaugcagcuguucuucagcuacuucgccgugcacuucaucuccaacagcuggcucauguggcugaucaucaaccugguccagauggcccccaucuccgcgauggugcgcauguacaucuucuucgccagcuucuacuacguguggaagagcuacguccacgugguggacggcugcaacuccagcaccugcaugaugugcuacaagcggaaccgcgccacgcgggucgagugcaccaccaucgugaacgggguccgccgguccuucuacguguacgccaacggcggcaagggguucugcaagcugcacaacuggaacugcgugaacugcgacaccuucugcgccggcagcacguucaucuccgacgaggucgcgcgcgaccucagccugcaguucaagcggccgaucaaccccaccgaccaguccagcuacaucguggacuccgugaccgucaagaacgggagcauccaccuguacuucgacaaggccggccagaagaccuacgagcgccacucccucagccacuucgugaaccuggacaaccugcgggccaacaacacgaaggggucccuccccaucaacgugaucgucuucgacggcaagagcaagugcgaggaguccagcgccaaguccgccagcguguacuacucccagcugaugugccagcccauccugcuccuggaccaggcgcuggugagcgacgucggcgacagcgccgagguggccgugaagauguucgacgccuacgucaacaccuucuccagcaccuucaacgugccgauggagaagcucaagacccugguggccacggcggaggccgagcuggccaagaacgucucccucgacaacgugcugagcaccuucaucuccgccgcgcgccagggguucguggacagcgacgucgagaccaaggacgugguggagugccugaagcucucccaccagagcgacaucgaggucaccggcgacuccugcaacaacuacaugcugacguacaacaagguggagaacaugaccccccgggaccugggggccugcaucgacugcagcgcccgccacaucaacgcccagguggccaagucccacaacaucgcgcucaucuggaacgucaaggacuucaugagccuguccgagcagcugcggaagcagauccgcagcgccgccaagaagaacaaccuccccuucaagcugaccugcgccaccacgcgccagguggugaacgucgugaccaccaagaucgcccugaagggcgggugaggacuaguuauaagacugacuagcccgaugggccucccaacgggcccuccuccccuccuugcaccgagauuaauaaaaaaaaaaaaaaaaaaaaaaaaaaaaaaaaaaaaaaaaaaaaaaaaaaaaaaaaaaaaaaaaugcaucccccccccccccccccccccccccccccccaaaggcucuuuucagagccaccagaauu

SEQ ID NO: 21541 - RNA, 6058 nt, Artificial Sequence
  SARS-CoV-2__MT831542.1__non-structural protein 3 (NSP3) mRNA gc
aggagaaagcuuaccauggcccccaccaaggugaccuucggcgacgacacggucaucgaggugcagggguacaagagcgugaacaucaccuucgagcuggacgagcgcaucgacaagguccucaacgagaagugcuccgccuacaccguggagcugggcaccgaggugaacgaguucgcgugcgucguggccgacgccgugaucaagacgcugcagccggucagcgagcuccugaccccccuggggaucgaccucgacgagugguccauggccaccuacuaccuguucgacgagagcggcgaguucaagcuggccucccacauguacugcagcuucuacccccccgacgaggacgaggaggagggggacugcgaggaggaggaguucgagccguccacccaguacgaguacggcacggaggacgacuaccagggcaagccccucgaguucggggcgaccagcgccgcccugcagcccgaggaggagcaggaggaggacuggcuggacgacgacucccagcagaccgugggccagcaggacgggagcgaggacaaccagaccacgaccauccagaccaucguggagguccagccccagcucgagauggagcugaccccgguggugcagacgaucgaggucaacuccuucagcggcuaccugaagcucaccgacaacguguacaucaagaacgccgacaucguggaggaggcgaagaaggucaagcccaccgugguggucaacgccgccaacguguaccugaagcacgggggcggcguggccggggcccugaacaaggcgaccaacaacgccaugcaggucgaguccgacgacuacaucgccacgaacggcccccucaagguggggggcagcugcguccuguccggccacaaccuggccaagcacugccuccacgugguggggcccaacgucaacaagggcgaggacauccagcugcugaagagcgccuacgagaacuucaaccagcacgaggugcuccuggcgccgcugcucuccgccgggaucuucggcgccgaccccauccacagccugcgggugugcgucgacaccgugcgcaccaacguguaccuggccgucuucgacaagaaccucuacgacaagcugguguccagcuuccuggagaugaagagcgagaagcagguggagcagaagaucgccgagauccccaaggaggaggucaagcccuucaucaccgaguccaagccgagcguggagcagcggaagcaggacgacaagaagaucaaggcgugcguggaggaggucacgaccacccucgaggagaccaaguuccugacggagaaccugcuccuguacaucgacaucaacgggaaccugcaccccgacuccgccacccucgugagcgacaucgacaucaccuuccugaagaaggacgcccccuacaucgugggcgacgucgugcaggagggcgugcugaccgccgucgugauccccacgaagaaggccgggggcaccaccgagaugcucgcgaaggcccugcgcaaggugccgaccgacaacuacaucacgaccuaccccgggcagggccugaacggguacaccgucgaggaggccaagaccgugcucaagaagugcaaguccgccuucuacauccugcccagcaucaucuccaacgagaagcaggagauccugggcaccgugagcuggaaccuccgggagaugcuggcgcacgccgaggagacgcgcaagcugaugcccgucugcguggagaccaaggccaucguguccaccauccagcggaaguacaagggcaucaagauccaggagggggucguggacuacggcgcccgcuucuacuucuacaccagcaagacgaccguggccucccugaucaacacccucaacgaccugaacgagacccuggucacgaugccgcucggguacgugacccacggccugaaccuggaggaggcggcccgguacaugcgcagccucaaggugcccgccaccgucuccgugagcucccccgacgccgugaccgccuacaacggguaccugacgagcuccagcaagacccccgaggagcacuucaucgagaccaucucccuggcgggcagcuacaaggacuggagcuacuccggccagagcacccagcucgggaucgaguuccugaagcggggcgacaaguccgucuacuacacgagcaacccgaccaccuuccaccuggacggggaggugaucaccuucgacaaccucaagacgcugcugucccuccgcgaggugcggaccaucaaggucuucaccaccguggacaacaucaaccugcacacgcagguggucgacaugagcaugaccuacggccagcaguucggccccaccuaccuggacggggccgacgugaccaagaucaagccccacaacucccacgagggcaagacguucuacgugcucccgaacgacgacacccugcgcgucgaggccuucgaguacuaccacaccaccgaccccagcuuccuggggcgguacauguccgcccucaaccacacgaagaaguggaaguacccccaggugaacggccugaccagcaucaagugggccgacaacaacugcuaccuggcgaccgcccuccugacccugcagcagaucgagcucaaguucaaccccccggcccugcaggacgccuacuaccgcgcgcgggccggggaggccgccaacuucugcgcccugauccucgcguacugcaacaagacggugggcgagcugggcgacguccgcgagaccauguccuaccuguuccagcacgccaaccucgacagcugcaagcgggugcugaacgucgugugcaagaccugcgggcagcagcagaccacccugaagggcguggaggccgucauguacauggggacgcucuccuacgagcaguucaagaagggcgugcagauccccugcaccugcgggaagcaggccaccaaguaccuggugcagcaggagagccccuucgucaugauguccgcccccccggcgcaguacgagcugaagcacggcaccuucacgugcgccagcgaguacaccggcaacuaccagugcgggcacuacaagcacaucaccuccaaggagacccucuacugcaucgacggcgcccugcugacgaagagcagcgaguacaaggggcccaucaccgacguguucuacaaggagaacuccuacaccaccacgaucaagcccgugaccuacaagcucgacggcgucgugugcaccgagaucgaccccaagcuggacaacuacuacaagaaggacaacagcuacuucaccgagcagccgaucgaccuggugcccaaccagcccuaccccaacgccuccuucgacaacuucaaguucgucugcgacaacaucaaguucgccgacgaccucaaccagcugacgggguacaagaagccggcgagccgcgagcugaaggugaccuucuuccccgaccucaacggcgacguggucgccaucgacuacaagcacuacacccccuccuucaagaagggcgccaagcugcugcacaagcccaucguguggcacgugaacaacgccaccaacaaggcgacguacaagccgaacaccuggugcguccggugccucuggagcaccaagcccguggagaccuccaacagcuucgacgugcugaaguccgaggacgcccaggggauggacaaccuggccugcgaggaccucaagcccgucagcgaggaggugguggagaaccccacgauccagaaggacguccuggagugcaacgugaagaccaccgagguggucggcgacaucauccugaagccggccaacaacucccucaagaucaccgaggagguggggcacacggaccugauggccgcguacguggacaacagcucccugaccaucaagaagcccaacgagcucagccgcguccugggccugaagacccucgccacccacgggcuggccgccgugaacuccgugcccugggacacgaucgccaacuacgcgaagccguuccugaacaaggucgugagcaccaccaccaacaucgugacgcgcugccucaaccgggucugcaccaacuacaugcccuacuucuucacccugcugcuccagcugugcaccuucacccgcuccacgaacagccggaucaaggccuccaugcccaccaccaucgccaagaacaccgugaagagcgugggcaaguucugccuggaggccagcuucaacuaccucaagucccccaacuucagcaagcugaucaacaucaucaucugguuccugcuccuguccgucugccugggcagccucaucuacuccacggccgcgcugggggugcugaugagcaaccucggcaugccguccuacugcaccggguaccgcgagggcuaccugaacagcaccaacgugaccaucgccacguacugcaccggcuccauccccugcagcgucugccuguccgggcucgacagccuggacaccuaccccucccuggagaccauccagaucacgaucagcuccuucaagugggaccucaccgccuucggccugguggccgagugguuccuggccuacauccucuucacccgguucuucuacgugcuggggcuggcggccaucaugcagcucuucuucagcuacuucgccguccacuucaucuccaacagcuggcugauguggcugaucaucaaccuggugcagauggcccccaucuccgcgauggugcgcauguacaucuucuucgccagcuucuacuacgucuggaagagcuacgugcacguggucgacggcugcaacuccagcaccugcaugaugugcuacaagcggaaccgcgccacgcggguggagugcaccaccaucgucaacggggugcgccgguccuucuacguguacgccaacggcggcaagggguucugcaagcuccacaacuggaacugcgucaacugcgacaccuucugcgccggcagcacguucaucuccgacgagguggcgcgcgaccugagccugcaguucaagcggccgaucaaccccaccgaccaguccagcuacaucguggacuccgucaccgugaagaacgggagcauccaccucuacuucgacaaggccggccagaagaccuacgagcgccacucccugagccacuucgugaaccuggacaaccuccgggccaacaacacgaaggggucccugcccaucaacgucaucguguucgacggcaagagcaagugcgaggaguccagcgccaaguccgccagcguguacuacucccagcugaugugccagcccauccuccugcuggaccaggcgcucgucagcgacgugggcgacagcgccgagguggccgucaagauguucgacgccuacgugaacaccuucuccagcaccuucaacgugccgauggagaagcugaagacccuggucgccacggcggaggccgagcucgccaagaacgugucccuggacaacgugcugagcaccuucaucuccgccgcgcgccagggguucgucgacagcgacguggagaccaaggacguggucgagugccucaagcugucccaccagagcgacaucgaggugaccggcgacuccugcaacaacuacaugcugacguacaacaagguggagaacaugaccccccgggaccucggggccugcaucgacugcagcgcccgccacaucaacgcccaggucgccaagucccacaacaucgcgcugaucuggaacgugaaggacuucaugagccuguccgagcagcuccggaagcagauccgcagcgccgccaagaagaacaaccugcccuucaagcugaccugcgccaccacgcgccagguggucaacguggugaccaccaagaucgcccucaagggcgggugaggacuaguuauaagacugacuagcccgaugggccucccaacgggcccuccuccccuccuugcaccgagauuaauaaaaaaaaaaaaaaaaaaaaaaaaaaaaaaaaaaaaaaaaaaaaaaaaaaaaaaaaaaaaaaaaugcaucccccccccccccccccccccccccccccccaaaggcucuuuucagagccaccagaauu

SEQ ID NO: 21542 - RNA, 6058 nt, Artificial Sequence
  SARS-CoV-2__MT831569.1__non-structural protein 3 (NSP3) mRNA gc
aggagaaagcuuaccauggcccccaccaaggugaccuucggcgacgacacggucaucgaggugcagggguacaagagcgugaacaucaccuucgagcuggacgagcgcaucgacaagguccucaacgagaagugcuccgccuacaccguggagcugggcaccgaggugaacgaguucgcgugcgucguggccgacgccgugaucaagacgcugcagccggucagcgagcuccugaccccccuggggaucgaccucgacgagugguccauggccaccuacuaccuguucgacgagagcggcgaguucaagcuggccucccacauguacugcagcuucuacccccccgacgaggacgaggaggagggggacugcgaggaggaggaguucgagccguccacccaguacgaguacggcacggaggacgacuaccagggcaagccccucgaguucggggcgaccagcgccgcccugcagcccgaggaggagcaggaggaggacuggcuggacgacgacucccagcagaccgugggccagcaggacgggagcgaggacaaccagaccacgaccauccagaccaucguggagguccagccccagcucgagauggagcugaccccgguggugcagacgaucgaggucaacuccuucagcggcuaccugaagcucaccgacaacguguacaucaagaacgccgacaucguggaggaggcgaagaaggucaagcccaccgugguggucaacgccgccaacaucuaccugaagcacgggggcggcguggccggggcccugaacaaggcgaccaacaacgccaugcagguggaguccgacgacuacaucgccacgaacggcccccucaaggucgggggcagcugcgugcuguccggccacaaccuggccaagcacugccuccacgucguggggcccaacgugaacaagggcgaggacauccagcugcugaagagcgccuacgagaacuucaaccagcacgagguccuccuggcgccgcugcucuccgccgggaucuucggcgccgaccccauccacagccugcgggugugcguggacaccguccgcaccaacguguaccuggccguguucgacaagaaccucuacgacaagcuggucuccagcuuccuggagaugaagagcgagaagcagguggagcagaagaucgccgagauccccaaggaggaggugaagcccuucaucaccgaguccaagccgagcgucgagcagcggaagcaggacgacaagaagaucaaggcgugcguggaggaggugacgaccacccucgaggagaccaaguuccugacggagaaccugcuccuguacaucgacaucaacgggaaccugcaccccgacuccgccacccucgucagcgacaucgacaucaccuuccugaagaaggacgcccccuacaucgugggcgacgugguccaggagggcgugcugaccgccguggucauccccacgaagaaggccgggggcaccaccgagaugcucgcgaaggcccugcgcaaggugccgaccgacaacuacaucacgaccuaccccgggcagggccugaacggguacaccguggaggaggccaagaccguccucaagaagugcaaguccgccuucuacauccugcccagcaucaucuccaacgagaagcaggagauccugggcaccgugagcuggaaccuccgggagaugcuggcgcacgccgaggagacgcgcaagcugaugcccgugugcgucgagaccaaggccaucguguccaccauccagcggaaguacaagggcaucaagauccaggaggggguggucgacuacggcgcccgcuucuacuucuacaccagcaagacgaccguggccucccugaucaacacccucaacgaccugaacgagacccuggugacgaugccgcucggguacgucacccacggccugaaccuggaggaggcggcccgguacaugcgcagccucaaggugcccgccaccguguccgucagcucccccgacgccgugaccgccuacaacggguaccugacgagcuccagcaagacccccgaggagcacuucaucgagaccaucucccuggcgggcagcuacaaggacuggagcuacuccggccagagcacccagcucgggaucgaguuccugaagcggggcgacaaguccguguacuacacgagcaacccgaccaccuuccaccuggacggggaggucaucaccuucgacaaccucaagacgcugcugucccuccgcgaggugcggaccaucaagguguucaccaccgucgacaacaucaaccugcacacgcaggugguggacaugagcaugaccuacggccagcaguucggccccaccuaccuggacggggccgacgucaccaagaucaagccccacaacucccacgagggcaagacguucuacgugcucccgaacgacgacacccugcgcguggaggccuucgaguacuaccacaccaccgaccccagcuuccuggggcgguacauguccgcccucaaccacacgaagaaguggaaguacccccaggucaacggccugaccagcaucaagugggccgacaacaacugcuaccuggcgaccgcccuccugacccugcagcagaucgagcucaaguucaaccccccggcccugcaggacgccuacuaccgcgcgcgggccggggaggccgccaacuucugcgcccugauccucgcguacugcaacaagacggugggcgagcugggcgacgugcgcgagaccauguccuaccuguuccagcacgccaaccucgacagcugcaagcggguccugaacguggucugcaagaccugcgggcagcagcagaccacccugaagggcguggaggccgugauguacauggggacgcucuccuacgagcaguucaagaagggcguccagauccccugcaccugcgggaagcaggccaccaaguaccuggugcagcaggagagccccuucgugaugauguccgcccccccggcgcaguacgagcugaagcacggcaccuucacgugcgccagcgaguacaccggcaacuaccagugcgggcacuacaagcacaucaccuccaaggagacccucuacugcaucgacggcgcccugcugacgaagagcagcgaguacaaggggcccaucaccgacgucuucuacaaggagaacuccuacaccaccacgaucaagcccgugaccuacaagcucgacggcguggucugcaccgagaucgaccccaagcuggacaacuacuacaagaaggacaacagcuacuucaccgagcagccgaucgaccuggugcccaaccagcccuaccccaacgccuccuucgacaacuucaaguucgugugcgacaacaucaaguucgccgacgaccucaaccagcugacgggguacaagaagccggcgagccgcgagcugaaggucaccuucuuccccgaccucaacggcgacgugguggccaucgacuacaagcacuacacccccuccuucaagaagggcgccaagcugcugcacaagcccaucgucuggcacgugaacaacgccaccaacaaggcgacguacaagccgaacaccuggugcauccggugccucuggagcaccaagcccguggagaccuccaacagcuucgacguccugaaguccgaggacgcccaggggauggacaaccuggccugcgaggaccucaagcccgugagcgaggagguggucgagaaccccacgauccagaaggacgugcuggagugcaacgugaagaccaccgaggucgugggcgacaucauccugaagccggccaacaacucccucaagaucaccgaggagguggggcacacggaccugauggccgcguacgucgacaacagcucccugaccaucaagaagcccaacgagcucagccgcgugcugggccugaagacccucgccacccacgggcuggccgccgugaacuccguccccugggacacgaucgccaacuacgcgaagccguuccugaacaagguggugagcaccaccaccaacaucgucacgcgcugccucaaccgggugugcaccaacuacaugcccuacuucuucacccugcugcuccagcugugcaccuucacccgcuccacgaacagccggaucaaggccuccaugcccaccaccaucgccaagaacaccgugaagagcgucggcaaguucugccuggaggccagcuucaacuaccucaagucccccaacuucagcaagcugaucaacaucaucaucugguuccugcuccuguccgugugccugggcagccucaucuacuccacggccgcgcugggggugcugaugagcaaccucggcaugccguccuacugcaccggguaccgcgagggcuaccugaacagcaccaacgucaccaucgccacguacugcaccggcuccauccccugcagcgugugccuguccgggcucgacagccuggacaccuaccccucccuggagaccauccagaucacgaucagcuccuucaagugggaccucaccgccuucggccugguggccgagugguuccuggccuacauccucuucacccgguucuucuacguccuggggcuggcggccaucaugcagcucuucuucagcuacuucgccgugcacuucaucuccaacagcuggcugauguggcugaucaucaaccuggugcagauggcccccaucuccgcgaugguccgcauguacaucuucuucgccagcuucuacuacguguggaagagcuacgugcacgucguggacggcugcaacuccagcaccugcaugaugugcuacaagcggaaccgcgccacgcggguggagugcaccaccaucgucaacggggugcgccgguccuucuacgucuacgccaacggcggcaagggguucugcaagcuccacaacuggaacugcgugaacugcgacaccuucugcgccggcagcacguucaucuccgacgagguggcgcgcgaccugagccugcaguucaagcggccgaucaaccccaccgaccaguccagcuacaucgucgacuccgugaccgugaagaacgggagcauccaccucuacuucgacaaggccggccagaagaccuacgagcgccacucccugagccacuucgucaaccuggacaaccuccgggccaacaacacgaaggggucccugcccaucaacgugaucguguucgacggcaagagcaagugcgaggaguccagcgccaaguccgccagcgucuacuacucccagcugaugugccagcccauccuccugcuggaccaggcgcucgugagcgacgugggcgacagcgccgaggucgccgugaagauguucgacgccuacgugaacaccuucuccagcaccuucaacgucccgauggagaagcugaagacccugguggccacggcggaggccgagcucgccaagaacgugucccuggacaacguccugagcaccuucaucuccgccgcgcgccagggguucguggacagcgacguggagaccaaggacgucguggagugccucaagcugucccaccagagcgacaucgaggugaccggcgacuccugcaacaacuacaugcugacguacaacaaggucgagaacaugaccccccgggaccucggggccugcaucgacugcagcgcccgccacaucaacgcccagguggccaagucccacaacaucgcgcugaucuggaacgugaaggacuucaugagccuguccgagcagcuccggaagcagauccgcagcgccgccaagaagaacaaccugcccuucaagcugaccugcgccaccacgcgccaggucgugaacguggucaccaccaagaucgcccucaagggcgggugaggacuaguuauaagacugacuagcccgaugggccucccaacgggcccuccuccccuccuugcaccgagauuaauaaaaaaaaaaaaaaaaaaaaaaaaaaaaaaaaaaaaaaaaaaaaaaaaaaaaaaaaaaaaaaaaugcaucccccccccccccccccccccccccccccccaaaggcucuuuucagagccaccagaauu

SEQ ID NO: 21543 - RNA, 6058 nt, Artificial Sequence
  SARS-CoV-2__MT831579.1__non-structural protein 3 (NSP3) mRNA gc
aggagaaagcuuaccauggcccccaccaaggugaccuucggcgacgacacggucaucgaggugcagggguacaagagcgugaacaucaccuucgagcuggacgagcgcaucgacaagguccucaacgagaagugcuccgccuacaccguggagcugggcaccgaggugaacgaguucgcgugcgucguggccgacgccgugaucaagacgcugcagccggucagcgagcuccugaccccccuggggaucgaccucgacgagugguccauggccaccuacuaccuguucgacgagagcggcgaguucaagcuggccucccacauguacugcagcuucuacccccccgacgaggacgaggaggagggggacugcgaggaggaggaguucgagccguccacccaguacgaguacggcacggaggacgacuaccagggcaagccccucgaguucggggcgaccagcgccgcccugcagcccgaggaggagcaggaggaggacuggcuggacgacgacucccagcagaccgugggccagcaggacgggagcgaggacaaccagaccacgaccauccagaccaucguggagguccagccccagcucgagauggagcugaccccgguggugcagacgaucgaggucaacuccuucagcggcuaccugaagcucaccgacaacguguacaucaagaacgccgacaucguggaggaggcgaagaaggucaagcccaccgugguggucaacgccgccaacguguaccugaagcacgggggcggcguggccggggcccugaacaaggcgaccaacaacgccaugcaggucgaguccgacgacuacaucgccacgaacggcccccucaagguggggggcagcugcguccuguccggccacaaccuggccaagcacugccuccacgugguggggcccaacgucaacaagggcgaggacauccagcugcugaagagcgccuacgagaacuucaaccagcacgaggugcuccuggcgccgcugcucuccgccgggaucuucggcgccgaccccauccacagccugcgggugugcgucgacaccgugcgcaccaacguguaccuggccgucuucgacaagaaccucuacgacaagcugguguccagcuuccuggagaugaagagcgagaagcagguggagcagaagaucgccgagauccccaaggaggaggucaagcccuucaucaccgaguccaagccgagcguggagcagcggaagcaggacgacaagaagaucaaggcgugcguggaggaggucacgaccacccucgaggagaccaaguuccugacggagaaccugcuccuguacaucgacaucaacgggaaccugcaccccgacuccgccacccucgugagcgacaucgacaucaccuuccugaagaaggacgcccccuacaucgugggcgacgucgugcaggagggcgugcugaccgccgucgugauccccacgaagaaggccgggggcaccaccgagaugcucgcgaaggcccugcgcaaggugccgaccgacaacuacaucacgaccuaccccgggcagggccugaacggguacaccgucgaggaggccaagaccgugcucaagaagugcaaguccgccuucuacauccugcccagcaucaucuccaacgagaagcaggagauccugggcaccgugagcuggaaccuccgggagaugcuggcgcacgccgaggagacgcgcaagcugaugcccgucugcguggagaccaaggccaucguguccaccauccagcggaaguacaagggcaucaagauccaggagggggucguggacuacggcgcccgcuucuacuucuacaccagcaagacgaccguggccucccugaucaacacccucaacaaccugaacgagacccuggucacgaugccgcucggguacgugacccacggccugaaccuggaggaggcggcccgguacaugcgcagccucaaggugcccgccaccgucuccgugagcucccccgacgccgugaccgccuacaacggguaccugacgagcuccagcaagacccccgaggagcacuucaucgagaccaucucccuggcgggcagcuacaaggacuggagcuacuccggccagagcacccagcucgggaucgaguuccugaagcggggcgacaaguccgucuacuacacgagcaacccgaccaccuuccaccuggacggggaggugaucaccuucgacaaccucaagacgcugcugucccuccgcgaggugcggaccaucaaggucuucaccaccguggacaacaucaaccugcacacgcagguggucgacaugagcaugaccuacggccagcaguucggccccaccuaccuggacggggccgacgugaccaagaucaagccccacaacucccacgagggcaagacguucuacgugcucccgaacgacgacacccugcgcgucgaggccuucgaguacuaccacaccaccgaccccagcuuccuggggcgguacauguccgcccucaaccacacgaagaaguggaaguacccccaggugaacggccugaccagcaucaagugggccgacaacaacugcuaccuggcgaccgcccuccugacccugcagcagaucgagcucaaguucaaccccccggcccugcaggacgccuacuaccgcgcgcgggccggggaggccgccaacuucugcgcccugauccucgcguacugcaacaagacggugggcgagcugggcgacguccgcgagaccauguccuaccuguuccagcacgccaaccucgacagcugcaagcgggugcugaacgucgugugcaagaccugcgggcagcagcagaccacccugaagggcguggaggccgucauguacauggggacgcucuccuacgagcaguucaagaagggcgugcagauccccugcaccugcgggaagcaggccaccaaguaccuggugcagcaggagagccccuucgucaugauguccgcccccccggcgcaguacgagcugaagcacggcaccuucacgugcgccagcgaguacaccggcaacuaccagugcgggcacuacaagcacaucaccuccaaggagacccucuacugcaucgacggcgcccugcugacgaagagcagcgaguacaaggggcccaucaccgacguguucuacaaggagaacuccuacaccaccacgaucaagcccgugaccuacaagcucgacggcgucgugugcaccgagaucgaccccaagcuggacaacuacuacaagaaggacaacagcuacuucaccgagcagccgaucgaccuggugcccaaccagcccuaccccaacgccuccuucgacaacuucaaguucgucugcgacaacaucaaguucgccgacgaccucaaccagcugacgggguacaagaagccggcgagccgcgagcugaaggugaccuucuuccccgaccucaacggcgacguggucgccaucgacuacaagcacuacacccccuccuucaagaagggcgccaagcugcugcacaagcccaucguguggcacgugaacaacgccaccaacaaggcgacguacaagccgaacaccuggugcauccggugccucuggagcaccaagcccgucgagaccuccaacagcuucgacgugcugaaguccgaggacgcccaggggauggacaaccuggccugcgaggaccucaagcccgugagcgaggaggucguggagaaccccacgauccagaaggacgugcuggagugcaacgucaagaccaccgagguggugggcgacaucauccugaagccggccaacaacucccucaagaucaccgaggaggucgggcacacggaccugauggccgcguacguggacaacagcucccugaccaucaagaagcccaacgagcucagccgcgugcugggccugaagacccucgccacccacgggcuggccgccgucaacuccgugcccugggacacgaucgccaacuacgcgaagccguuccugaacaagguggucagcaccaccaccaacaucgugacgcgcugccucaaccgggugugcaccaacuacaugcccuacuucuucacccugcugcuccagcugugcaccuucacccgcuccacgaacagccggaucaaggccuccaugcccaccaccaucgccaagaacaccgucaagagcgugggcaaguucugccuggaggccagcuucaacuaccucaagucccccaacuucagcaagcugaucaacaucaucaucugguuccugcuccuguccgugugccugggcagccucaucuacuccacggccgcgcuggggguccugaugagcaaccucggcaugccguccuacugcaccggguaccgcgagggcuaccugaacagcaccaacgugaccaucgccacguacugcaccggcuccauccccugcagcgugugccuguccgggcucgacagccuggacaccuaccccucccuggagaccauccagaucacgaucagcuccuucaagugggaccucaccgccuucggccuggucgccgagugguuccuggccuacauccucuucacccgguucuucuacgugcuggggcuggcggccaucaugcagcucuucuucagcuacuucgccgugcacuucaucuccaacagcuggcugauguggcugaucaucaaccugguccagauggcccccaucuccgcgauggugcgcauguacaucuucuucgccagcuucuacuacguguggaagagcuacguccacgugguggacggcugcaacuccagcaccugcaugaugugcuacaagcggaaccgcgccacgcgggucgagugcaccaccaucgugaacgggguccgccgguccuucuacguguacgccaacggcggcaagggguucugcaagcuccacaacuggaacugcgugaacugcgacaccuucugcgccggcagcacguucaucuccgacgaggucgcgcgcgaccugagccugcaguucaagcggccgaucaaccccaccgaccaguccagcuacaucguggacuccgugaccgucaagaacgggagcauccaccucuacuucgacaaggccggccagaagaccuacgagcgccacucccugagccacuucgugaaccuggacaaccuccgggccaacaacaucaaggggucccugcccaucaacgugaucgucuucgacggcaagagcaagugcgaggaguccagcgccaaguccgccagcguguacuacucccagcugaugugccagcccauccuccugcuggaccaggcgcucgugagcgacgucggcgacagcgccgagguggccgugaagauguucgacgccuacgucaacacguucuccagcaccuucaacgugccgauggagaagcugaagacccugguggccaccgcggaggccgagcucgccaagaacgucucccuggacaacgugcugagcacguucaucuccgccgcgcgccagggguucguggacagcgacgucgagaccaaggacgugguggagugccucaagcugucccaccagagcgacaucgaggucaccggcgacuccugcaacaacuacaugcugaccuacaacaagguggagaacaugacgccccgggaccucggggccugcaucgacugcagcgcccgccacaucaacgcccagguggccaagucccacaacaucgcgcugaucuggaacgucaaggacuucaugagccuguccgagcagcuccggaagcagauccgcagcgccgccaagaagaacaaccugcccuucaagcugaccugcgccaccacccgccagguggugaacgucgugacgaccaagaucgcccucaagggcgggugaggacuaguuauaagacugacuagcccgaugggccucccaacgggcccuccuccccuccuugcaccgagauuaauaaaaaaaaaaaaaaaaaaaaaaaaaaaaaaaaaaaaaaaaaaaaaaaaaaaaaaaaaaaaaaaaugcaucccccccccccccccccccccccccccccccaaaggcucuuuucagagccaccagaauu

SEQ ID NO: 21544 - RNA, 6058 nt, Artificial Sequence
  SARS-CoV-2__MT831587.1__non-structural protein 3 (NSP3) mRNA gc
aggagaaagcuuaccauggcccccaccaaggugaccuucggcgacgacacggucaucgaggugcagggguacaagagcgugaacaucaccuucgagcuggacgagcgcaucgacaagguccucaacgagaagugcuccgccuacaccguggagcugggcaccgaggugaacgaguucgcgugcgucguggccgacgccgugaucaagacgcugcagccggucagcgagcuccugaccccccuggggaucgaccucgacgagugguccauggccaccuacuaccuguucgacgagagcggcgaguucaagcuggccucccacauguacugcagcuucuacccccccgacgaggacgaggaggagggggacugcgaggaggaggaguucgagccguccacccaguacgaguacggcacggaggacgacuaccagggcaagccccucgaguucggggcgaccagcgccgcccugcagcccgaggaggagcaggaggaggacuggcuggacgacgacucccagcagaccgugggccagcaggacgggagcgaggacaaccagaccacgaccauccagaccaucguggagguccagccccagcucgagauggagcugaccccgguggugcagacgaucgaggucaacuccuucagcggcuaccugaagcucaccgacaacguguacaucaagaacgccgacaucguggaggaggcgaagaaggucaagcccaccgugguggucaacgccgccaacguguaccugaagcacgggggcggcguggccggggcccugaacaaggcgaccaacaacgccaugcaggucgaguccgacgacuacaucgccacgaacggcccccucaagguggggggcagcugcguccuguccggccacaaccuggccaagcacugccuccacgugguggggcccaacgucaacaagggcgaggacauccagcugcugaagagcgccuacgagaacuucaaccagcacgaggugcuccuggcgccgcugcucuccgccgggaucuucggcgccgaccccauccacagccugcgggugugcgucgacaccgugcgcaccaacguguaccuggccgucuucgacaagaaccucuacgacaagcugguguccagcuuccuggagaugaagagcgagaagcagguggagcagaagaucgccgagauccccaaggaggaggucaagcccuucaucaccgaguccaagccgagcguggagcagcggaagcaggacgacaagaagaucaaggcgugcguggaggaggucacgaccacccucgaggagaccaaguuccugacggagaaccugcuccuguacaucgacaucaacgggaaccugcaccccgacuccgccacccucgugagcgacaucgacaucaccuuccugaagaaggacgcccccuacaucgugggcgacgucgugcaggagggcgugcugaccgccgucgugauccccacgaagaaggccgggggcaccaccgagaugcucgcgaaggcccugcgcaaggugccgaccgacaacuacaucacgaccuaccccgggcagggccugaacggguacaccgucgaggaggccaagaccgugcucaagaagugcaaguccgccuucuacauccugcccagcaucaucuccaacgagaagcaggagauccugggcaccgugagcuggaaccuccgggagaugcuggcgcacgccgaggagacgcgcaagcugaugcccgucugcguggagaccaaggccaucguguccaccauccagcggaaguacaagggcaucaagauccaggagggggucguggacuacggcgcccgcuucuacuucuacaccagcaagacgaccguggccucccugaucaacacccucaacgaccugaacgagacccuggucacgaugccgcucggguacgugacccacggccugaaccuggaggaggcggcccgguacaugcgcagccucaaggugcccgccaccgucuccgugagcucccccgacgccgugaccgccuacaacggguaccugacgagcuccagcaagacccccgaggagcacuucaucgagaccaucucccuggcgggcagcuacaaggacuggagcuacuccggccagagcacccagcucgggaucgaguuccugaagcggggcgacaaguccgucuacuacacgagcaacccgaccaccuuccaccuggacggggaggugaucaccuucgacaaccucaagacgcugcugucccuccgcgaggugcggaccaucaaggucuucaccaccguggacaacaucaaccugcacacgcagguggucgacaugagcaugaccuacggccagcaguucggccugaccuaccucgacggggccgacgugaccaagaucaagccccacaacucccacgagggcaagacguucuacgugcugcccaacgacgacacccugcgcgucgaggccuucgaguacuaccacaccaccgacccgagcuuccucgggcgguacauguccgcccugaaccacacgaagaaguggaaguacccccaggugaacggccugaccagcaucaagugggccgacaacaacugcuaccucgcgaccgcccugcugacccuccagcagaucgagcugaaguucaacccccccgcccugcaggacgccuacuaccgcgcgcgggccggggaggccgccaacuucugcgcccucauccuggcguacugcaacaagacggugggcgagcugggcgacguccgcgagaccauguccuaccucuuccagcacgccaaccuggacagcugcaagcgggugcugaacgucgugugcaagaccugcgggcagcagcagaccacccucaagggcguggaggccgucauguacauggggacgcuguccuacgagcaguucaagaagggcgugcagaucccgugcaccugcgggaagcaggccaccaaguaccuggugcagcaggagagccccuucgucaugauguccgccccccccgcgcaguacgagcucaagcacggcaccuucacgugcgccagcgaguacaccggcaacuaccagugcgggcacuacaagcacaucaccuccaaggagacccuguacugcaucgacggcgcccugcucacgaagagcagcgaguacaaggggccgaucaccgacguguucuacaaggagaacuccuacaccaccacgaucaagcccgugaccuacaagcuggacggcgucgugugcaccgagaucgaccccaagcuggacaacuacuacaagaaggacaacagcuacuucaccgagcagcccaucgaccucgugccgaaccagcccuaccccaacgccuccuucgacaacuucaaguucgucugcgacaacaucaaguucgccgacgaccugaaccagcugacgggguacaagaagcccgcgagccgcgagcucaaggugaccuucuucccggaccugaacggcgacguggucgccaucgacuacaagcacuacacccccuccuucaagaagggcgccaagcugcuccacaagcccaucguguggcacgugaacaacgccaccaacaaggcgacguacaagcccaacaccuggugcauccggugccuguggagcaccaagccggucgagaccuccaacagcuucgacgugcugaaguccgaggacgcccaggggauggacaaccucgccugcgaggaccugaagcccgugagcgaggaggucguggagaaccccacgauccagaaggacgugcuggagugcaacgucaagaccaccgagguggugggcgacaucauccucaagcccgccaacaacucccugaagaucaccgaggaggucgggcacacggaccugauggccgcguacguggacaacagcucccucaccaucaagaagccgaacgagcugagccgcgugcugggccucaagacccuggccacccacgggcuggccgccgucaacuccgugcccugggacacgaucgccaacuacgcgaagcccuuccucaacaagguggucagcaccaccaccaacaucgugacgcgcugccugaaccgggugugcaccaacuacaugccguacuucuucacccugcuccugcagcugugcaccuucacccgcuccacgaacagccggaucaaggccuccaugcccaccaccaucgccaagaacaccgucaagagcgugggcaaguucugccucgaggccagcuucaacuaccugaagucccccaacuucagcaagcugaucaacaucaucaucugguuccuccugcuguccgugugccucggcagccugaucuacuccacggccgcgcuggggguccucaugagcaaccugggcaugcccuccuacugcaccggguaccgcgagggcuaccugaacagcaccaacgugaccaucgccacguacugcaccggcuccaucccgugcagcgugugccucuccgggcuggacagccuggacaccuaccccucccucgagaccauccagaucacgaucagcuccuucaagugggaccugaccgccuucggccuggucgccgagugguuccucgccuacauccuguucacccgguucuucuacgugcuggggcucgcggccaucaugcagcuguucuucagcuacuucgccgugcacuucaucuccaacagcuggcugauguggcugaucaucaaccucguccagauggcccccaucuccgcgauggugcgcauguacaucuucuucgccagcuucuacuacguguggaagagcuacguccacgugguggacggcugcaacuccagcaccugcaugaugugcuacaagcggaaccgcgccacgcgggucgagugcaccaccaucgugaacgggguccgccgguccuucuacguguacgccaacggcggcaagggguucugcaagcugcacaacuggaacugcgugaacugcgacaccuucugcgccggcagcacguucaucuccgacgaggucgcgcgcgaccugagccuccaguucaagcggcccaucaacccgaccgaccaguccagcuacaucguggacuccgugaccgucaagaacgggagcauccaccuguacuucgacaaggccggccagaagaccuacgagcgccacucccugagccacuucgugaaccucgacaaccugcgggccaacaacacgaaggggucccugcccaucaacgugaucgucuucgacggcaagagcaagugcgaggaguccagcgccaaguccgccagcguguacuacucccagcucaugugccagcccauccugcugcucgaccaggcgcuggugagcgacgucggcgacagcgccgagguggccgugaagauguucgacgccuacgucaacaccuucuccagcaccuucaacgugcccauggagaagcugaagacccucguggccacggcggaggccgagcuggccaagaacgucucccuggacaacgugcucagcaccuucaucuccgccgcgcgccagggguucguggacagcgacgucgagaccaaggacgugguggagugccugaagcugucccaccagagcgacaucgaggucaccggcgacuccugcaacaacuacaugcucacguacaacaagguggagaacaugaccccgcgggaccugggggccugcaucgacugcagcgcccgccacaucaacgcccagguggccaagucccacaacaucgcgcugaucuggaacgucaaggacuucaugagccucuccgagcagcugcggaagcagauccgcagcgccgccaagaagaacaaccugcccuucaagcucaccugcgccaccacgcgccagguggugaacgucgugaccaccaagaucgcccugaagggcgggugaggacuaguuauaagacugacuagcccgaugggccucccaacgggcccuccuccccuccuugcaccgagauuaauaaaaaaaaaaaaaaaaaaaaaaaaaaaaaaaaaaaaaaaaaaaaaaaaaaaaaaaaaaaaaaaaugcaucccccccccccccccccccccccccccccccaaaggcucuuuucagagccaccagaauu

SEQ ID NO: 21545 - RNA, 6058 nt, Artificial Sequence
  SARS-CoV-2__MT831625.1__non-structural protein 3 (NSP3) mRNA gc
aggagaaagcuuaccauggcccccaccaaggugaccuucggcgacgacacggucaucgaggugcagggguacaagagcgugaacaucaccuucgagcuggacgagcgcaucgacaagguccucaacgagaagugcuccgccuacaccguggagcugggcaccgaggugaacgaguucgcgugcgucguggccgacgccgugaucaagacgcugcagccggucagcgagcuccugaccccccuggggaucgaccucgacgagugguccauggccaccuacuaccuguucgacgagagcggcgaguucaagcuggccucccacauguacugcagcuucuacccccccgacgaggacgaggaggagggggacugcgaggaggaggaguucgagccguccacccaguacgaguacggcacggaggacgacuaccagggcaagccccucgaguucggggcgaccagcgccgcccugcagcccgaggaggagcaggaggaggacuggcuggacgacgacucccagcagaccgugggccagcaggacgggagcgaggacaaccagaccacgaccauccagaccaucguggagguccagccccagcucgagauggagcugaccccgguggugcagacgaucgaggucaacuccuucagcggcuaccugaagcucaccgacaacguguacaucaagaacgccgacaucguggaggaggcgaagaaggucaagcccaccgugguggucaacgccgccaacguguaccugaagcacgggggcggcguggccggggcccugaacaaggcgaccaacaacgccaugcaggucgaguccgacgacuacaucgccacgaacggcccccucaagguggggggcagcugcguccuguccggccacaaccuggccaagcacugccuccacgugguggggcccaacgucaacaagggcgaggacauccagcugcugaagagcgccuacgagaacuucaaccagcacgaggugcuccuggcgccgcugcucuccgccgggaucuucggcgccgaccccauccacagccugcgggugugcgucgacaccgugcgcaccaacguguaccuggccgucuucgacaagaaccucuacgacaagcugguguccagcuuccuggagaugaagagcgagaagcagguggagcagaagaucgccgagauccccaaggaggaggucaagcccuucaucaccgaguccaagccgagcguggagcagcggaagcaggacgacaagaagaucaaggcgugcguggaggaggucacgaccacccucgaggagaccaaguuccugacggagaaccugcuccuguacaucgacaucaacgggaaccugcaccccgacuccgccacccucgugagcgacaucgacaucaccuuccugaagaaggacgcccccuacaucgugggcgacgucgugcaggagggcgugcugaccgccgucgugauccccacgaagaaggccgggggcaccaccgagaugcucgcgaaggcccugcgcaaggugccgaccgacaacuacaucacgaccuaccccgggcagggccugaacggguacaccgucgaggaggccaagaccgugcucaagaagugcaaguccgccuucuacauccugcccagcaucaucuccaacgagaagcaggagauccugggcaccgugagcuggaaccuccgggagaugcuggcgcacgccgaggagacgcgcaagcugaugcccgucugcguggagaccaaggccaucguguccaccauccagcggaaguacaagggcaucaagauccaggagggggucguggacuacggcgcccgcuucuacuucuacaccagcaagacgaccguggccucccugaucaacacccucaacgaccugaacgagacccuggucacgaugccgcucggguacgugacccacggccugaaccuggaggaggcggcccgguacaugcgcagccucaaggugcccgccaccgucuccgugagcucccccgacgccgugaccgccuacaacggguaccugacgagcuccagcaagacccccgaggagcacuucaucgagaccaucucccuggcgggcagcuacaaggacuggagcuacuccggccagagcacccagcucgggaucgaguuccugaagcggggcgacaaguccgucuacuacacgagcaacccgaccaccuuccaccuggacggggaggugaucaccuucgacaaccucaagacgcugcugucccuccgcgaggugcggaccaucaaggucuucaccaccguggacaacaucaaccugcacacgcagguggucgacaugagcaugaccuacggccagcaguucggccccaccuaccuggacggggccgacgugaccaagaucaagccccacaacucccacgagggcaagacguucuacgugcucccgaacgacgacacccugcgcgucgaggccuucgaguacuaccacaccaccgaccccagcuuccuggggcgguacauguccgcccucaaccacacgaagaaguggaaguacccccaggugaacggccugaccagcaucaagugggccgacaacaacugcuaccuggcgaccgcccuccugacccugcagcagaucgagcucaaguucaaccccccggcccugcaggacgccuacuaccgcgcgcgggccggggaggccgccaacuucugcgcccugauccucgcguacugcaacaagacggugggcgagcugggcgacguccgcgagaccauguccuaccuguuccagcacgccaaccucgacagcugcaagcgggugcugaacgucgugugcaagaccugcgggcagcagcagaccacccugaagggcguggaggccgucauguacauggggacgcucuccuacgagcaguucaagaagggcgugcagauccccugcaccugcgggaagcaggugaccaaguaccugguccagcaggagagccccuucgugaugauguccgcccccccggcccaguacgagcugaagcacggcaccuucaucugcgcgagcgaguacacgggcaacuaccagugcgggcacuacaagcacaucaccuccaaggagacccucuacugcaucgacggcgcccugcugaccaagagcagcgaguacaaggggcccaucacggacguguucuacaaggagaacuccuacaccaccaccaucaagcccgucacguacaagcucgacggcguggugugcaccgagaucgaccccaagcuggacaacuacuacaagaaggacaacagcuacuucaccgagcagccgaucgaccugguccccaaccagcccuaccccaacgccuccuucgacaacuucaaguucgugugcgacaacaucaaguucgccgacgaccucaaccagcugaccggguacaagaagccggccagccgcgagcugaaggugacguucuuccccgaccucaacggcgacgucguggcgaucgacuacaagcacuacacccccuccuucaagaagggcgccaagcugcugcacaagcccaucguguggcacgucaacaacgccaccaacaaggccaccuacaagccgaacacguggugcauccggugccucuggagcaccaagcccguggagaccuccaacagcuucgacgugcugaaguccgaggacgcgcaggggauggacaaccuggccugcgaggaccucaagcccgucagcgaggaggugguggagaaccccaccauccagaaggacguccuggagugcaacgugaagacgaccgagguggucggcgacaucauccugaagccggccaacaacucccucaagaucaccgaggagguggggcacaccgaccugauggccgccuacguggacaacagcucccugacgaucaagaagcccaacgagcucagccgcguccugggccugaagacccucgcgacccacgggcuggccgccgugaacuccgugcccugggacaccaucgccaacuacgccaagccguuccugaacaaggucgugagcacgaccaccaacaucgugacccgcugccucaaccgggucugcacgaacuacaugcccuacuucuucacccugcugcuccagcugugcaccuucacccgcuccaccaacagccggaucaaggcguccaugcccacgaccaucgccaagaacaccgugaagagcgugggcaaguucugccuggaggccagcuucaacuaccucaagucccccaacuucagcaagcugaucaacaucaucaucugguuccugcuccuguccgucugccugggcagccucaucuacuccaccgccgcccugggggugcugaugagcaaccucggcaugccguccuacugcacgggguaccgcgagggcuaccugaacagcaccaacgugaccaucgcgaccuacugcacgggcuccauccccugcagcgucugccuguccgggcucgacagccuggacaccuaccccucccuggagaccauccagaucaccaucagcuccuucaagugggaccucacggccuucggccugguggccgagugguuccuggccuacauccucuucacccgguucuucuacgugcuggggcuggccgcgaucaugcagcucuucuucagcuacuucgccguccacuucaucuccaacagcuggcugauguggcugaucaucaaccuggugcagauggcccccaucuccgccauggugcgcauguacaucuucuucgcgagcuucuacuacgucuggaagagcuacgugcacguggucgacggcugcaacuccagcaccugcaugaugugcuacaagcggaaccgcgccacccggguggagugcacgaccaucgucaacggggugcgccgguccuucuacguguacgccaacggcggcaagggguucugcaagcuccacaacuggaacugcgucaacugcgacaccuucugcgccggcagcaccuucaucuccgacgagguggcccgcgaccugagccugcaguucaagcggccgaucaaccccacggaccaguccagcuacaucguggacuccgucaccgugaagaacgggagcauccaccucuacuucgacaaggcgggccagaagaccuacgagcgccacucccugagccacuucgugaaccuggacaaccuccgggccaacaacaccaaggggucccugcccaucaacgucaucguguucgacggcaagagcaagugcgaggaguccagcgccaaguccgccagcguguacuacucccagcugaugugccagcccauccuccugcuggaccaggcccucgucagcgacgugggcgacagcgcggagguggccgucaagauguucgacgccuacgugaacacguucuccagcaccuucaacgugccgauggagaagcugaagacccuggucgccaccgccgaggcggagcucgccaagaacgugucccuggacaacgugcugagcacguucaucuccgccgcccgccagggguucgucgacagcgacguggagaccaaggacguggucgagugccucaagcugucccaccagagcgacaucgaggugaccggcgacuccugcaacaacuacaugcugaccuacaacaagguggagaacaugacgccccgggaccucggggcgugcaucgacugcagcgcccgccacaucaacgcccaggucgccaagucccacaacaucgcccugaucuggaacgugaaggacuucaugagccuguccgagcagcuccggaagcagauccgcagcgcggccaagaagaacaaccugcccuucaagcugaccugcgccaccacccgccagguggucaacguggugacgaccaagaucgcccucaagggcgggugaggacuaguuauaagacugacuagcccgaugggccucccaacgggcccuccuccccuccuugcaccgagauuaauaaaaaaaaaaaaaaaaaaaaaaaaaaaaaaaaaaaaaaaaaaaaaaaaaaaaaaaaaaaaaaaaugcaucccccccccccccccccccccccccccccccaaaggcucuuuucagagccaccagaauu

SEQ ID NO: 21546 - RNA, 6058 nt, Artificial Sequence
  SARS-CoV-2__MT831632.1__non-structural protein 3 (NSP3) mRNA gc
aggagaaagcuuaccauggcccccaccaaggugaccuucggcgacgacacggucaucgaggugcagggguacaagagcgugaacaucaccuucgagcuggacgagcgcaucgacaagguccucaacgagaagugcuccgccuacaccguggagcugggcaccgaggugaacgaguucgcgugcgucguggccgacgccgugaucaagacgcugcagccggucagcgagcuccugaccccccuggggaucgaccucgacgagugguccauggccaccuacuaccuguucgacgagagcggcgaguucaagcuggccucccacauguacugcagcuucuacccccccgacgaggacgaggaggagggggacugcgaggaggaggaguucgagccguccacccaguacgaguacggcacggaggacgacuaccagggcaagccccucgaguucggggcgaccagcgccgcccugcagcccgaggaggagcaggaggaggacuggcuggacgacgacucccagcagaccgugggccagcaggacgggagcgaggacaaccagaccacgaccauccagaccaucguggagguccagccccagcucgagauggagcugaccccgguggugcagacgaucgaggucaacuccuucagcggcuaccugaagcucaccgacaacguguacaucaagaacgccgacaucguggaggaggcgaagaaggucaagcccaccgugguggucaacgccgccaacguguaccugaagcacgggggcggcguggccggggcccugaacaaggcgaccaacaacgccaugcaggucgaguccgacgacuacaucgccacgaacggcccccucaagguggggggcagcugcguccuguccggccacaaccuggccaagcacugccuccacgugguggggcccaacgucaacaagggcgaggacauccagcugcugaagagcgccuacgagaacuucaaccagcacgaggugcuccuggcgccgcugcucuccgccgggaucuucggcgccgaccccauccacagccugcgggugugcgucgacaccgugcgcaccaacguguaccuggccgucuucgacaagaaccucuacgacaagcugguguccagcuuccuggagaugaagagcgagaagcagguggagcagaagaucgccgagauccccaaggaggaggucaagcccuucaucaccgaguccaagccgagcguggagcagcggaagcaggacgacaagaagaucaaggcgugcguggaggaggucacgaccacccucgaggagaccaaguuccugacggagaaccugcuccuguacaucgacaucaacgggaaccugcaccccgacuccgccacccucgugagcgacaucgacaucaccuuccugaagaaggacgcccccuacaucgugggcgacgucgugcaggagggcgugcugaccgccgucgugauccccacgaagaaggccgggggcaccaccgagaugcucgcgaaggcccugcgcaaggugccgaccgacaacuacaucacgaccuaccccgggcagggccugaacggguacaccgucgaggaggccaagaccgugcucaagaagugcaaguccgccuucuacauccugcccagcaucaucuccaacgagaagcaggagauccugggcaccgugagcuggaaccuccgggagaugcuggcgcacgccgaggagacgcgcaagcugaugcccgucugcguggagaccaaggccaucguguccaccauccagcggaaguacaagggcaucaagauccaggagggggucguggacuacggcgcccgcuucuacuucuacaccagcaagacgaccguggccucccugaucaacacccucaacgaccugaacgagacccuggucacgaugccgcucggguacgugacccacggccugaaccuggaggaggcggcccgguacaugcgcagccucaaggugcccgccaccgucuccgugagcucccccgacgccgugaccgccuacaacggguaccugacgagcuccagcaagacccccgaggagcacuucaucgagaccaucucccuggcgggcagcuacaaggacuggagcuacuccggccagagcacccagcucgggaucgaguuccugaagcggggcgacaaguccgucuacuacacgagcaacccgaccaccuuccaccuggacggggaggugaucaccuucgacaaccucaagacgcugcugucccuccgcgaggugcggaccaucaaggucuucaccaccguggacaacaucaaccugcacacgcagguggucgacaugagcaugaccuacggccagcaguucggccccaccuaccuggacggggccgacgugaccaagaucaagccccacaacucccacgagggcaagacguucuacgugcucccgaacgacgacacccugcgcgucgaggccuucgaguacuaccacaccaccgaccccagcuuccuggggcgguacauguccgcccucaaccacacgaagaaguggaaguacccccaggugaacggccugaccagcaucaagugggccgacaacaacugcuaccuggcgaccgcccuccugacccugcagcagaucgagcucaaguucaaccccccggcccugcaggacgccuacuaccgcgcgcgggccggggaggccgccaacuucugcgcccugauccucgcguacugcaacaagacggugggcgagcugggcgacguccgcgagaccauguccuaccuguuccagcacgccaaccucgacagcugcaagcgggugcugaacgucgugugcaagaccugcgggcagcagcagaccacccugaagggcguggaggccgucauguacauggggacgcucuccuacgagcaguucaagaagggcgugcagauccccugcaccugcgggaagcaggccaccaaguaccuggugcagcaggagagccccuucgucaugauguccgcccccccggcgcaguacgagcugaagcacggcaccuucacgugcgccagcgaguacaccggcaacuaccagugcgggcacuacaagcacaucaccuccaaggagacccucuacugcaucgacggcgcccugcugacgaagagcagcgaguacaaggggcccaucaccgacguguucuacaaggagaacuccuacaccaccacgaucaagcccgugaccuacaagcucgacggcgucgugugcaccgagaucgaccccaagcuggacaacuacuacaagaaggacaacagcuacuucaccgagcagccgaucgaccuggugcccaaccagcccuaccccaacgccuccuucgacaacuucaaguucgucugcgacaacaucaaguucgccgacgaccucaaccagcugacgggguacaagaagccggcgagccgcgagcugaaggugaccuucuuccccgaccucaacggcgacguggucgccaucgacuacaagcacuacacccccuccuucaagaagggcgccaagcugcugcacaagcccaucguguggcacgugaacaacgccaccaacaaggcgacguacaagccgaacaccuggugcauccggugccucuggagcaccaagcccgucgagaccuccaacagcuucgacgugcugaaguccgaggacgcccaggggauggacaaccuggccugcgaggaccucaagcccgugagcgaggaggucguggagaaccccacgauccagaaggacgugcuggagugcaacgucaagaccaccgagguggugggcgacaucauccugaagccggccaacaacucccucaagaucaccgaggaggucgggcacacggaccugauggccgcguacguggacaacagcucccugaccaucaagaagcccaacgagcucagccgcgugcugggccugaagacccucgccauccacgggcuggccgccgucaacuccgugcccugggacaccaucgccaacuacgcgaagccguuccugaacaagguggucagcacgaccaccaacaucgugacccgcugccucaaccgggugugcacgaacuacaugcccuacuucuucacccugcugcuccagcugugcaccuucacccgcuccaccaacagccggaucaaggccuccaugcccacgaccaucgccaagaacaccgucaagagcgugggcaaguucugccuggaggccagcuucaacuaccucaagucccccaacuucagcaagcugaucaacaucaucaucugguuccugcuccuguccgugugccugggcagccucaucuacuccaccgccgcgcuggggguccugaugagcaaccucggcaugccguccuacugcacgggguaccgcgagggcuaccugaacagcaccaacgugaccaucgccaccuacugcacgggcuccauccccugcagcgugugccuguccgggcucgacagccuggacaccuaccccucccuggagaccauccagaucaccaucagcuccuucaagugggaccucacggccuucggccuggucgccgagugguuccuggccuacauccucuucacccgguucuucuacgugcuggggcuggcggccaucaugcagcucuucuucagcuacuucgccgugcacuucaucuccaacagcuggcugauguggcugaucaucaaccugguccagauggcccccaucuccgcgauggugcgcauguacaucuucuucgccagcuucuacuacguguggaagagcuacguccacgugguggacggcugcaacuccagcaccugcaugaugugcuacaagcggaaccgcgccacccgggucgagugcacgaccaucgugaacgggguccgccgguccuucuacguguacgccaacggcggcaagggguucugcaagcuccacaacuggaacugcgugaacugcgacaccuucugcgccggcagcaccuucaucuccgacgaggucgcgcgcgaccugagccugcaguucaagcggccgaucaaccccacggaccaguccagcuacaucguggacuccgugaccgucaagaacgggagcauccaccucuacuucgacaaggccggccagaagaccuacgagcgccacucccugagccacuucgugaaccuggacaaccuccgggccaacaacaccaaggggucccugcccaucaacgugaucgucuucgacggcaagagcaagugcgaggaguccagcgccaaguccgccagcguguacuacucccagcugaugugccagcccauccuccugcuggaccaggcgcucgugagcgacgucggcgacagcgccgagguggccgugaagauguucgacgccuacgucaacacguucuccagcaccuucaacaucccgauggagaagcugaagacccugguggccaccgcggaggccgagcucgccaagaacgugucccuggacaacguccugagcacguucaucuccgccgcgcgccagggguucguggacagcgacguggagaccaaggacgucguggagugccucaagcugucccaccagagcgacaucgaggugaccggcgacuccugcaacaacuacaugcugaccuacaacaaggucgagaacaugacgccccgggaccucggggccugcaucgacugcagcgcccgccacaucaacgcccagguggccaagucccacaacaucgcgcugaucuggaacgugaaggacuucaugagccuguccgagcagcuccggaagcagauccgcagcgccgccaagaagaacaaccugcccuucaagcugaccugcgccaccacccgccaggucgugaacguggucacgaccaagaucgcccucaagggcgggugaggacuaguuauaagacugacuagcccgaugggccucccaacgggcccuccuccccuccuugcaccgagauuaauaaaaaaaaaaaaaaaaaaaaaaaaaaaaaaaaaaaaaaaaaaaaaaaaaaaaaaaaaaaaaaaaugcaucccccccccccccccccccccccccccccccaaaggcucuuuucagagccaccagaauu

SEQ ID NO: 21547 - RNA, 6058 nt, Artificial Sequence
  SARS-CoV-2__MT831729.1__non-structural protein 3 (NSP3) mRNA gc
aggagaaagcuuaccauggcccccaccaaggugaccuucggcgacgacacggucaucgaggugcagggguacaagagcgugaacaucaccuucgagcuggacgagcgcaucgacaagguccucaacgagaagugcuccgccuacaccguggagcugggcaccgaggugaacgaguucgcgugcgucguggccgacgccgugaucaagacgcugcagccggucagcgagcuccugaccccccuggggaucgaccucgacgagugguccauggccaccuacuaccuguucgacgagagcggcgaguucaagcuggccucccacauguacugcagcuucuacccccccgacgaggacgaggaggagggggacugcgaggaggaggaguucgagccguccacccaguacgaguacggcacggaggacgacuaccagggcaagccccucgaguucggggcgaccagcgccgcccugcagcccgaggaggagcaggaggaggacuggcuggacgacgacucccagcagaccgugggccagcaggacgggagcgaggacaaccagaccacgaccauccagaccaucguggagguccagccccagcucgagauggagcugaccccgguggugcagacgaucgaggucaacuccuucagcggcuaccugaagcucaccgacaacguguacaucaagaacgccgacaucguggaggaggcgaagaaggucaagcccaccgugguggucaacgccgccaacguguaccugaagcacgggggcggcguggccggggcccugaacaaggcgaccaacaacgccaugcaggucgaguccgacgacuacaucgccacgaacggcccccucaagguggggggcagcugcguccuguccggccacaaccuggccaagcacugccuccacgugguggggcccaacgucaacaagggcgaggacauccagcugcugaagagcgccuacgagaacuucaaccagcacgaggugcuccuggcgccgcugcucuccgccgggaucuucggcgccgaccccauccacagccugcgggugugcgucgacaccgugcgcaccaacguguaccuggccgucuucgacaagaaccucuacgacaagcugguguccagcuuccuggagaugaagagcgagaagcagguggagcagaagaucgccgagauccccaaggaggaggucaagcccuucaucaccgaguccaagccgagcguggagcagcggaagcaggacgacaagaagaucaaggcgugcguggaggaggucacgaccacccucgaggagaccaaguuccugacggagaaccugcuccuguacaucgacaucaacgggaaccugcaccccgacuccgccacccucgugagcgacaucgacaucaccuuccugaagaaggacgcccccuacaucgugggcgacgucgugcaggagggcgugcugaccgccgucgugauccccacgaagaaggccgggggcaccaccgagaugcucgcgaaggcccugcgcaaggugccgaccgacaacuacaucacgaccuaccccgggcagggccugaacggguacaccgucgaggaggccaagaccgugcucaagaagugcaaguccgccuucuacauccugcccagcaucaucuccaacgagaagcaggagauccugggcaccgugagcuggaaccuccgggagaugcuggcgcacgccgaggagacgcgcaagcugaugcccgucugcguggagaccaaggccaucguguccaccauccagcggaaguacaagggcaucaagauccaggagggggucguggacuacggcgcccgcuucuacuucuacaccagcaagacgaccguggccucccugaucaacacccucaacgaccugaacgagacccuggucacgaugccgcucggguacgugacccacggccugaaccuggaggaggcggcccgguacaugcgcagccucaaggugcccgccaccgucuccgugagcucccccgacgccgugaccgccuacaacggguaccugacgagcuccagcaagacccccgaggagcacuucaucgagaccaucucccuggcgggcagcuacaaggacuggagcuacuccggccagagcacccagcucgggaucgaguuccugaagcggggcgacaaguccgucuacuacacgagcaacccgaccaccuuccaccuggacggggaggugaucaccuucgacaaccucaagacgcugcugucccuccgcgaggugcggaccaucaaggucuucaccaccguggacaacaucaaccugcacacgcagguggucgacaugagcaugaccuacggccagcaguucggccccaccuaccuggacggggccgacgugaccaagaucaagccccacaacucccacgagggcaagacguucuacgugcucccgaacgacgacacccugcgcgucgaggccuucgaguacuaccacaccaccgaccccagcuuccuggggcgguacauguccgcccucaaccacacgaagaaguggaaguacccccaggugaacggccugaccagcaucaagugggccgacaacaacugcuaccuggcgaccgcccuccugacccugcagcagaucgagcucaaguucaaccccccggcccugcaggacgccuacuaccgcgcgcgggccggggaggccgccaacuucugcgcccugauccucgcguacugcaacaagacggugggcgagcugggcgacguccgcgagaccauguccuaccuguuccagcacgccaaccucgacagcugcaagcgggugcugaacgucgugugcaagaccugcgggcagcagcagaccacccugaagggcguggaggccgucauguacauggggacgcucuccuacgagcaguucaagaagggcgugcagauccccugcaccugcgggaagcaggccaccaaguaccuggugcagcaggagagccccuucgucaugauguccgcccccccggcgcaguacgagcugaagcacggcaccuucacgugcgccagcgaguacaccggcaacuaccagugcgggcacuacaagcacaucaccuccaaggagacccucuacugcaucgacggcgcccugcugacgaagagcagcgaguacaaggggcccaucaccgacguguucuacaaggagaacuccuacaccaccacgaucaagcccgugaccuacaagcucgacggcgucgugugcaccgagaucgaccccaagcuggacaacuacuacaagaaggacaacagcuacuucaccgagcagccgaucgaccuggugcccaaccagcccuaccccaacgccuccuucgacaacuucaaguucgucugcgacaacaucaaguucgccgacgaccucaaccagcugacgggguacaagaagccggcgagccgcgagcugaaggugaccuucuuccccgaccucaacggcgacguggucgccaucgacuacaagcacuacacccccuccuucaagaagggcgccaagcugcugcacaagcccaucguguggcacgugaacaacgccaccaacaaggcgacguacaagccgaacaccuggugcauccggugccucuggagcaccaagcccgucgagaccuccaacagcuucgacgugcugaaguccgaggacgcccaggggauggacaaccuggccugcgaggaccucaagcccgugagcgaggaggucguggagaaccccacgauccagaaggacgugcuggagugcaacgucaagaccaccgagguggugggcgacaucauccugaagccggccaacaacucccucaagaucaccgaggaggucgggcacacggaccugauggccgcguacguggacaacagcucccugaccaucaagaagcccaacgagcucagccgcgugcugggccugaagacccucgccacccacgggcuggccgccgucaacuccgugcccugggacacgaucgccaacuacgcgaagccguuccugaacaagguggucagcaccaccaccaacaucgugacgcgcugccucaaccgggugugcaccaacuacaugcccuacuucuucacccugcugcuccagcugugcaccuucacccgcuccacgaacagccggaucaaggccuccaugcccaccaccaucgccaagaacaccgucaagagcgugggcaaguucugccuggaggccagcuucaacuaccucaagucccccaacuucagcaagcugaucaacaucaucaucugguuccugcuccuguccgugugccugggcagccucaucuacuccacggccgcgcuggggguccugaugagcaaccucggcaugccguccuacugcaccggguaccgcgagggcuaccugaacagcaccaacgugaccaucgccacguacugcaccggcuccauccccugcagcgugugccuguccgggcucgacagccuggacaccuaccccucccuggagaccauccagaucacgaucagcuccuucaagugggaccucaccgccuucggccuggucgccgagugguuccuggccuacauccucuucacccgguucuucuacgugcuggggcuggcggccaucaugcagcucuucuucagcuacuucgccgugcacuucaucuccaacagcuggcugaucuggcugaucaucaaccugguccagauggcccccaucuccgcgauggugcgcauguacaucuucuucgccagcuucuacuacguguggaagagcuacguccacgugguggacggcugcaacuccagcaccugcaugaugugcuacaagcggaaccgcgccacgcgggucgagugcaccaccaucgugaacgggguccgccgguccuucuacguguacgccaacggcggcaagggguucugcaagcuccacaacuggaacugcgugaacugcgacaccuucugcgccggcagcacguucaucuccgacgaggucgcgcgcgaccugagccugcaguucaagcggccgaucaaccccaccgaccaguccagcuacaucguggacuccgugaccgucaagaacgggagcauccaccucuacuucgacaaggccggccagaagaccuacgagcgccacucccugagccacuucgugaaccuggacaaccuccgggccaacaacacgaaggggucccugcccaucaacgugaucgucuucgacggcaagagcaagugcgaggaguccagcgccaaguccgccagcguguacuacucccagcugaugugccagcccauccuccugcuggaccaggcgcucgugagcgacgucggcgacagcgccgagguggccgugaagauguucgacgccuacgucaacaccuucuccagcaccuucaacgugccgauggagaagcugaagacccugguggccacggcggaggccgagcucgccaagaacgucucccuggacaacgugcugagcaccuucaucuccgccgcgcgccagggguucguggacagcgacgucgagaccaaggacgugguggagugccucaagcugucccaccagagcgacaucgaggucaccggcgacuccugcaacaacuacaugcugacguacaacaagguggagaacaugaccccccgggaccucggggccugcaucgacugcagcgcccgccacaucaacgcccagguggccaagucccacaacaucgcgcugaucuggaacgucaaggacuucaugagccuguccgagcagcuccggaagcagauccgcagcgccgccaagaagaacaaccugcccuucaagcugaccugcgccaccacgcgccagguggugaacgucgugaccaccaagaucgcccucaagggcgggugaggacuaguuauaagacugacuagcccgaugggccucccaacgggcccuccuccccuccuugcaccgagauuaauaaaaaaaaaaaaaaaaaaaaaaaaaaaaaaaaaaaaaaaaaaaaaaaaaaaaaaaaaaaaaaaaugcaucccccccccccccccccccccccccccccccaaaggcucuuuucagagccaccagaauu

SEQ ID NO: 21548 - RNA, 6058 nt, Artificial Sequence
  SARS-CoV-2__MT831867.1__non-structural protein 3 (NSP3) mRNA gc
aggagaaagcuuaccauggcccccaccaaggugaccuucggcgacgacacggucaucgaggugcagggguacaagagcgugaacaucaccuucgagcuggacgagcgcaucgacaagguccucaacgagaagugcuccgccuacaccguggagcugggcaccgaggugaacgaguucgcgugcgucguggccgacgccgugaucaagacgcugcagccggucagcgagcuccugaccccccuggggaucgaccucgacgagugguccauggccaccuacuaccuguucgacgagagcggcgaguucaagcuggccucccacauguacugcagcuucuacccccccgacgaggacgaggaggagggggacugcgaggaggaggaguucgagccguccacccaguacgaguacggcacggaggacgacuaccagggcaagccccucgaguucggggcgaccagcgccgcccugcagcccgaggaggagcaggaggaggacuggcuggacgacgacucccagcagaccgugggccagcaggacgggagcgaggacaaccagaccacgaccauccagaccaucguggagguccagccccagcucgagauggagcugaccccgguggugcagacgaucgaggucaacuccuucagcggcuaccugaagcucaccgacaacguguacaucaagaacgccgacaucguggaggaggcgaagaaggucaagcccaccgugguggucaacgccgccaacguguaccugaagcacgggggcggcguggccggggcccugaacaaggcgaccaacaacgccaugcaggucgaguccgacgacuacaucgccacgaacggcccccucaagguggggggcagcugcguccuguccggccacaaccuggccaagcacugccuccacgugguggggcccaacgucaacaagggcgaggacauccagcugcugaagagcgccuacgagaacuucaaccagcacgaggugcuccuggcgccgcugcucuccgccgggaucuucggcgccgaccccauccacagccugcgggugugcgucgacaccgugcgcaccaacguguaccuggccgucuucgacaagaaccucuacgacaagcugguguccagcuuccuggagaugaagagcgagaagcagguggagcagaagaucgccgagauccccaaggaggaggucaagcccuucaucaccgaguccaagccgagcguggagcagcggaagcaggacgacaagaagaucaaggcgugcguggaggaggucacgaccacccucgaggagaccaaguuccugacggagaaccugcuccuguacaucgacaucaacgggaaccugcaccccgacuccgccacccucgugagcgacaucgacaucaccuuccugaagaaggacgcccccuacaucgugggcgacgucgugcaggagggcgugcugaccgccgucgugauccccacgaagaaggccgggggcaccaccgagaugcucgcgaaggcccugcgcaaggugccgaccgacaacuacaucacgaccuaccccgggcagggccugaacggguacaccgucgaggaggccaagaccgugcucaagaagugcaaguccgccuucuacauccugcccagcaucaucuccaacgagaagcaggagauccugggcaccgugagcuggaaccuccgggagaugcuggcgcacgccgaggagacgcgcaagcugaugcccgucugcguggagaccaaggccaucguguccaccauccagcggaaguacaagggcaucaagauccaggagggggucguggacuacggcgcccgcuucuacuucuacaccagcaagacgaccguggccucccugaucaacacccucaacgaccugaacgagacccuggucacgaugccgcucggguacgugacccacggccugaaccuggaggaggcggcccgguacaugcgcagccucaaggugcccgccaccgucuccgugagcucccccgacgccgugaccgccuacaacggguaccugacgagcuccagcaagacccccgaggagcacuucaucgagaccaucucccuggcgggcagcuacaaggacuggagcuacuccggccagagcacccagcucgggaucgaguuccugaagcggggcgacaaguccgucuacuacacgagcaacccgaccaccuuccaccuggacggggaggugaucaccuucgacaaccucaagacgcugcugucccuccgcgaggugcggaccaucaaggucuucaccaccguggacaacaucaaccugcacacgcagguggucgacaugagcaugaccuacggccagcaguucggccccaccuaccuggacggggccgacgugaccaagaucaagccccacaacucccacgagggcaagacguucuacgugcucccgaacgacgacacccugcgcgucgaggccuucgaguacuaccacaccaccgaccccagcuuccuggggcgguacauguccgcccucaaccacacgaagaaguggaaguacccccaggugaacggccugaccagcaucaagugggccgacaacaacugcuaccuggcgaccgcccuccugacccugcagcagaucgagcucaaguucaaccccccggcccugcaggacgccuacuaccgcgcgcgggccggggaggccgccaacuucugcgcccugauccucgcguacugcaacaagacggugggcgagcugggcgacguccgcgagaccauguccuaccuguuccagcacgccaaccucgacagcugcaagcgggugcugaacgucgugugcaagaccugcgggcagcagcagaccacccugaagggcguggaggccgucauguacauggggacgcucuccuacgagcaguucaagaagggcgugcagauccccugcaccugcgggaagcaggccaccaaguaccuggugcagcaggagagccccuucgucaugauguccgcccccccggcgcaguacgagcugaagcacggcaccuucacgugcgccagcgaguacaccggcaacuaccagugcgggcacuacaagcacaucaccuccaaggagacccucuacugcaucgacggcgcccugcugacgaagagcagcgaguacaaggggcccaucaccgacguguucuacaaggagaacuccuacaccaccacgaucaagcccgugaccuacaagcucgacggcgucgugugcaccgagaucgaccccaagcuggacaacuacuacaagaaggacaacagcuacuucaccgagcagccgaucgaccuggugcccaaccagcccuaccccaacgccuccuucgacaacuucaaguucgucugcgacaacaucaaguucgccgacgaccucaaccagcugacgggguacaagaagccggcgagccgcgagcugaaggugaccuucuuccccgaccucaacggcgacguggucgccaucgacuacaagcacuacacccccuccuucaagaagggcgccaagcugcugcacaagcccaucguguggcacgugaacaacgccaccaacaaggcgacguacaagccgaacaccuggugcauccggugccucuggagcaccaagcccgucgagaccuccaacagcuucgacgugcugaaguccgaggacgcccaggggauggacaaccuggccugcgaggaccucaagcccgugagcgaggaggucguggagaaccccacgauccagaaggacgugcuggagugcaacgucaagaccaccgagguggugggcgacaucauccugaagccggccaacaacucccucaagaucaccgaggaggucgggcacacggaccugauggccgcguacguggacaacagcucccugaccaucaagaagcccaacgagcucagccgcgugcugggccugaagacccucgccacccacgggcuggccgccgucaacuccgugcccugggacacgaucgccaacuacgcgaagccguuccugaacaagguggucagcaccaccaccaacaucgugacgcgcugccucaaccgggugugcaccaacuacaugcccuacuucuucacccugcugcuccagcugugcaccuucacccgcuccacgaacagccggaucaaggccuccaugcccaccaccaucgccaagaacaccgucaagagcgugggcaaguucugccuggaggccagcuucaacuaccucaagucccccaacuucagcaagcugaucaacaucaucaucugguuccugcuccuguccgugugccugggcagccucaucuacuccacggccgcgcuggggguccugaugagcaaccucggcaugccguccuacugcaccggguaccgcgagggcuaccugaacagcaccaacgugaccaucgccacguacugcaccggcuccauccccugcagcgugugccuguccgggcucgacagccuggacaccuaccccucccuggagaccauccagaucacgaucagcuccuucaagugggaccucaccgccuucggccuggucgccgagugguuccuggccuacauccucuucacccgguucuucuacgugcuggggcuggcggccaucaugcagcucuucuucagcuacuucgccgugcacuucaucuccaacagcuggcugauguggcugaucaucaaccugguccagauggcccccaucuccgcgauggugcgcauguacaucuucuucgccagcuucuacuacguguggaagagcuacguccacgugguggacggcugcaacuccagcaccugcaugaugugcuacaagcggaaccgcgccacgcgggucgagugcaccaccaucgugaacgggguccgccgguccuucuacguguacgccaacggcggcaagggguucugcaagcuccacaacuggaacugcgugaacugcgacaccuucugcgccggcagcacguucaucuccgacgaggucgcgcgcgaccugagccugcaguucaagcggccgaucaaccccaccgaccaguccagcuacaucguggacuccgugaccgucaagaacgggagcauccaccucuacuucgacaaggccggccagaagaccuacgagcgccacucccugagccacuucgugaaccuggacaaccuccgggccaacaacacgaaggggucccugcccaucaacgugaucgucuucgacggcaagagcaagugcgaggaguccagcgccaaguccgccagcguguacuacucccagcugaugugccagcccauccuccugcuggaccaggcgcucgugagcgacgucggcgacagcgccgagguggccgugaagauguucgacgccuacgucaacaccuucucccugaccuucaacgugccgauggagaagcugaagacccucguggccacggcggaggccgagcuggccaagaacgucagccuggacaacgugcucuccaccuucaucagcgccgcgcgccagggguucguggacuccgacgucgagaccaaggacgugguggagugccugaagcugagccaccaguccgacaucgaggucaccggcgacagcugcaacaacuacaugcucacguacaacaagguggagaacaugaccccccgggaccugggggccugcaucgacugcuccgcccgccacaucaacgcccagguggccaagagccacaacaucgcgcugaucuggaacgucaaggacuucaugucccucagcgagcagcugcggaagcagauccgcuccgccgccaagaagaacaaccugcccuucaagcucaccugcgccaccacgcgccagguggugaacgucgugaccaccaagaucgcccugaagggcgggugaggacuaguuauaagacugacuagcccgaugggccucccaacgggcccuccuccccuccuugcaccgagauuaauaaaaaaaaaaaaaaaaaaaaaaaaaaaaaaaaaaaaaaaaaaaaaaaaaaaaaaaaaaaaaaaaugcaucccccccccccccccccccccccccccccccaaaggcucuuuucagagccaccagaauu

SEQ ID NO: 21549 - RNA, 6058 nt, Artificial Sequence
  SARS-CoV-2__MT833962.1__non-structural protein 3 (NSP3) mRNA gc
aggagaaagcuuaccauggcccccaccaaggugaccuucggcgacgacacggucaucgaggugcagggguacaagagcgugaacaucaccuucgagcuggacgagcgcaucgacaagguccucaacgagaagugcuccgccuacaccguggagcugggcaccgaggugaacgaguucgcgugcgucguggccgacgccgugaucaagacgcugcagccggucagcgagcuccugaccccccuggggaucgaccucgacgagugguccauggccaccuacuaccuguucgacgagagcggcgaguucaagcuggccucccacauguacugcagcuucuacccccccgacgaggacgaggaggagggggacugcgaggaggaggaguucgagccguccacccaguacgaguacggcacggaggacgacuaccagggcaagccccucgaguucggggcgaccagcgccgcccugcagcccgaggaggagcaggaggaggacuggcuggacgacgacucccagcagaccgugggccagcaggacgggagcgaggacaaccagaccacgaccauccagaccaucguggagguccagccccagcucgagauggagcugaccccgguggugcagacgaucgaggucaacuccuucagcggcuaccugaagcucaccgacaacguguacaucaagaacgccgacaucguggaggaggcgaagaaggucaagcccaccgugguggucaacgccgccaacguguaccugaagcacgggggcggcguggccggggcccugaacaaggcgaccaacaacgccaugcaggucgaguccgacgacuacaucgccacgaacggcccccucaagguggggggcagcugcguccuguccggccacaaccuggccaagcacugccuccacgugguggggcccaacgucaacaagggcgaggacauccagcugcugaagagcgccuacgagaacuucaaccagcacgaggugcuccuggcgccgcugcucuccgccgggaucuucggcgccgaccccauccacagccugcgggugugcgucgacaccgugcgcaccaacguguaccuggccgucuucgacaagaaccucuacgacaagcugguguccagcuuccuggagaugaagagcgagaagcagguggagcagaagaucgccgagauccccaaggaggaggucaagcccuucaucaucgaguccaagccgagcguggagcagcggaagcaggacgacaagaagaucaaggcgugcguggaggaggucaccacgacccucgaggagaccaaguuccugaccgagaaccugcuccuguacaucgacaucaacgggaaccugcaccccgacuccgccacgcucgugagcgacaucgacaucaccuuccugaagaaggacgcccccuacaucgugggcgacgucgugcaggagggcgugcugaccgccgucgugauccccaccaagaaggccgggggcacgaccgagaugcucgcgaaggcccugcgcaaggugccgaccgacaacuacaucaccacguaccccgggcagggccugaacggguacaccgucgaggaggccaagaccgugcucaagaagugcaaguccgccuucuacauccugcccagcaucaucuccaacgagaagcaggagauccugggcaccgugagcuggaaccuccgggagaugcuggcgcacgccgaggagacccgcaagcugaugcccgucugcguggagacgaaggccaucguguccaccauccagcggaaguacaagggcaucaagauccaggagggggucguggacuacggcgcccgcuucuacuucuacaccagcaagaccacgguggccucccugaucaacacccucaacgaccugaacgagacccuggucaccaugccgcucggguacgugacgcacggccugaaccuggaggaggcggcccgguacaugcgcagccucaaggugcccgccaccgucuccgugagcucccccgacgccgugaccgccuacaacggguaccugaccagcuccagcaagacgcccgaggagcacuucaucgagaccaucucccuggcgggcagcuacaaggacuggagcuacuccggccagagcacccagcucgggaucgaguuccugaagcggggcgacaaguccgucuacuacaccagcaacccgacgaccuuccaccuggacggggaggugaucaccuucgacaaccucaagacccugcugucccuccgcgaggugcggacgaucaaggucuucaccaccguggacaacaucaaccugcacacccagguggucgacaugagcaugacguacggccagcaguucggccccaccuaccuggacggggccgacgugaccaagaucaagccccacaacucccacgagggcaagaccuucuacgugcucccgaacgacgacacgcugcgcgucgaggccuucgaguacuaccacaccaccgaccccagcuuccuggggcgguacauguccgcccucaaccacaccaagaaguggaaguacccccaggugaacggccugacgagcaucaagugggccgacaacaacugcuaccuggcgaccgcccuccugacccugcagcagaucgagcucaaguucaaccccccggcccugcaggacgccuacuaccgcgcgcgggccggggaggccgccaacuucugcgcccugauccucgcguacugcaacaagaccgugggcgagcugggcgacguccgcgagacgauguccuaccuguuccagcacgccaaccucgacagcugcaagcgggugcugaacgucgugugcaagaccugcgggcagcagcagaccacccugaagggcguggaggccgucauguacauggggacccucuccuacgagcaguucaagaagggcgugcagauccccugcacgugcgggaagcaggccaccaaguaccuggugcagcaggagagccccuucgucaugauguccgcccccccggcgcaguacgagcugaagcacggcaccuucaccugcgccagcgaguacacgggcaacuaccagugcgggcacuacaagcacaucaccuccaaggagacccucuacugcaucgacggcgcccugcugaccaagagcagcgaguacaaggggcccaucacggacguguucuacaaggagaacuccuacaccaccaccaucaagcccgugacguacaagcucgacggcgucgugugcaccgagaucgaccccaagcuggacaacuacuacaagaaggacaacagcuacuucaccgagcagccgaucgaccuggugcccaaccagcccuaccccaacgccuccuucgacaacuucaaguucgucugcgacaacaucaaguucgccgacgaccucaaccagcugaccggguacaagaagccggcgagccgcgagcugaaggugacguucuuccccgaccucaacggcgacguggucgccaucgacuacaagcacuacacccccuccuucaagaagggcgccaagcugcugcacaagcccaucguguggcacgugaacaacgccaccaacaaggcgaccuacaagccgaacacguggugcauccggugccucuggagcaccaagcccgucgagaccuccaacagcuucgacgugcugaaguccgaggacgcccaggggauggacaaccuggccugcgaggaccucaagcuggugagcgaggaggucguggagaaccccaccauccagaaggacgugcuggagugcaacgucaagacgaccgagguggugggcgacaucauccucaagcccgccaacaacucccugaagaucaucgaggaggucgggcacaccgaccugauggccgcguacguggacaacagcucccucaccaucaagaagccgaacgagcugagccgcgugcugggccucaagacgcuggccacccacgggcuggccgccgucaacuccgugcccugggacaccaucgccaacuacgcgaagcccuuccucaacaagguggucagcaccacgaccaacaucgugacccgcugccugaaccgggugugcaccaacuacaugccguacuucuucacgcugcuccugcagcugugcaccuucacccgcuccaccaacagccggaucaaggccuccaugcccaccacgaucgccaagaacaccgucaagagcgugggcaaguucugccucgaggccagcuucaacuaccugaagucccccaacuucagcaagcugaucaacaucaucaucugguuccuccugcuguccgugugccucggcagccugaucuacuccaccgccgcgcuggggguccucaugagcaaccugggcaugcccuccuacugcaccggguaccgcgagggcuaccugaacagcacgaacgugaccaucgccaccuacugcaccggcuccaucccgugcagcgugugccucuccgggcuggacagccuggacacguaccccucccucgagaccauccagaucaccaucagcuccuucaagugggaccugaccgccuucggccuggucgccgagugguuccucgccuacauccuguucacgcgguucuucuacgugcuggggcucgcggccaucaugcagcuguucuucagcuacuucgccgugcacuucaucuccaacagcuggcugauguggcugaucaucaaccucguccagauggcccccaucuccgcgauggugcgcauguacaucuucuucgccagcuucuacuacguguggaagagcuacguccacgugguggacggcugcaacuccagcaccugcaugaugugcuacaagcggaaccgcgccacccgggucgagugcaccacgaucgugaacgggguccgccgguccuucuacguguacgccaacggcggcaagggguucugcaagcugcacaacuggaacugcgugaacugcgacaccuucugcgccggcagcaccuucaucuccgacgaggucgcgcgcgaccugagccuccaguucaagcggcccaucaacccgaccgaccaguccagcuacaucguggacuccgugacggucaagaacgggagcauccaccuguacuucgacaaggccggccagaagaccuacgagcgccacucccugagccacuucgugaaccucgacaaccugcgggccaacaacaccaaggggucccugcccaucaacgugaucgucuucgacggcaagagcaagugcgaggaguccagcgccaaguccgccagcguguacuacucccagcucaugugccagcccauccugcugcucgaccaggcgcuggugagcgacgucggcgacagcgccgagguggccgugaagauguucgacgccuacgucaacaccuucuccagcacguucaacgugcccauggagaagcugaagacccucguggccaccgcggaggccgagcuggccaagaacgucucccuggacaacgugcucagcaccuucaucuccgccgcgcgccagggguucguggacagcgacgucgagacgaaggacgugguggagugccugaagcugucccaccagagcgacaucgaggucaccggcgacuccugcaacaacuacaugcucaccuacaacaagguggagaacaugaccccgcgggaccugggggccugcaucgacugcagcgcccgccacaucaacgcccagguggccaagucccacaacaucgcgcugaucuggaacgucaaggacuucaugagccucuccgagcagcugcggaagcagauccgcagcgccgccaagaagaacaaccugcccuucaagcucacgugcgccaccacccgccagguggugaacgucgugaccacgaagaucgcccugaagggcgggugaggacuaguuauaagacugacuagcccgaugggccucccaacgggcccuccuccccuccuugcaccgagauuaauaaaaaaaaaaaaaaaaaaaaaaaaaaaaaaaaaaaaaaaaaaaaaaaaaaaaaaaaaaaaaaaaugcaucccccccccccccccccccccccccccccccaaaggcucuuuucagagccaccagaauu

SEQ ID NO: 21550 - RNA, 6058 nt, Artificial Sequence
  SARS-CoV-2__MT833985.1__non-structural protein 3 (NSP3) mRNA gc
aggagaaagcuuaccauggcccccaccaaggugaccuucggcgacgacacggucaucgaggugcagggguacaagagcgugaacaucaccuucgagcuggacgagcgcaucgacaagguccucaacgagaagugcuccgccuacaccguggagcugggcaccgaggugaacgaguucgcgugcgucguggccgacgccgugaucaagacgcugcagccggucagcgagcuccugaccccccuggggaucgaccucgacgagugguccauggccaccuacuaccuguucgacgagagcggcgaguucaagcuggccucccacauguacugcagcuucuacccccccgacgaggacgaggaggagggggacugcgaggaggaggaguucgagccguccacccaguacgaguacggcacggaggacgacuaccagggcaagccccucgaguucggggcgaccagcgccgcccugcagcccgaggaggagcaggaggaggacuggcuggacgacgacucccagcagaccgugggccagcaggacgggagcgaggacaaccagaccacgaccauccagaccaucguggagguccagccccagcucgagauggagcugaccccgguggugcagacgaucgaggucaacuccuucagcggcuaccugaagcucaccgacaacguguacaucaagaacgccgacaucguggaggaggcgaagaaggucaagcccaccgugguggucaacgccgccaacguguaccugaagcacgggggcggcguggccggggcccugaacaaggcgaccaacaacgccaugcaggucgaguccgacgacuacaucgccacgaacggcccccucaagguggggggcagcugcguccuguccggccacaaccuggccaagcacugccuccacgugguggggcccaacgucaacaagggcgaggacauccagcugcugaagagcgccuacgagaacuucaaccagcacgaggugcuccuggcgccgcugcucuccgccgggaucuucggcgccgaccccauccacagccugcgggugugcgucgacaccgugcgcaccaacguguaccuggccgucuucgacaagaaccucuacgacaagcugguguccagcuuccuggagaugaagagcgagaagcagguggagcagaagaucgccgagauccccaaggaggaggucaagcccuucaucaccgaguccaagccgagcguggagcagcggaagcaggacgacaagaagaucaaggcgugcguggaggaggucacgaccacccucgaggagaccaaguuccugacggagaaccugcuccuguacaucgacaucaacgggaaccugcaccccgacuccgccacccucgugagcgacaucgacaucaccuuccugaagaaggacgcccccuacaucgugggcgacgucgugcaggagggcgugcugaccgccgucgugauccccacgaagaaggccgggggcaccaccgagaugcucgcgaaggcccugcgcaaggugccgaccgacaacuacaucacgaccuaccccgggcagggccugaacggguacaccgucgaggaggccaagaccgugcucaagaagugcaaguccgccuucuacauccugcccagcaucaucuccaacgagaagcaggagauccugggcaccgugagcuggaaccuccgggagaugcuggcgcacgccgaggagacgcgcaagcugaugcccgucugcguggagaccaaggccaucguguccaccauccagcggaaguacaagggcaucaagauccaggagggggucguggacuacggcgcccgcuucuacuucuacaccagcaagacgaccguggccucccugaucaacacccucaacgaccugaacgagacccuggucacgaugccgcucggguacgugacccacggccugaaccuggaggaggcggcccgguacaugcgcagccucaaggugcccgccaccgucuccgugagcucccccgacgccgugaccgccuacaacggguaccugacgagcuccagcaagacccccgaggagcacuucaucgagaccaucucccuggcgggcagcuacaaggacuggagcuacuccggccagagcacccagcucgggaucgaguuccugaagcggggcgacaaguccgucuacuacacgagcaacccgaccaccuuccaccuggacggggaggugaucaccuucgacaaccucaagacgcugcugucccuccgcgaggugcggaccaucaaggucuucaccaccguggacaacaucaaccugcacacgcagguggucgacaugagcaugaccuacggccagcaguucggccccaccuaccuggacggggccgacgugaccaagaucaagccccacaacucccacgagggcaagacguucuacgugcucccgaacgacgacacccugcgcgucgaggccuucgaguacuaccacaccaccgaccccagcuuccuggggcgguacauguccgcccucaaccacacgaagaaguggaaguacccccaggugaacggccugaccagcaucaagugggccgacaacaacugcuaccuggcgaccgcccuccugacccugcagcagaucgagcucaaguucaaccccccggcccugcaggacgccuacuaccgcgcgcgggccggggaggccgccaacuucugcgcccugauccucgcguacugcaacaagacggugggcgagcugggcgacguccgcgagaccauguccuaccuguuccagcacgccaaccucgacagcugcaagcgggugcugaacgucgugugcaagaccugcgggcagcagcagaccacccugaagggcguggaggccgucauguacauggggacgcucuccuacgagcaguucaagaagggcgugcagauccccugcaccugcgggaagcaggccaccaaguaccuggugcagcaggagagccccuucgucaugauguccgcccccccggcgcaguacgagcugaagcacggcaccuucacgugcgccagcgaguacaccggcaacuaccagugcgggcacuacaagcacaucaccuccaaggagacccucuacugcaucgacggcgcccugcugacgaagagcagcgaguacaaggggcccaucaccgacguguucuacaaggagaacuccuacaccaccacgaucaagcccgugaccuacaagcucgacggcgucgugugcaccgagaucgaccccaagcuggacaacuacuacaagaaggacaacagcuacuucaccgagcagccgaucgaccuggugcccaaccagcccuaccccaacgccuccuucgacaacuucaaguucgucugcgacaacaucaaguucgccgacgaccucaaccagcugacgggguacaagaagccggcgagccgcgagcugaaggugaccuucuuccccgaccucaacggcgacguggucgccaucgacuacaagcacuacacccccuccuucaagaagggcgccaagcugcugcacaagcccaucguguggcacgugaacaacgccaccaacaaggcgacguacaagccgaacaccuggugcauccggugccucuggagcaccaagcccgucgagaccuccaacagcuucgacgugcugaaguccgaggacgcccaggggauggacaaccuggccugcgaggaccucaagcccgugagcgaggaggucguggagaaccccacgauccagaaggacgugcuggagugcaacgucaagaccaccgagguggugggcgacaucauccugaagccggccaacaacucccucaagaucaucgaggaggucgggcacaccgaccugauggccgcguacguggacaacagcucccugacgaucaagaagcccaacgagcucagccgcgugcugggccugaagacccucgccacccacgggcuggccgccgucaacuccgugcccugggacaccaucgccaacuacgcgaagccguuccugaacaagguggucagcacgaccaccaacaucgugacccgcugccucaaccgggugugcacgaacuacaugcccuacuucuucacccugcugcuccagcugugcaccuucacccgcuccaccaacagccggaucaaggccuccaugcccacgaccaucgccaagaacaccgucaagagcgugggcaaguucugccuggaggccagcuucaacuaccucaagucccccaacuucagcaagcugaucaacaucaucaucugguuccugcuccuguccgugugccugggcagccucaucuacuccaccgccgcgcuggggguccugaugagcaaccucggcaugccguccuacugcacgggguaccgcgagggcuaccugaacagcaccaacgugaccaucgccaccuacugcacgggcuccauccccugcagcgugugccuguccgggcucgacagccuggacaccuaccccucccuggagaccauccagaucaccaucagcuccuucaagugggaccucacggccuucggccuggucgccgagugguuccuggccuacauccucuucacccgguucuucuacgugcuggggcuggcggccaucaugcagcucuucuucagcuacuucgccgugcacuucaucuccaacagcuggcugauguggcugaucaucaaccugguccagauggcccccaucuccgcgauggugcgcauguacaucuucuucgccagcuucuacuacguguggaagagcuacguccacgugguggacggcugcaacuccagcaccugcaugaugugcuacaagcggaaccgcgccacccgggucgagugcacgaccaucgugaacgggguccgccgguccuucuacguguacgccaacggcggcaagggguucugcaagcuccacaacuggaacugcgugaacugcgacaccuucugcgccggcagcaccuucaucuccgacgaggucgcgcgcgaccugagccugcaguucaagcggccgaucaaccccacggaccaguccagcuacaucguggacuccgugaccgucaagaacgggagcauccaccucuacuucgacaaggccggccagaagaccuacgagcgccacucccugagccacuucgugaaccuggacaaccuccgggccaacaacaccaaggggucccugcccaucaacgugaucgucuucgacggcaagagcaagugcgaggaguccagcgccaaguccgccagcguguacuacucccagcugaugugccagcccauccuccugcuggaccaggcgcucgugagcgacgucggcgacagcgccgagguggccgugaagauguucgacgccuacgucaacacguucuccagcaccuucaacgugccgauggagaagcugaagacccugguggccaccgcggaggccgagcucgccaagaacgucucccuggacaacgugcugagcacguucaucuccgccgcgcgccagggguucguggacagcgacgucgagaccaaggacgugguggagugccucaagcugucccaccagagcgacaucgaggucaccggcgacuccugcaacaacuacaugcugaccuacaacaagguggagaacaugacgccccgggaccucggggccugcaucgacugcagcgcccgccacaucaacgcccagguggccaagucccacaacaucgcgcugaucuggaacgucaaggacuucaugagccuguccgagcagcuccggaagcagauccgcagcgccgccaagaagaacaaccugcccuucaagcugaccugcgccaccacccgccagguggugaacgucgugacgaccaagaucgcccucaagggcgggugaggacuaguuauaagacugacuagcccgaugggccucccaacgggcccuccuccccuccuugcaccgagauuaauaaaaaaaaaaaaaaaaaaaaaaaaaaaaaaaaaaaaaaaaaaaaaaaaaaaaaaaaaaaaaaaaugcaucccccccccccccccccccccccccccccccaaaggcucuuuucagagccaccagaauu

SEQ ID NO: 21551 - RNA, 6058 nt, Artificial Sequence
  SARS-CoV-2__MT834038.1__non-structural protein 3 (NSP3) mRNA gc
aggagaaagcuuaccauggcccccaccaaggugaccuucggcgacgacacggucaucgaggugcagggguacaagagcgugaacaucaccuucgagcuggacgagcgcaucgacaagguccucaacgagaagugcuccgccuacaccguggagcugggcaccgaggugaacgaguucgcgugcgucguggccgacgccgugaucaagacgcugcagccggucagcgagcuccugaccccccuggggaucgaccucgacgagugguccauggccaccuacuaccuguucgacgagagcggcgaguucaagcuggccucccacauguacugcagcuucuacccccccgacgaggacgaggaggagggggacugcgaggaggaggaguucgagccguccacccaguacgaguacggcacggaggacgacuaccagggcaagccccucgaguucggggcgaccagcgccgcccugcagcccgaggaggagcaggaggaggacuggcuggacgacgacucccagcagaccgugggccagcaggacgggagcgaggacaaccagaccacgaccauccagaccaucguggagguccagccccagcucgagauggagcugaccccgguggugcagacgaucgaggucaacuccuucagcggcuaccugaagcucaccgacaacguguacaucaagaacgccgacaucguggaggaggcgaagaaggucaagcccaccgugguggucaacgccgccaacguguaccugaagcacgggggcggcguggccggggcccugaacaaggcgaccaacaacgccaugcaggucgaguccgacgacuacaucgccacgaacggcccccucaagguggggggcagcugcguccuguccggccacaaccuggccaagcacugccuccacgugguggggcccaacgucaacaagggcgaggacauccagcugcugaagagcgccuacgagaacuucaaccagcacgaggugcuccuggcgccgcugcucuccgccgggaucuucggcgccgaccccauccacagccugcgggugugcgucgacaccgugcgcaccaacguguaccuggccgucuucgacaagaaccucuacgacaagcugguguccagcuuccuggagaugaagagcgagaagcagguggagcagaagaucgccgagauccccaaggaggaggucaagcccuucaucaccgaguccaagccgagcguggagcagcggaagcaggacgacaagaagaucaaggcgugcguggaggaggucacgaccacccucgaggagaccaaguuccugacggagaaccugcuccuguacaucgacaucaacgggaaccugcaccccgacuccgccacccucgugagcgacaucgacaucaccuuccugaagaaggacgcccccuacaucgugggcgacgucgugcaggagggcgugcugaccgccgucgugauccccacgaagaaggccgggggcaccaccgagaugcucgcgaaggcccugcgcaaggugccgaccgacaacuacaucacgaccuaccccgggcagggccugaacggguacaccgucgaggaggccaagaccgugcucaagaagugcaaguccgccuucuacauccugcccagcaucaucuccaacgagaagcaggagauccugggcaccgugagcuggaaccuccgggagaugcuggcgcacgccgaggagacgcgcaagcugaugcccgucugcguggagaccaaggccaucguguccaccauccagcggaaguacaagggcaucaagauccaggagggggucguggacuacggcgcccgcuucuacuucuacaccagcaagacgaccguggccucccugaucaacacccucaacgaccugaacgagacccuggucacgaugccgcucggguacgugacccacggccugaaccuggaggaggcggcccgguacaugcgcagccucaaggugcccgccaccgucuccgugagcucccccgacgccgugaccgccuacaacggguaccugacgagcuccagcaagacccccgaggagcacuucaucgagaccaucucccuggcgggcagcuacaaggacuggagcuacuccggccagagcacccagcucgggaucgaguuccugaagcggggcgacaaguccgucuacuacacgagcaacccgaccaccuuccaccuggacggggaggugaucaccuucgacaaccucaagacgcugcugucccuccgcgaggugcggaccaucaaggucuucaccaccguggacaacaucaaccugcacacgcagguggucgacaugagcaugaccuacggccagcaguucggccccaccuaccuggacggggccgacgugaccaagaucaagccccacaacucccacgagggcaagacguucuacgugcucccgaacgacgacacccugcgcgucgaggccuucgaguacuaccacaccaccgaccccagcuuccuggggcgguacauguccgcccucaaccacacgaagaaguggaaguacccccaggugaacggccugaccagcaucaagugggccgacaacaacugcuaccuggcgaccgcccuccugacccugcagcagaucgagcucaaguucaaccccccggcccugcaggacgccuacuaccgcgcgcgggccggggaggccgccaacuucugcgcccugauccucgcguacugcaacaagacggugggcgagcugggcgacguccgcgagaccauguccuaccuguuccagcacgccaaccucgacagcugcaagcgggugcugaacgucgugugcaagaccugcgggcagcagcagaccacccugaagggcguggaggccgucauguacauggggacgcucuccuacgagcaguucaagaagggcgugcagauccccugcaccugcgggaagcaggccaccaaguaccuggugcagcaggagagccccuucgucaugauguccgcccccccggcgcaguacgagcugaagcacggcaccuucacgugcgccagcgaguacaccggcaacuaccagugcgggcacuacaagcacaucaccuccaaggagacccucuacugcaucgacggcgcccugcugacgaagagcagcgaguacaaggggcccaucaccgacguguucuacaaggagaacuccuacaccaccacgaucaagcccgugaccuacaagcucgacggcgucgugugcaccgagaucgaccccaagcuggacaacuacuacaagaaggacaacagcuacuucaccgagcagccgaucgaccuggugcccaaccagcccuaccccaacgccuccuucgacaacuucaaguucgucugcgacaacaucaaguucgccgacgaccucaaccagcugacgggguacaagaagccggcgagccgcgagcugaaggugaccuucuuccccgaccucaacggcgacguggucgccaucgacuacaagcacuacacccccuccuucaagaagggcgccaagcugcugcacaagcccaucguguggcacgugaacaacgccaccaacaaggcgacguacaagccgaacaccuggugcauccggugccucuggagcaccaagcccgucgagaccuccaacagcuucgacgugcugaaguccgaggacgcccaggggauggacaaccuggccugcgaggaccucaagcccgugagcgaggaggucguggagaaccccacgauccagaaggacgugcuggagugcaacgucaagaccaccgagguggugggcgacaucauccugaagccggccaacaacucccucaagaucaccgaggaggucgggcacacggaccugauggccgcguacguggacaacagcucccugaccaucaagaagcccaacgagcucagccgcgugcugggccugaagacccucgccacccacgggcuggccgccgucaacuccgugcccugggacacgaucgccaacuacgcgaagccguuccugaacaagguggucagcaccaccaccaacaucgugacgcgcugccucaaccgggugugcaccaacuacaugcccuacuucuucacccugcugcuccagcugugcaccuucacccgcuccacgaacagccggaucaaggccuccaugcccaccaccaucgccaagaacaccgucaagagcgugggcaaguucugccuggaggccagcuucaacuaccucaagucccccaacuucagcaagcugaucaacaucaucaucugguuccugcuccuguccgugugccugggcagccucaucuacuccacggccgcgcuggggguccugaugagcaaccucggcaugccguccuacugcaccggguaccgcgagggcuaccugaacagcaccaacgugaccaucgccacguacugcaccggcuccauccccugcagcgugugccuguccgggcucgacagccuggacaucuaccccucccuggagaccauccagaucaccaucagcuccuucaagugggaccucacggccuucggccuggucgccgagugguuccuggccuacauccucuucacccgguucuucuacgugcuggggcuggcggccaucaugcagcucuucuucagcuacuucgccgugcacuucaucuccaacagcuggcugauguggcugaucaucaaccugguccagauggcccccaucuccgcgauggugcgcauguacaucuucuucgccagcuucuacuacguguggaagagcuacguccacgugguggacggcugcaacuccagcaccugcaugaugugcuacaagcggaaccgcgccacccgggucgagugcacgaccaucgugaacgggguccgccgguccuucuacguguacgccaacggcggcaagggguucugcaagcuccacaacuggaacugcgugaacugcgacaccuucugcgccggcagcaccuucaucuccgacgaggucgcgcgcgaccugagccugcaguucaagcggccgaucaaccccacggaccaguccagcuacaucguggacuccgugaccgucaagaacgggagcauccaccucuacuucgacaaggccggccagaagaccuacgagcgccacucccugagccacuucgugaaccuggacaaccuccgggccaacaacaccaaggggucccugcccaucaacgugaucgucuucgacggcaagagcaagugcgaggaguccagcgccaaguccgccagcguguacuacucccagcugaugugccagcccauccuccugcuggaccaggcgcucgugagcgacgucggcgacagcgccgagguggccgugaagauguucgacgccuacgucaacacguucuccagcaccuucaacgugccgauggagaagcugaagacccugguggccaccgcggaggccgagcucgccaagaacgucucccuggacaacgugcugagcacguucaucuccgccgcgcgccagggguucguggacagcgacgucgagaccaaggacgugguggagugccucaagcugucccaccagagcgacaucgaggucaccggcgacuccugcaacaacuacaugcugaccuacaacaagguggagaacaugacgccccgggaccucggggccugcaucgacugcagcgcccgccacaucaacgcccagguggccaagucccacaacaucgcgcugaucuggaacgucaaggacuucaugagccuguccgagcagcuccggaagcagauccgcagcgccgccaagaagaacaaccugcccuucaagcugaccugcgccaccacccgccagguggugaacgucgugacgaccaagaucgcccucaagggcgggugaggacuaguuauaagacugacuagcccgaugggccucccaacgggcccuccuccccuccuugcaccgagauuaauaaaaaaaaaaaaaaaaaaaaaaaaaaaaaaaaaaaaaaaaaaaaaaaaaaaaaaaaaaaaaaaaugcaucccccccccccccccccccccccccccccccaaaggcucuuuucagagccaccagaauu

SEQ ID NO: 21552 - RNA, 6058 nt, Artificial Sequence
  SARS-CoV-2__MT834080.1__non-structural protein 3 (NSP3) mRNA gc
aggagaaagcuuaccauggcccccaccaaggugaccuucggcgacgacacggucaucgaggugcagggguacaagagcgugaacaucaccuucgagcuggacgagcgcaucgacaagguccucaacgagaagugcuccgccuacaccguggagcugggcaccgaggugaacgaguucgcgugcgucguggccgacgccgugaucaagacgcugcagccggucagcgagcuccugaccccccuggggaucgaccucgacgagugguccauggccaccuacuaccuguucgacgagagcggcgaguucaagcuggccucccacauguacugcagcuucuacccccccgacgaggacgaggaggagggggacugcgaggaggaggaguucgagccguccacccaguacgaguacggcacggaggacgacuaccagggcaagccccucgaguucggggcgaccagcgccgcccugcagcccgaggaggagcaggaggaggacuggcuggacgacgacucccagcagaccgugggccagcaggacgggagcgaggacaaccagaccacgaccauccagaccaucguggagguccagccccagcucgagauggagcugaccccgguggugcagacgaucgaggucaacuccuucagcggcuaccugaagcucaccgacaacguguacaucaagaacgccgacaucguggaggaggcgaagaaggucaagcccaccgugguggucaacgccgccaacguguaccugaagcacgggggcggcguggccggggcccugaacaaggcgaccaacaacgccaugcaggucgaguccgacgacuacaucgccacgaacggcccccucaagguggggggcagcugcguccuguccggccacaaccuggccaagcacugccuccacgugguggggcccaacgucaacaagggcgaggacauccagcugcugaagagcgccuacgagaacuucaaccagcacgaggugcuccuggcgccgcugcucuccgccgggaucuucggcgccgaccccauccacagccugcgggugugcgucgacaccgugcgcaccaacguguaccuggccgucuucgacaagaaccucuacgacaagcugguguccagcuuccuggagaugaagagcgagaagcagguggagcagaagaucgccgagauccccaaggaggaggucaagcccuucaucaccgaguccaagccgagcguggagcagcggaagcaggacgacaagaagaucaaggcgugcguggaggaggucacgaccacccucgaggagaccaaguuccugacggagaaccugcuccuguacaucgacaucaacgggaaccugcaccccgacuccgccacccucgugagcgacaucgacaucaccuuccugaagaaggacgcccccuacaucgugggcgacgucgugcaggagggcgugcugaccgccgucgugauccccacgaagaaggccgggggcaccaccgagaugcucgcgaaggcccugcgcaaggugccgaccgacaacuacaucacgaccuaccccgggcagggccugaacggguacaccgucgaggaggccaagaccgugcucaagaagugcaaguccgccuucuacauccugcccagcaucaucuccaacgagaagcaggagauccugggcaccgugagcuggaaccuccgggagaugcuggcgcacgccgaggagacgcgcaagcugaugcccgucugcguggagaccaaggccaucguguccaccauccagcggaaguacaagggcaucaagauccaggagggggucguggacuacggcgcccgcuucuacuucuacaccagcaagacgaccguggccucccugaucaacacccucaacgaccugaacgagacccuggucacgaugccgcucggguacgugacccacggccugaaccuggaggaggcggcccgguacaugcgcagccucaaggugcccgccaccgucuccgugagcucccccgacgccgugaccgccuacaacggguaccugacgagcuccagcaagacccccgaggagcacuucaucgagaccaucucccuggcgggcagcuacaaggacuggagcuacuccggccagagcacccagcucgggaucgaguuccugaagcggggcgacaaguccgucuacuacacgagcaacccgaccaccuuccaccuggacggggaggugaucaccuucgacaaccucaagacgcugcugucccuccgcgaggugcggaccaucaaggucuucaccaccguggacaacaucaaccugcacacgcagguggucgacaugagcaugaccuacggccagcaguucggccccaccuaccuggacggggccgacgugaccaaggugaagccccacaacucccacgagggcaagacguucuacguccucccgaacgacgacacccugcgcguggaggccuucgaguacuaccacaccaccgaccccagcuuccuggggcgguacauguccgcccucaaccacacgaagaaguggaaguacccccaggugaacggccugaccagcaucaagugggccgacaacaacugcuaccuggcgaccgcccuccugacccugcagcagaucgagcucaaguucaaccccccggcccugcaggacgccuacuaccgcgcgcgggccggggaggccgccaacuucugcgcccugauccucgcguacugcaacaagacggucggcgagcugggcgacgugcgcgagaccauguccuaccuguuccagcacgccaaccucgacagcugcaagcggguccugaacguggugugcaagaccugcgggcagcagcagaccacccugaagggcgucgaggccgugauguacauggggacgcucuccuacgagcaguucaagaagggcgugcagauccccugcaccugcgggaagcaggccaccaaguaccugguccagcaggagagccccuucgugaugauguccgcccccccggcgcaguacgagcugaagcacggcaccuucacgugcgccagcgaguacaccggcaacuaccagugcgggcacuacaagcacaucaccuccaaggagacccucuacugcaucgacggcgcccugcugacgaagagcagcgaguacaaggggcccaucaccgacguguucuacaaggagaacuccuacaccaccacgaucaagcccgucaccuacaagcucgacggcguggugugcaccgagaucgaccccaagcuggacaacuacuacaagaaggacaacagcuacuucaccgagcagccgaucgaccugguccccaaccagcccuaccccaacgccuccuucgacaacuucaaguucgugugcgacaacaucaaguucgccgacgaccucaaccagcugacgggguacaagaagccggcgagccgcgagcugaaggugaccuucuuccccgaccucaacggcgacgucguggccaucgacuacaagcacuacacccccuccuucaagaagggcgccaagcugcugcacaagcccaucguguggcacgucaacaacgccaccaacaaggcgacguacaagccgaacaccuggugcauccggugccucuggagcaccaagcccguggagaccuccaacagcuucgacgugcugaaguccgaggacgcccaggggauggacaaccuggccugcgaggaccucaagcccgucagcgaggaggugguggagaaccccacgauccagaaggacguccuggagugcaacgugaagaccaccgagguggucggcgacaucauccugaagccggccaacaacucccucaagaucaccgaggagguggggcacacggaccugauggccgcguacguggacaacagcucccugaccaucaagaagcccaacgagcucagccgcguccugggccugaagacccucgccacccacgggcuggccgccgugaacuccgugcccugggacacgaucgccaacuacgcgaagccguuccugaacaaggucgugagcaccaccaccaacaucgugacgcgcugccucaaccgggucugcaccaacuacaugcccuacuucuucacccugcugcuccagcugugcaccuucacccgcuccacgaacagccggaucaaggccuccaugcccaccaccaucgccaagaacaccgugaagagcgugggcaaguucugccuggaggccagcuucaacuaccucaagucccccaacuucagcaagcugaucaacaucaucaucugguuccugcuccuguccgucugccugggcagccucaucuacuccacggccgcgcugggggugcugaugagcaaccucggcaugccguccuacugcaccggguaccgcgagggcuaccugaacagcaccaacgugaccaucgccacguacugcaccggcuccauccccugcagcgucugccuguccgggcucgacagccuggacaccuaccccucccuggagaccauccagaucacgaucagcuccuucaagugggaccucaccgccuucggccugguggccgagugguuccuggccuacauccucuucacccgguucuucuacgugcuggggcuggcggccaucaugcagcucuucuucagcuacuucgccguccacuucaucuccaacagcuggcugauguggcugaucaucaaccuggugcagauggcccccaucuccgcgauggugcgcauguacaucuucuucgccagcuucuacuacgucuggaagagcuacgugcacguggucgacggcugcaacuccagcaccugcaugaugugcuacaagcggaaccgcgccacgcggguggagugcaccaccaucgucaacggggugcgccgguccuucuacguguacgccaacggcggcaagggguucugcaagcuccacaacuggaacugcgucaacugcgacaccuucugcgccggcagcacguucaucuccgacgagguggcgcgcgaccugagccugcaguucaagcggccgaucaaccccaccgaccaguccagcuacaucguggacuccgucaccgugaagaacgggagcauccaccucuacuucgacaaggccggccagaagaccuacgagcgccacucccugagccacuucgugaaccuggacaaccuccgggccaacaacacgaaggggucccugcccaucaacgucaucguguucgacggcaagagcaagugcgaggaguccagcgccaaguccgccagcguguacuacucccagcugaugugccagcccauccuccugcuggaccaggcgcucgucagcgacgugggcgacagcgccgagguggccgucaagauguucgacgccuacgugaacaccuucuccagcaccuucaacgugccgauggagaagcugaagacccuggucgccacggcggaggccgagcucgccaagaacgugucccuggacaacgugcugagcaccuucaucuccgccgcgcgccagggguucgucgacagcgacguggagaccaaggacguggucgagugccucaagcugucccaccagagcgacaucgaggugaccggcgacuccugcaacaacuacaugcugacguacaacaagguggagaacaugaccccccgggaccucggggccugcaucgacugcagcgcccgccacaucaacgcccaggucgccaagucccacaacaucgcgcugaucuggaacgugaaggacuucaugagccuguccgagcagcuccggaagcagauccgcagcgccgccaagaagaacaaccugcccuucaagcugaccugcgccaccacgcgccagguggucaacguggugaccaccaagaucgcccucaagggcgggugaggacuaguuauaagacugacuagcccgaugggccucccaacgggcccuccuccccuccuugcaccgagauuaauaaaaaaaaaaaaaaaaaaaaaaaaaaaaaaaaaaaaaaaaaaaaaaaaaaaaaaaaaaaaaaaaugcaucccccccccccccccccccccccccccccccaaaggcucuuuucagagccaccagaauu

SEQ ID NO: 21553 - RNA, 6058 nt, Artificial Sequence
  SARS-CoV-2__MT834097.1__non-structural protein 3 (NSP3) mRNA gc
aggagaaagcuuaccauggcccccaccaaggugaccuucggcgacgacacggucaucgaggugcagggguacaagagcgugaacaucaccuucgagcuggacgagcgcaucgacaagguccucaacgagaagugcuccgccuacaccguggagcugggcaccgaggugaacgaguucgcgugcgucguggccgacgccgugaucaagacgcugcagccggucagcgagcuccugaccccccuggggaucgaccucgacgagugguccauggccaccuacuaccuguucgacgagagcggcgaguucaagcuggccucccacauguacugcagcuucuacccccccgacgaggacgaggaggagggggacugcgaggaggaggaguucgagccguccacccaguacgaguacggcacggaggacgacuaccagggcaagccccucgaguucggggcgaccagcgccgcccugcagcccgaggaggagcaggaggaggacuggcuggacgacgacucccagcagaccgugggccagcaggacgggagcgaggacaaccagaccacgaccauccagaccaucguggagguccagccccagcucgagauggagcugaccccgguggugcagacgaucgaggucaacuccuucagcggcuaccugaagcucaccgacaacguguacaucaagaacgccgacaucguggaggaggcgaagaaggucaagcccaccgugguggucaacgccgccaacguguaccugaagcacgggggcggcguggccggggcccugaacaaggcgaccaacaacgccaugcaggucgaguccgacgacuacaucgccacgaacggcccccucaagguggggggcagcugcguccuguccggccacaaccuggccaagcacugccuccacgugguggggcccaacgucaacaagggcgaggacauccagcugcugaagagcgccuacgagaacuucaaccagcacgaggugcuccuggcgccgcugcucuccgccgggaucuucggcgccgaccccauccacagccugcgggugugcgucgacaccgugcgcaccaacguguaccuggccgucuucgacaagaaccucuacgacaagcugguguccagcuuccuggagaugaagagcgagaagcagguggagcagaagaucgccgagauccccaaggaggaggucaagcccuucaucaccgaguccaagccgagcguggagcagcggaagcaggacgacaagaagaucaaggcgugcguggaggaggucacgaccacccucgaggagaccaaguuccugacggagaaccugcuccuguacaucgacaucaacgggaaccugcaccccgacuccgccacccucgugagcgacaucgacaucaccuuccugaagaaggacgcccccuacaucgugggcgacgucgugcaggagggcgugcugaccgccgucgugauccccacgaagaaggccgggggcaccaccgggaugcucgcgaaggcccugcgcaaggugccgaccgacaacuacaucacgaccuaccccggccaggggcugaacggcuacaccgucgaggaggccaagaccgugcucaagaagugcaaguccgccuucuacauccugcccagcaucaucuccaacgagaagcaggagauccugggcaccgugagcuggaaccuccgggagaugcuggcgcacgccgaggagacgcgcaagcugaugcccgucugcguggagaccaaggccaucguguccaccauccagcggaaguacaaggggaucaagauccaggagggcgucguggacuacggggcccgcuucuacuucuacaccagcaagacgaccguggccucccugaucaacacccucaacgaccugaacgagacccuggucacgaugccgcucggcuacgugacccacgggcugaaccuggaggaggcggcccgguacaugcgcagccucaaggugcccgccaccgucuccgugagcucccccgacgccgugaccgccuacaacggcuaccugacgagcuccagcaagacccccgaggagcacuucaucgagaccaucucccuggcgggcagcuacaaggacuggagcuacuccgggcagagcacccagcucggcaucgaguuccugaagcggggggacaaguccgucuacuacacgagcaacccgaccaccuuccaccuggacggcgaggugaucaccuucgacaaccucaagacgcugcugucccuccgcgaggugcggaccaucaaggucuucaccaccguggacaacaucaaccugcacacgcagguggucgacaugagcaugaccuacggccagcaguucgggcccaccuaccuggacggcgccgacgugaccaagaucaagccccacaacucccacgaggggaagacguucuacgugcucccgaacgacgacacccugcgcgucgaggccuucgaguacuaccacaccaccgaccccagcuuccugggccgguacauguccgcccucaaccacacgaagaaguggaaguacccccaggugaacgggcugaccagcaucaagugggccgacaacaacugcuaccuggcgaccgcccuccugacccugcagcagaucgagcucaaguucaaccccccggcccugcaggacgccuacuaccgcgcgcgggccggcgaggccgccaacuucugcgcccugauccucgcguacugcaacaagacggugggcgagcugggggacguccgcgagaccauguccuaccuguuccagcacgccaaccucgacagcugcaagcgggugcugaacgucgugugcaagaccugcggccagcagcagaccacccugaaggggguggaggccgucauguacaugggcacgcucuccuacgagcaguucaagaagggggugcagauccccugcaccugcggcaagcaggccaccaaguaccuggugcagcaggagagccccuucgucaugauguccgcccccccggcgcaguacgagcugaagcacggcaccuucacgugcgccagcgaguacaccgggaacuaccagugcggccacuacaagcacaucaccuccaaggagacccucuacugcaucgacggggcccugcugacgaagagcagcgaguacaagggccccaucaccgacguguucuacaaggagaacuccuacaccaccacgaucaagcccgugaccuacaagcucgacggggucgugugcaccgagaucgaccccaagcuggacaacuacuacaagaaggacaacagcuacuucaccgagcagccgaucgaccuggugcccaaccagcccuaccccaacgccuccuucgacaacuucaaguucgucugcgacaacaucaaguucgccgacgaccucaaccagcugacgggcuacaagaagccggcgagccgcgagcugaaggugaccuucuuccccgaccucaacggcgacguggucgccaucgacuacaagcacuacacccccuccuucaagaagggggccaagcugcugcacaagcccaucguguggcacgugaacaacgccaccaacaaggcgacguacaagccgaacaucuggugcauccggugccucuggagcaccaagcccgucgagaccuccaacagcuucgacgugcugaaguccgaggacgcccagggcauggacaaccuggccugcgaggaccucaagcccgugagcgaggaggucguggagaaccccaccauccagaaggacgugcuggagugcaacgucaagacgaccgagguggugggggacaucauccugaagccggccaacaacucccucaagaucaccgaggaggucggccacaccgaccugauggccgcguacguggacaacagcucccugacgaucaagaagcccaacgagcucagccgcgugcuggggcugaagacccucgccacccacggccuggccgccgucaacuccgugcccugggacaccaucgccaacuacgcgaagccguuccugaacaagguggucagcacgaccaccaacaucgugacccgcugccucaaccgggugugcacgaacuacaugcccuacuucuucacccugcugcuccagcugugcaccuucacccgcuccaccaacagccggaucaaggccuccaugcccacgaccaucgccaagaacaccgucaagagcgugggcaaguucugccuggaggccagcuucaacuaccucaagucccccaacuucagcaagcugaucaacaucaucaucugguuccugcuccuguccgugugccuggggagccucaucuacuccaccgccgcgcugggcguccugaugagcaaccucgggaugccguccuacugcacgggcuaccgcgagggcuaccugaacagcaccaacgugaccaucgccaccuacugcacgggguccauccccugcagcgugugccuguccggccucgacagccuggacaccuaccccucccuggagaccauccagaucaccaucagcuccuucaagugggaccucacggccuucgggcuggucgccgagugguuccuggccuacauccucuucacccgguucuucuacgugcugggccuggcggccaucaugcagcucuucuucagcuacuucgccgugcacuucaucuccaacagcuggcugauguggcugaucaucaaccugguccagauggcccccaucuccgcgauggugcgcauguacaucuucuucgccagcuucuacuacguguggaagagcuacguccacgugguggacgggugcaacuccagcaccugcaugaugugcuacaagcggaaccgcgccacccgggucgagugcacgaccaucgugaacggcguccgccgguccuucuacguguacgccaacggcgggaagggcuucugcaagcuccacaacuggaacugcgugaacugcgacaccuucugcgccgggagcaccuucaucuccgacgaggucgcgcgcgaccugagccugcaguucaagcggccgaucaaccccacggaccaguccagcuacaucguggacuccgugaccgucaagaacggcagcauccaccucuacuucgacaaggccgggcagaagaccuacgagcgccacucccugagccacuucgugaaccuggacaaccuccgggccaacaacaccaagggcucccugcccaucaacgugaucgucuucgacggcaagagcaagugcgaggaguccagcgccaaguccgccagcguguacuacucccagcugaugugccagcccauccuccugcuggaccaggcgcucgugagcgacgucggggacagcgccgagguggccgugaagauguucgacgccuacgucaacacguucuccagcaccuucaacgugccgauggagaagcugaagacccugguggccaccgcggaggccgagcucgccaagaacgucucccuggacaacgugcugagcacguucaucuccgccgcgcgccagggcuucguggacagcgacgucgagaccaaggacgugguggagugccucaagcugucccaccagagcgacaucgaggucaccggggacuccugcaacaacuacaugcugaccuacaacaagguggagaacaugacgccccgggaccucggcgccugcaucgacugcagcgcccgccacaucaacgcccagguggccaagucccacaacaucgcgcugaucuggaacgucaaggacuucaugagccuguccgagcagcuccggaagcagauccgcagcgccgccaagaagaacaaccugcccuucaagcugaccugcgccaccacccgccagguggugaacgucgugacgaccaagaucgcccucaaggggggcugaggacuaguuauaagacugacuagcccgaugggccucccaacgggcccuccuccccuccuugcaccgagauuaauaaaaaaaaaaaaaaaaaaaaaaaaaaaaaaaaaaaaaaaaaaaaaaaaaaaaaaaaaaaaaaaaugcaucccccccccccccccccccccccccccccccaaaggcucuuuucagagccaccagaauu

SEQ ID NO: 21554 - RNA, 6058 nt, Artificial Sequence
  SARS-CoV-2__MT834119.1__non-structural protein 3 (NSP3) mRNA gc
aggagaaagcuuaccauggcccccaccaaggugaccuucggcgacgacacggucaucgaggugcagggguacaagagcgugaacaucaccuucgagcuggacgagcgcaucgacaagguccucaacgagaagugcuccgccuacaccguggagcugggcaccgaggugaacgaguucgcgugcgucguggccgacgccgugaucaagacgcugcagccggucagcgagcuccugaccccccuggggaucgaccucgacgagugguccauggccaccuacuaccuguucgacgagagcggcgaguucaagcuggccucccacauguacugcagcuucuacccccccgacgaggacgaggaggagggggacugcgaggaggaggaguucgagccguccacccaguacgaguacggcacggaggacgacuaccagggcaagccccucgaguucggggcgaccagcgccgcccugcagcccgaggaggagcaggaggaggacuggcuggacgacgacucccagcagaccgugggccagcaggacgggagcgaggacaaccagaccacgaccauccagaccaucguggagguccagccccagcucgagauggagcugaccccgguggugcagacgaucgaggucaacuccuucagcggcuaccugaagcucaccgacaacguguacaucaagaacgccgacaucguggaggaggcgaagaaggucaagcccaccgugguggucaacgccgccaacguguaccugaagcacgggggcggcguggccggggcccugaacaaggcgaccaacaacgccaugcaggucgaguccgacgacuacaucgccacgaacggcccccucaagguggggggcagcugcguccuguccggccacaaccuggccaagcacugccuccacgugguggggcccaacgucaacaagggcgaggacauccagcugcugaagagcgccuacgagaacuucaaccagcacgaggugcuccuggcgccgcugcucuccgccgggaucuucggcgccgaccccauccacagccugcgggugugcgucgacaccgugcgcaccaacguguaccuggccgucuucgacaagaaccucuacgacaagcugguguccagcuuccuggagaugaagagcgagaagcagguggagcagaagaucgccgagauccccaaggaggaggucaagcccuucaucaccgaguccaagccgagcguggagcagcggaagcaggacgacaagaagaucaaggcgugcguggaggaggucacgaccacccucgaggagaccaaguuccugacggagaaccugcuccuguacaucgacaucaacgggaaccugcaccccgacuccgccacccucgugagcgacaucgacaucaccuuccugaagaaggacgcccccuacaucgugggcgacgucgugcaggagggcgugcugaccgccgucgugauccccacgaagaaggccgggggcaccaccgagaugcucgcgaaggcccugcgcaaggugccgaccgacaacuacaucacgaccuaccccgggcagggccugaacggguacaccgucgaggaggccaagaccgugcucaagaagugcaaguccgccuucuacauccugcccagcaucaucuccaacgagaagcaggagauccugggcaccgugagcuggaaccuccgggagaugcuggcgcacgccgaggagacgcgcaagcugaugcccgucugcguggagaccaaggccaucguguccaccauccagcggaaguacaagggcaucaagauccaggagggggucguggacuacggcgcccgcuucuacuucuacaccagcaagacgaccguggccucccugaucaacacccucaacgaccugaacgagacccuggucacgaugccgcucggguacgugacccacggccugaaccuggaggaggcggcccgguacaugcgcagccucaaggugcccgccaccgucuccgugagcucccccgacgccgugaccgccuacaacggguaccugacgagcuccagcaagacccccgaggagcacuucaucgagaccaucucccuggcgggcagcuacaaggacuggagcuacuccggccagagcacccagcucgggaucgaguuccugaagcggggcgacaaguccgucuacuacacgagcaacccgaccaccuuccaccuggacggggaggugaucaccuucgacaaccucaagacgcugcugucccuccgcgaggugcggaccaucaaggucuucaccaccguggacaacaucaaccugcacacgcagguggucgacaugagcaugaccuacggccagcaguucggccccaccuaccuggacggggccgacgugaccaagaucaagccccacaacucccacgagggcaagacguucuacgugcucccgaacgacgacacccugcgcgucgaggccuucgaguacuaccacaccaccgaccccagcuuccuggggcgguacauguccgcccucaaccacacgaagaaguggaaguacccccaggugaacggccugaccagcaucaagugggccgacaacaacugcuaccuggcgaccgcccuccugacccugcagcagaucgagcucaaguucaaccccccggcccugcaggacgccuacuaccgcgcgcgggccggggaggccgccaacuucugcgcccugauccucgcguacugcaacaagacggugggcgagcugggcgacguccgcgagaccauguccuaccuguuccagcacgccaaccucgacagcugcaagcgggugcugaacgucgugugcaagaccugcgggcagcagcagaccacccugaagggcguggaggccgucauguacauggggacgcucuccuacgagcaguucaagaagggcgugcagauccccugcaccugcgggaagcaggccaccaaguaccuggugcagcaggagagccccuucgucaugauguccgcccccccggcgcaguacgagcugaagcacggcaccuucacgugcgccagcgaguacaccggcaacuaccagugcgggcacuacaagcacaucaccuccaaggagacccucuacugcaucgacggcgcccugcugacgaagagcagcgaguacaaggggcccaucaccgacguguucuacaaggagaacuccuacaccaccacgaucaagcccgugaccuacaagcucgacggcgucgugugcaccgagaucgaccccaagcuggacaacuacuacaagaaggacaacagcuacuucaccgagcagccgaucgaccuggugcccaaccagcccuaccccaacgccuccuucgacaacuucaaguucgucugcgacaacaucaaguucgccgacgaccucaaccagcugacgggguacaagaagccggcgagccgcgagcugaaggugaccuucuuccccgaccucaacggcgacguggucgccaucgacuacaagcacuacacccccuccuucaagaagggcgccaagcugcugcacaagcccaucguguggcacgugaacaacgccaccaacaaggcgacguacaagccgaacaccuggugcauccggugccucuggagcaccaagcccgucgagaccuccaacagcuucgacgugcugaaguccgaggacgcccaggggauggacaaccuggccugcgaggaccucaagcccgugagcgaggaggucguggagaaccccacgauccagaaggacgugcuggagugcaacgucaagaccaccgagguggugggcgacaucauccugaagccggccaacaacucccucaagaucaccgaggaggucgggcacacggaccugauggccgcguacguggacaacagcucccugaccaucaagaagcccaacgagcucagccgcgugcugggccugaagacccucgccacccacgggcuggccgccgucaacuccgugcccugggacacgaucgccaacuacgcgaagccguuccugaacaagguggucagcaccaccaccaacaucgugacgcgcugccucaaccgggugugcaccaacuacaugcccuacuucuucacccugcugcuccagcugugcaccuucacccgcuccacgaacagccggaucaaggccuccaugcccaccaccaucgccaagaacaccgucaagagcgugagcaaguucugccuggaggccuccuucaacuaccucaagagccccaacuucuccaagcugaucaacaucaucaucugguuccugcuccugagcgugugccugggcucccucaucuacagcacggccgcgcugggcguccugauguccaaccucgggaugccgagcuacugcaccggcuaccgcgagggguaccugaacuccaccaacgugaccaucgccacguacugcaccggcagcauccccugcuccgugugccugagcggccucgacucccuggacaccuaccccagccuggagaccauccagaucacgaucuccagcuucaagugggaccucaccgccuucgggcuggucgccgagugguuccuggccuacauccucuucacccgguucuucuacgugcugggccuggcggccaucaugcagcucuucuucuccuacuucgccgugcacuucaucagcaacuccuggcugauguggcugaucaucaaccugguccagauggcccccaucagcgcgauggugcgcauguacaucuucuucgccagcuucuacuacguguggaaguccuacguccacgugguggacgggugcaacagcuccaccugcaugaugugcuacaagcggaaccgcgccacgcgggucgagugcaccaccaucgugaacggcguccgccggagcuucuacguguacgccaacgggggcaagggcuucugcaagcuccacaacuggaacugcgugaacugcgacaccuucugcgccggguccacguucaucagcgacgaggucgcgcgcgaccugucccugcaguucaagcggccgaucaaccccaccgaccagagcuccuacaucguggacagcgugaccgucaagaacggcuccauccaccucuacuucgacaaggccgggcagaagaccuacgagcgccacagccugucccacuucgugaaccuggacaaccuccgggccaacaacacgaagggcagccugcccaucaacgugaucgucuucgacgggaaguccaagugcgaggagagcuccgccaagagcgccuccguguacuacagccagcugaugugccagcccauccuccugcuggaccaggcgcucgugagcgacgucggcgacuccgccgagguggccgugaagauguucgacgccuacgucaacaccuucagcuccaccuucaacgugccgauggagaagcugaagacccugguggccacggcggaggccgagcucgccaagaacgucagccuggacaacgugcuguccaccuucaucagcgccgcgcgccagggcuucguggacuccgacgucgagaccaaggacgugguggagugccucaagcugagccaccaguccgacaucgaggucaccggggacagcugcaacaacuacaugcugacguacaacaagguggagaacaugaccccccgggaccucggcgccugcaucgacugcuccgcccgccacaucaacgcccagguggccaagagccacaacaucgcgcugaucuggaacgucaaggacuucaugucccugagcgagcagcuccggaagcagauccgcuccgccgccaagaagaacaaccugcccuucaagcugaccugcgccaccacgcgccagguggugaacgucgugaccaccaagaucgcccucaaggggggcugaggacuaguuauaagacugacuagcccgaugggccucccaacgggcccuccuccccuccuugcaccgagauuaauaaaaaaaaaaaaaaaaaaaaaaaaaaaaaaaaaaaaaaaaaaaaaaaaaaaaaaaaaaaaaaaaugcaucccccccccccccccccccccccccccccccaaaggcucuuuucagagccaccagaauu

SEQ ID NO: 21555 - RNA, 6058 nt, Artificial Sequence
  SARS-CoV-2__MT834129.1__non-structural protein 3 (NSP3) mRNA gc
aggagaaagcuuaccauggcccccaccaaggugaccuucggcgacgacacggucaucgaggugcagggguacaagagcgugaacaucaccuucgagcuggacgagcgcaucgacaagguccucaacgagaagugcuccgccuacaccguggagcugggcaccgaggugaacgaguucgcgugcgucguggccgacgccgugaucaagacgcugcagccggucagcgagcuccugaccccccuggggaucgaccucgacgagugguccauggccaccuacuaccuguucgacgagagcggcgaguucaagcuggccucccacauguacugcagcuucuacccccccgacgaggacgaggaggagggggacugcgaggaggaggaguucgagccguccacccaguacgaguacggcacggaggacgacuaccagggcaagccccucgaguucggggcgaccagcgccgcccugcagcccgaggaggagcaggaggaggacuggcuggacgacgacucccagcagaccgugggccagcaggacgggagcgaggacaaccagaccacgaccauccagaccaucguggagguccagccccagcucgagauggagcugaccccgguggugcagacgaucgaggucaacuccuucagcggcuaccugaagcucaccgacaacguguacaucaagaacgccgacaucguggaggaggcgaagaaggucaagcccaccgugguggucaacgccgccaacguguaccugaagcacgggggcggcguggccggggcccugaacaaggcgaccaacaacgccaugcaggucgaguccgacgacuacaucgccacgaacggcccccucaagguggggggcagcugcguccuguccggccacaaccuggccaagcacugccuccacgugguggggcccaacgucaacaagggcgaggacauccagcugcugaagagcgccuacgagaacuucaaccagcacgaggugcuccuggcgccgcugcucuccgccgggaucuucggcgccgaccccauccacagccugcgggugugcgucgacaccgugcgcaccaacguguaccuggccgucuucgacaagaaccucuacgacaagcugguguccagcuuccuggagaugaagagcgagaagcagguggagcagaagaucgccgagauccccaaggaggaggucaagcccuucaucaccgaguccaagccgagcguggagcagcggaagcaggacgacaagaagaucaaggcgugcguggaggaggucacgaccacccucgaggagaccaaguuccugacggagaaccugcuccuguacaucgacaucaacgggaaccugcaccccgacuccgccagccucguguccgacaucgacaucaccuuccugaagaaggacgcccccuacaucgugggcgacgucgugcaggagggcgugcugaccgccgucgugauccccaccaagaaggccgggggcacgaccgagaugcucgcgaaggcccugcgcaaggugccgaccgacaacuacaucaccacguaccccgggcagggccugaacggguacaccgucgaggaggccaagaccgugcucaagaagugcaagagcgccuucuacauccugcccuccaucaucagcaacgagaagcaggagauccugggcaccguguccuggaaccuccgggagaugcuggcgcacgccgaggagacccgcaagcugaugcccgucugcguggagacgaaggccaucgugagcaccauccagcggaaguacaagggcaucaagauccaggagggggucguggacuacggcgcccgcuucuacuucuacaccuccaagaccacgguggccagccugaucaacacccucaacgaccugaacgagacccuggucaccaugccgcucggguacgugacgcacggccugaaccuggaggaggcggcccgguacaugcgcucccucaaggugcccgccaccgucagcguguccagccccgacgccgugaccgccuacaacggguaccugaccuccagcuccaagacgcccgaggagcacuucaucgagaccaucagccuggcgggcagcuacaaggacugguccuacagcggccaguccacccagcucgggaucgaguuccugaagcggggcgacaagagcgucuacuacaccuccaacccgacgaccuuccaccuggacggggaggugaucaccuucgacaaccucaagacccugcugagccuccgcgaggugcggacgaucaaggucuucaccaccguggacaacaucaaccugcacacccagguggucgacauguccaugacguacggccagcaguucggccccaccuaccuggacggggccgacgugaccaagaucaagccccacaacagccacgagggcaagaccuucuacgugcucccgaacgacgacacgcugcgcgucgaggccuucgaguacuaccacaccaccgaccccuccuuccuggggcgguacaugagcgcccucaaccacaccaagaaguggaaguacccccaggugaacggccugacguccaucaagugggccgacaacaacugcuaccuggcgaccgcccuccugacccugcagcagaucgagcucaaguucaaccccccggcccugcaggacgccuacuaccgcgcgcgggccggggaggccgccaacuucugcgcccugauccucgcguacugcaacaagaccgugggcgagcugggcgacguccgcgagacgaugagcuaccuguuccagcacgccaaccucgacuccugcaagcgggugcugaacgucgugugcaagaccugcgggcagcagcagaccacccugaagggcguggaggccgucauguacauggggacccucagcuacgagcaguucaagaagggcgugcagauccccugcacgugcgggaagcaggccaccaaguaccuggugcagcaggagucccccuucgucaugaugagcgcccccccggcgcaguacgagcugaagcacggcaccuucaccugcgccuccgaguacacgggcaacuaccagugcgggcacuacaagcacaucaccagcaaggagacccucuacugcaucgacggcgcccugcugaccaagagcuccgaguacaaggggcccaucacggacguguucuacaaggagaacagcuacaccaccaccaucaagcccgugacguacaagcucgacggcgucgugugcaccgagaucgaccccaagcuggacaacuacuacaagaaggacaacuccuacuucaccgagcagccgaucgaccuggugcccaaccagcccuaccccaacgccagcuucgacaacuucaaguucgucugcgacaacaucaaguucgccgacgaccucaaccagcugaccggguacaagaagccggcgucccgcgagcugaaggugacguucuuccccgaccucaacggcgacguggucgccaucgacuacaagcacuacacccccagcuucaagaagggcgccaagcugcugcacaagcccaucguguggcacgugaacaacgccaccaacaaggcgaccuacaagccgaacacguggugcauccggugccucugguccaccaagcccgucgagaccagcaacuccuucgacgugcugaagagcgaggacgcccaggggauggacaaccuggccugcgaggaccucaagcccguguccgaggaggucguggagaaccccaccauccagaaggacgugcuggagugcaacgucaagacgaccgagguggugggcgacaucauccugaagccggccaacaacagccucaagaucaccgaggaggucgggcacaccgaccugauggccgcguacguggacaacuccagccugacgaucaagaagcccaacgagcucucccgcgugcugggccugaagacccucgccacccacgggcuggccgccgucaacagcgugcccugggacaccaucgccaacuacgcgaagccguuccugaacaagguggucuccacgaccaccaacaucgugacccgcugccucaaccgggugugcacgaacuacaugcccuacuucuucacccugcugcuccagcugugcaccuucacccgcagcaccaacucccggaucaaggccagcaugcccacgaccaucgccaagaacaccgucaagagcgugggcaaguucugccuggaggccuccuucaacuaccucaagagccccaacuucuccaagcugaucaacaucaucaucugguuccugcuccugagcgugugccugggcucccucaucuacagcaccgccgcgcuggggguccugauguccaaccucggcaugccgagcuacugcacgggguaccgcgagggcuaccugaacuccaccaacgugaccaucgccaccuacugcacgggcagcauccccugcuccgugugccugagcgggcucgacucccuggacaccuaccccagccuggagaccauccagaucaccaucuccagcuucaagugggaccucacggccuucggccuggucgccgagugguuccuggccuacauccucuucacccgguucuucuacgugcuggggcuggcggccaucaugcagcucuucuucuccuacuucgccgugcacuucaucagcaacuccuggcugauguggcugaucaucaaccugguccagauggcccccaucagcgcgauggugcgcauguacaucuucuucgccagcuucuacuacguguggaaguccuacguccacgugguggacggcugcaacagcuccaccugcaugaugugcuacaagcggaaccgcgccacccgggucgagugcacgaccaucgugaacgggguccgccggagcuucuacguguacgccaacggcggcaagggguucugcaagcuccacaacuggaacugcgugaacugcgacaccuucugcgccggcuccaccuucaucagcgacgaggucgcgcgcgaccugucccugcaguucaagcggccgaucaaccccacggaccagagcuccuacaucguggacagcgugaccgucaagaacggguccauccaccucuacuucgacaaggccggccagaagaccuacgagcgccacagccugucccacuucgugaaccuggacaaccuccgggccaacaacaccaaggggagccugcccaucaacgugaucgucuucgacggcaaguccaagugcgaggagagcuccgccaagagcgccuccguguacuacagccagcugaugugccagcccauccuccugcuggaccaggcgcucgugagcgacgucggcgacuccgccgagguggccgugaagauguucgacgccuacgucaacacguucagcuccaccuucaacgugccgauggagaagcugaagacccugguggccaccgcggaggccgagcucgccaagaacgucagccuggacaacgugcuguccacguucaucagcgccgcgcgccagggguucguggacuccgacgucgagaccaaggacgugguggagugccucaagcugagccaccaguccgacaucgaggucaccggcgacagcugcaacaacuacaugcugaccuacaacaagguggagaacaugacgccccgggaccucggggccugcaucgacugcuccgcccgccacaucaacgcccagguggccaagagccacaacaucgcgcugaucuggaacgucaaggacuucaugucccugagcgagcagcuccggaagcagauccgcuccgccgccaagaagaacaaccugcccuucaagcugaccugcgccaccacccgccagguggugaacgucgugacgaccaagaucgcccucaagggcgggugaggacuaguuauaagacugacuagcccgaugggccucccaacgggcccuccuccccuccuugcaccgagauuaauaaaaaaaaaaaaaaaaaaaaaaaaaaaaaaaaaaaaaaaaaaaaaaaaaaaaaaaaaaaaaaaaugcaucccccccccccccccccccccccccccccccaaaggcucuuuucagagccaccagaauu

SEQ ID NO: 21556 - RNA, 6058 nt, Artificial Sequence
  SARS-CoV-2__MT834626.1__non-structural protein 3 (NSP3) mRNA gc
aggagaaagcuuaccauggcccccaccaaggugaccuucggcgacgacacggucaucgaggugcagggguacaagagcgugaacaucaccuucgagcuggacgagcgcaucgacaagguccucaacgagaagugcuccgccuacaccguggagcugggcaccgaggugaacgaguucgcgugcgucguggccgacgccgugaucaagacgcugcagccggucagcgagcuccugaccccccuggggaucgaccucgacgagugguccauggccaccuacuaccuguucgacgagagcggcgaguucaagcuggccucccacauguacugcagcuucuacccccccgacgaggacgaggaggagggggacugcgaggaggaggaguucgagccguccacccaguacgaguacggcacggaggacgacuaccagggcaagccccucgaguucggggcgaccagcgccgcccugcagcccgaggaggagcaggaggaggacuggcuggacgacgacucccagcagaccgugggccagcaggacgggagcgaggacaaccagaccacgaccauccagaccaucguggagguccagccccagcucgagauggagcugaccccgguggugcagacgaucgaggucaacuccuucagcggcuaccugaagcucaccgacaacguguacaucaagaacgccgacaucguggaggaggcgaagaaggucaagcccaccgugguggucaacgccgccaacguguaccugaagcacgggggcggcguggccggggcccugaacaaggcgaccaacaacgccaugcaggucgaguccgacgacuacaucgccacgaacggcccccucaagguggggggcagcugcguccuguccggccacaaccuggccaagcacugccuccacgugguggggcccaacgucaacaagggcgaggacauccagcugcugaagagcgccuacgagaacuucaaccagcacgaggugcuccuggcgccgcugcucuccgccgggaucuucggcgccgaccccauccacagccugcgggugugcgucgacaccgugcgcaccaacguguaccuggccgucuucgacaagaaccucuacgacaagcugguguccagcuuccuggagaugaagagcgagaagcagguggagcagaagaucgccgagauccccaaggaggaggucaagcccuucaucaccgaguccaagccgagcguggagcagcggaagcaggacgacaagaagaucaaggcgugcguggaggaggucacgaccacccucgaggagaccaaguuccugacggagaaccugcuccuguacaucgacaucaacgggaaccugcaccccgacuccgccacccucgugagcgacaucgacaucaccuuccugaagaaggacgcccccuacaucgugggcgacgucgugcaggagggcgugcugaccgccgucgugauccccacgaagaaggccgggggcaccaccgagaugcucgcgaaggcccugcgcaaggugccgaccgacaacuacaucacgaccuaccccgggcagggccugaacggguacaccgucgaggaggccaagaccgugcucaagaagugcaaguccgccuucuacauccugcccagcaucaucuccaacgagaagcaggagauccugggcaccgugagcuggaaccuccgggagaugcuggcgcacgccgaggagacgcgcaagcugaugcccgucugcguggagaccaaggccaucguguccaccauccagcggaaguacaagggcaucaagauccaggagggggucguggacuacggcgcccgcuucuacuucuacaccagcaagacgaccguggccucccugaucaacacccucaacgaccugaacgagacccuggucacgaugccgcucggguacgugacccacggccugaaccuggaggaggcggcccgguacaugcgcagccucaaggugcccgccaccgucuccgugagcucccccgacgccgugaccgccuacaacggguaccugacgagcuccagcaagacccccgaggagcacuucaucgagaccaucucccuggcgggcagcuacaaggacuggagcuacuccggccagagcacccagcucgggaucgaguuccugaagcggggcgacaaguccgucuacuacacgagcaacccgaccaccuuccaccuggacggggaggugaucaccuucgacaaccucaagacgcugcugucccuccgcgaggugcggaccaucaaggucuucaccaccguggacaacaucaaccugcacacgcagguggucgacaugagcaugaccuacggccagcaguucggccccaccuaccuggacggggccgacgugaccaagaucaagccccacaacucccacgagggcaagacguucuacgugcucccgaacgacgacacccugcgcgucgaggccuucgaguacuaccacaccaccgaccccagcuuccuggggcgguacauguccgcccucaaccacacgaagaaguggaaguacccccaggugaacggccugaccagcaucaagugggccgacaacaacugcuaccuggcgaccgcccuccugacccugcagcagaucgagcucaaguucaaccccccggcccugcaggacgccuacuaccgcgcgcgggccggggaggccgccaacuucugcgcccugauccucgcguacugcaacaagacggugggcgagcugggcgacguccgcgagaccauguccuaccuguuccagcacgccaaccucgacagcugcaagcgggugcugaacgucgugugcaagaccugcgggcagcagcagaccacccugaagggcguggaggccgucauguacauggggacgcucuccuacgagcaguucaagaagggcgugcagauccccugcaccugcgggaagcaggccaccaaguaccuggugcagcaggagagccccuucgucaugauguccgcccccccggcgcaguacgagcugaagcacggcaccuucacgugcgccagcgaguacaccggcaacuaccagugcgggcacuacaagcacaucaccuccaaggagacccucuacugcaucgacggcgcccugcugacgaagagcagcgaguacaaggggcccaucaccgacguguucuacaaggagaacuccuacaccaccacgaucaagcccgugaccuacaagcucgacggcgucgugugcaccgagaucgaccccaagcuggacaacuacuacaagaaggacaacagcuacuucaccgagcagccgaucgaccuggugcccaaccagcccuaccccaacgccuccuucgacaacuucaaguucgucugcgacaacaucaaguucgccgacgaccucaaccagcugacgggguacaagaagccggcgagccgcgagcugaaggugaccuucuuccccgaccucaacggcgacguggucgccaucgacuacaagcacuacacccccuccuucaagaagggcgccaagcugcugcacaagcccaucguguggcacgugaacaacgccaccaacaaggcgacguacaagccgaacaccuggugcauccggugccucuggagcaccaagcccgucgagaccuccaacagcuucgacgugcugaaguccgaggacgcccaggggauggacaaccuggccugcgaggaccucaagcccgugagcgaggaggucguggagaaccccacgauccagaaggacgugcuggagugcaacgucaagaccaccgagguggugggcgacaucauccugaagccggccaacaacucccucaagaucaccgaggaggucgggcacacggaccugauggccgcguacguggacaacagcucccugaccaucaagaagcccaacgagcucagccgcgugcugggccugaagacccucgccacccacgggcuggccgccgucaacuccgugcccugggacacgaucgccaacuacgcgaagccguuccugaacaagguggucagcaccaccaccaacaucgugacgcgcugccucaaccgggugugcaccaacuacaugcccuacuucuucacccugcugcuccagcugugcaccuucacccgcuccacgaacagccggaucaaggccuccaugcccaccaccaucgccaagaacaccgucaagagcgugggcaaguucugccuggaggccagcuucaacuaccucaagucccccaacuucagcaagcugaucaacaucaucaucugguuccugcuccuguccgugugccugggcagccucaucuacuccacggccgcgcuggggguccugaugagcaaccucggcaugccguccuacugcaccggguaccgcgagggcuaccugaacagcaccaacgugaccaucgccacguacugcaccggcuccauccccugcagcgugugccuguccgggcucgacagccuggacaccuaccccucccuggagaccauccagaucacgaucagcuccuucaagugggaccucaccgccuucggccuggucgccgagugguuccuggccuacauccucuucacccgguucuucuacgugcuggggcuggcggccaucaugcagcucuucuucagcuacuucgccgugcacuucaucuccaacagcuggcugauguggcugaucaucaaccugguccagauggcccccaucuccgcgauggugcgcauguacaucuucuucgccagcuucuacuacguguggaagagcuacguccacgugguggacggcugcaacuccagcaccugcaugaugugcuacaagcggaaccgcgccacgcgggucgagugcaccaccaucgugaacgggguccgccgguccuucuacguguacgccaacggcggcaagggguucugcaagcuccacaacuggaacugcgugaacugcgacaccuucugcgccggcagcacguucaucuccgacgaggucgcgcgcgaccugagccugcaguucaagcggccgaucaaccccaccgaccaguccagcuacaucguggacuccgugaccgucaaggacgggagcauccaccucuacuucgacaaggccggccagaagaccuacgagcgccacucccugagccacuucgugaaccuggacaaccuccgggccaacaacacgaaggggucccugcccaucaacgugaucgucuucgacggcaagagcaagugcgaggaguccagcgccaaguccgccagcguguacuacucccagcugaugugccagcccauccuccugcuggaccaggcgcucgugagcgacgucggcgacagcgccgagguggccgugaagauguucgacgccuacgucaacaccuucuccagcaccuucaacgugccgauggagaagcugaagacccugguggccacggcggaggccgagcucgccaagaacgucucccuggacaacgugcugagcaccuucaucuccgccgcgcgccagggguucguggacagcgacgucgagaccaaggacgugguggagugccucaagcugucccaccagagcgacaucgaggucaccggcgacuccugcaacaacuacaugcugacguacaacaagguggagaacaugaccccccgggaccucggggccugcaucgacugcagcgcccgccacaucaacgcccagguggccaagucccacaacaucgcgcugaucuggaacgucaaggacuucaugagccuguccgagcagcuccggaagcagauccgcagcgccgccaagaagaacaaccugcccuucaagcugaccugcgccaccacgcgccagguggugaacgucgugaccaccaagaucgcccucaagggcgggugaggacuaguuauaagacugacuagcccgaugggccucccaacgggcccuccuccccuccuugcaccgagauuaauaaaaaaaaaaaaaaaaaaaaaaaaaaaaaaaaaaaaaaaaaaaaaaaaaaaaaaaaaaaaaaaaugcaucccccccccccccccccccccccccccccccaaaggcucuuuucagagccaccagaauu

SEQ ID NO: 21557 - RNA, 6058 nt, Artificial Sequence
  SARS-CoV-2__MT834646.1__non-structural protein 3 (NSP3) mRNA gc
aggagaaagcuuaccauggcccccaccaaggugaccuucggcgacgacacggucaucgaggugcagggguacaagagcgugaacaucaccuucgagcuggacgagcgcaucgacaagguccucaacgagaagugcuccgccuacaccguggagcugggcaccgaggugaacgaguucgcgugcgucguggccgacgccgugaucaagacgcugcagccggucagcgagcuccugaccccccuggggaucgaccucgacgagugguccauggccaccuacuaccuguucgacgagagcggcgaguucaagcuggccucccacauguacugcagcuucuacccccccgacgaggacgaggaggagggggacugcgaggaggaggaguucgagccguccacccaguacgaguacggcacggaggacgacuaccagggcaagccccucgaguucggggcgaccagcgccgcccugcagcccgaggaggagcaggaggaggacuggcuggacgacgacucccagcagaccgugggccagcaggacgggagcgaggacaaccagaccacgaccauccagaccaucguggagguccagccccagcucgagauggagcugaccccgguggugcagacgaucgaggucaacuccuucagcggcuaccugaagcucaccgacaacguguacaucaagaacgccgacaucguggaggaggcgaagaaggucaagcccaccgugguggucaacgccgccaacguguaccugaagcacgggggcggcguggccggggcccugaacaaggcgaccaacaacgccaugcaggucgaguccgacgacuacaucgccacgaacggcccccucaagguggggggcagcugcguccuguccggccacaaccuggccaagcacugccuccacgugguggggcccaacgucaacaagggcgaggacauccagcugcugaagagcgccuacgagaacuucaaccagcacgaggugcuccuggcgccgcugcucuccgccgggaucuucggcgccgaccccauccacagccugcgggugugcgucgacaccgugcgcaccaacguguaccuggccgucuucgacaagaaccucuacgacaagcugguguccagcuuccuggagaugaagagcgagaagcagguggagcagaagaucgccgagauccccaaggaggaggucaagcccuucaucaccgaguccaagccgagcguggagcagcggaagcaggacgacaagaagaucaaggcgugcguggaggaggucacgaccacccucgaggagaccaaguuccugacggagaaccugcuccuguacaucgacaucaacgggaaccugcaccccgacuccgccacccucgugagcgacaucgacaucaccuuccugaagaaggacgcccccuacaucgugggcgacgucgugcaggagggcgugcugaccgccgucgugauccccacgaagaaggccgggggcaccaccgagaugcucgcgaaggcccugcgcaaggugccgaccgacaacuacaucacgaccuaccccgggcagggccugaacggguacaccgucgaggaggccaagaccgugcucaagaagugcaaguccgccuucuacauccugcccagcaucaucuccaacgagaagcaggagauccugggcaccgugagcuggaaccuccgggagaugcuggcgcacgccgaggagacgcgcaagcugaugcccgucugcguggagaccaaggccaucguguccaccauccagcggaaguacaagggcaucaagauccaggagggggucguggacuacggcgcccgcuucuacuucuacaccagcaagacgaccguggccucccugaucaacacccucaacgaccugaacgagacccuggucacgaugccgcucggguacgugacccacggccugaaccuggaggaggcggcccgguacaugcgcagccucaaggugcccgccaccgucuccgugagcucccccgacgccgugaccgccuacaacggguaccugacgagcuccagcaagacccccgaggagcacuucaucgagaccaucucccuggcgggcagcuacaaggacuggagcuacuccggccagagcacccagcucgggaucgaguuccugaagcggggcgacaaguccgucuacuacacgagcaacccgaccaccuuccaccuggacggggacgugaucaccuucgacaaccucaagacgcugcugucccuccgcgaggugcggaccaucaaggucuucaccaccguggacaacaucaaccugcacacgcagguggucgacaugagcaugaccuacggccagcaguucggccccaccuaccuggacggggccgacgugaccaagaucaagccccacaacucccacgagggcaagacguucuacgugcucccgaacgacgacacccugcgcgucgaggccuucgaguacuaccacaccaccgaccccagcuuccuggggcgguacauguccgcccucaaccacacgaagaaguggaaguacccccaggugaacggccugaccagcaucaagugggccgacaacaacugcuaccuggcgaccgcccuccugacccugcagcagaucgagcucaaguucaaccccccggcccugcaggacgccuacuaccgcgcgcgggccggggaggccgccaacuucugcgcccugauccucgcguacugcaacaagacggugggcgagcugggcgacguccgcgagaccauguccuaccuguuccagcacgccaaccucgacagcugcaagcgggugcugaacgucgugugcaagaccugcgggcagcagcagaccacccugaagggcguggaggccgucauguacauggggacgcucuccuacgagcaguucaagaagggcgugcagauccccugcaccugcgggaagcaggccaccaaguaccuggugcagcaggagagccccuucgucaugauguccgcccccccggcgcaguacgagcugaagcacggcaccuucacgugcgccagcgaguacaccggcaacuaccagugcgggcacuacaagcacaucaccuccaaggagacccucuacugcaucgacggcgcccugcugacgaagagcagcgaguacaaggggcccaucaccgacguguucuacaaggagaacuccuacaccaccacgaucaagcccgugaccuacaagcucgacggcgucgugugcaccgagaucgaccccaagcuggacaacuacuacaagaaggacaacagcuacuucaccgagcagccgaucgaccuggugcccaaccagcccuaccccaacgccuccuucgacaacuucaaguucgucugcgacaacaucaaguucgccgacgaccucaaccagcugacgggguacaagaagccggcgagccgcgagcugaaggugaccuucuuccccgaccucaacggcgacguggucgccaucgacuacaagcacuacacccccuccuucaagaagggcgccaagcugcugcacaagcccaucguguggcacgugaacaacgccaccaacaaggcgacguacaagccgaacaccuggugcauccggugccucuggagcaccaagcccgucgagaccuccaacagcuucgacgugcugaaguccgaggacgcccaggggauggacaaccuggccugcgaggaccucaagcccgugagcgaggaggucguggagaaccccacgauccagaaggacgugcuggagugcaacgucaagaccaccgagguggugggcgacaucauccugaagccggccaacaacucccucaagaucaccgaggaggucgggcacacggaccugauggccgcguacguggacaacagcucccugaccaucaagaagcccaacgagcucagccgcgugcugggccugaagacccucgccacccacgggcuggccgccgucaacuccgugcccugggacacgaucgccaacuacgcgaagccguuccugaacaagguggucagcaccaccaccaacaucgugacgcgcugccucaaccgggugugcaccaacuacaugcccuacuucuucacccugcugcuccagcugugcaccuucacccgcuccacgaacagccggaucaaggccuccaugcccaccaccaucgccaagaacaccgucaagagcgugggcaaguucugccuggaggccagcuucaacuaccucaagucccccaacuucagcaagcugaucaacaucaucaucugguuccugcuccuguccgugugccugggcagccucaucuacuccacggccgcgcuggggguccugaugagcaaccucggcaugccguccuacugcaccggguaccgcgagggcuaccugaacagcaccaacgugaccaucgccacguacugcaccggcuccauccccugcagcgugugccuguccgggcucgacagccuggacaccuaccccucccuggagaccauccagaucacgaucagcuccuucaagugggaccucaccgccuucggccuggucgccgagugguuccuggccuacauccucuucacccgguucuucuacgugcuggggcuggcggccaucaugcagcucuucuucagcuacuucgccgugcacuucaucuccaacagcuggcugauguggcugaucaucaaccugguccagauggcccccaucuccgcgauggugcgcauguacaucuucuucgccagcuucuacuacguguggaagagcuacguccacgugguggacggcugcaacuccagcaccugcaugaugugcuacaagcggaaccgcgccacgcgggucgagugcaccaccaucgugaacgggguccgccgguccuucuacguguacgccaacggcggcaagggguucugcaagcuccacaacuggaacugcgugaacugcgacaccuucugcgccggcagcacguucaucuccgacgaggucgcgcgcgaccugagccugcaguucaagcggccgaucaaccccaccgaccaguccagcuacaucguggacuccgugaccgucaagaacgggagcauccaccucuacuucgacaaggccggccagaagaccuacgagcgccacucccugagccacuucgugaaccuggacaaccuccgggccaacaacacgaaggggucccugcccaucaacgugaucgucuucgacggcaagagcaagugcgaggaguccagcgccaaguccgccagcguguacuacucccagcugaugugccagcccauccuccugcuggaccaggcgcucgugagcgacgucggcgacagcgccgagguggccgugaagauguucgacgccuacgucaacaccuucuccagcaccuucaacgugccgauggagaagcugaagacccugguggccacggcggaggccgagcucgccaagaacgucucccuggacaacgugcugagcaccuucaucuccgccgcgcgccagggguucguggacagcgacgucgagaccaaggacgugguggagugccucaagcugucccaccagagcgacaucgaggucaccggcgacuccugcaacaacuacaugcugacguacaacaagguggagaacaugaccccccgggaccucggggccugcaucgacugcagcgcccgccacaucaacgcccagguggccaagucccacaacaucgcgcugaucuggaacgucaaggacuucaugagccuguccgagcagcuccggaagcagauccgcagcgccgccaagaagaacaaccugcccuucaagcugaccugcgccaccacgcgccagguggugaacgucgugaccaccaagaucgcccucaagggcgggugaggacuaguuauaagacugacuagcccgaugggccucccaacgggcccuccuccccuccuugcaccgagauuaauaaaaaaaaaaaaaaaaaaaaaaaaaaaaaaaaaaaaaaaaaaaaaaaaaaaaaaaaaaaaaaaaugcaucccccccccccccccccccccccccccccccaaaggcucuuuucagagccaccagaauu

SEQ ID NO: 21558 - RNA, 6058 nt, Artificial Sequence
  SARS-CoV-2__MT834656.1__non-structural protein 3 (NSP3) mRNA gc
aggagaaagcuuaccauggcccccaccaaggugaccuucggcgacgacacggucaucgaggugcagggguacaagagcgugaacaucaccuucgagcuggacgagcgcaucgacaagguccucaacgagaagugcuccgccuacaccguggagcugggcaccgaggugaacgaguucgcgugcgucguggccgacgccgugaucaagacgcugcagccggucagcgagcuccugaccccccuggggaucgaccucgacgagugguccauggccaccuacuaccuguucgacgagagcggcgaguucaagcuggccucccacauguacugcagcuucuacccccccgacgaggacgaggaggagggggacugcgaggaggaggaguucgagccguccacccaguacgaguacggcacggaggacgacuaccagggcaagccccucgaguucggggcgaccagcgccgcccugcagcccgaggaggagcaggaggaggacuggcuggacgacgacucccagcagaccgugggccagcaggacgggagcgaggacaaccagaccacgaccauccagaccaucguggagguccagccccagcucgagauggagcugaccccgguggugcagacgaucgaggucaacuccuucagcggcuaccugaagcucaccgacaacguguacaucaagaacgccgacaucguggaggaggcgaagaaggucaagcccaccgugguggucaacgccgccaacguguaccugaagcacgggggcggcguggccggggcccugaacaaggcgaccaacaacgccaugcaggucgaguccgacgacuacaucgccacgaacggcccccucaagguggggggcagcugcguccuguccggccacaaccuggccaagcacugccuccacgugguggggcccaacgucaacaagggcgaggacauccagcugcugaagagcgccuacgagaacuucaaccagcacgaggugcuccuggcgccgcugcucuccgccgggaucuucggcgccgaccccauccacagccugcgggugugcgucgacaccgugcgcaccaacguguaccuggccgucuucgacaagaaccucuacgacaagcugguguccagcuuccuggagaugaagagcgagaagcagguggagcagaagaucgccgagauccccaaggaggaggucaagcccuucaucaccgaguccaagccgagcguggagcagcggaagcaggacgacaagaagaucaaggcgugcguggaggaggucacgaccacccucgaggagaccaaguuccugacggagaaccugcuccuguacaucgacaucaacgggaaccugcaccccgacuccgccacccucgugagcgacaucgacaucaccuuccugaagaaggacgcccccuacaucgugggcgacgucgugcaggagggcgugcugaccgccgucgugauccccacgaagaaggccgggggcaccaccgagaugcucgcgaaggcccugcgcaaggugccgaccgacaacuacaucacgaccuaccccgggcagggccugaacggguacaccgucgaggaggccaagaccgugcucaagaagugcaaguccgccuucuacauccugcccagcaucaucuccaacgagaagcaggagauccugggcaccgugagcuggaaccuccgggagaugcuggcgcacgccgaggagacgcgcaagcugaugcccgucugcguggagaccaaggccaucguguccaccauccagcggaaguacaagggcaucaagauccaggagggggucguggacuacggcgcccgcuucuacuucuacaccagcaagacgaccguggccucccugaucaacacccucaacgaccugaacgagacccuggucacgaugccgcucggguacgugacccacggccugaaccuggaggaggcggcccgguacaugcgcagccucaaggugcccgccaccgucuccgugagcucccccgacgccgugaccgccuacaacggguaccugacgagcuccagcaagacccccgaggagcacuucaucgagaccaucucccuggcgggcagcuacaaggacuggagcuacuccggccagagcacccagcucgggaucgaguuccugaagcggggcgacaaguccgucuacuacacgagcaacccgaccaccuuccaccuggacggggaggugaucaccuucgacaaccucaagacgcugcugucccuccgcgaggugcggaccaucaaggucuucaccaccguggacaacaucaaccugcacacgcagguggucgacaugagcaugaccuacggccagcaguucggccccaccuaccuggacggggccgacgugaccaagaucaagccccacaacucccacgagggcaagacguucuacgugcucccgaacgacgacacccugcgcgucgaggccuucgaguacuaccacaccaccgaccccagcuuccuggggcgguacauguccgcccucaaccacacgaagaaguggaaguacccccaggugaacggccugaccagcaucaagugggccgacaacaacugcuaccuggcgaccgcccuccugacccugcagcagaucgagcucaaguucaaccccccggcccugcaggacgccuacuaccgcgcgcgggccggggaggccgccaacuucugcgcccugauccucgcguacugcaacaagacggugggcgagcugggcgacguccgcgagaccauguccuaccuguuccagcacgccaaccucgacagcugcaagcgggugcugaacgucgugugcaagaccugcgggcagcagcagaccacccugaagggcguggaggccgucauguacauggggacgcucuccuacgagcaguucaagaagggcgugcagauccccugcaccugcgggaagcaggccaccaaguaccuggugcagcaggagagccccuucgucaugauguccgcccccccggcgcaguacgagcugaagcacggcaccuucacgugcgccagcgaguacaccggcaacuaccagugcgggcacuacaagcacaucaccuccaaggagacccucuacugcaucgacggcgcccugcugacgaagagcagcgaguacaaggggcccaucaccgacguguucuacaaggagaacuccuacaccaccacgaucaagcccgugaccuacaagcucgacggcgucgugugcaccgagaucgaccccaagcuggacaacuacuacaagaaggacaacagcuacuucaccgagcagccgaucgaccuggugcccaaccagcccuaccccaacgccggguucgacaacuucaaguucgucugcgacaacaucaaguucgccgacgaccucaaccagcugacgggcuacaagaagccggcgucccgcgagcugaaggugaccuucuuccccgaccucaacggcgacguggucgccaucgacuacaagcacuacacccccagcuucaagaagggggccaagcugcugcacaagcccaucguguggcacgugaacaacgccaccaacaaggcgacguacaagccgaacaccuggugcauccggugccucugguccaccaagcccgucgagaccagcaacuccuucgacgugcugaagagcgaggacgcccagggcauggacaaccuggccugcgaggaccucaagcccguguccgaggaggucguggagaaccccacgauccagaaggacgugcuggagugcaacgucaagaccaccgagguggugggggacaucauccugaagccggccaacaacagccucaagaucaccgaggaggucggccacacggaccugauggccgcguacguggacaacuccagccugaccaucaagaagcccaacgagcucucccgcgugcuggggcugaagacccucgccacccacggccuggccgccgucaacagcgugcccugggacacgaucgccaacuacgcgaagccguuccugaacaagguggucuccaccaccaccaacaucgugacgcgcugccucaaccgggugugcaccaacuacaugcccuacuucuucacccugcugcuccagcugugcaccuucacccgcagcacgaacucccggaucaaggccagcaugcccaccaccaucgccaagaacaccgucaaguccgugggcaaguucugccuggaggccagcuucaacuaccucaagagccccaacuucuccaagcugaucaacaucaucaucugguuccugcuccugagcgugugccuggggucccucaucuacagcacggccgcgcugggcguccugauguccaaccucgggaugccgagcuacugcaccggcuaccgcgagggcuaccugaacuccaccaacgugaccaucgccacguacugcaccgggagcauccccugcuccgugugccugagcggccucgacucccuggacaccuaccccagccuggagaccauccagaucacgaucuccagcuucaagugggaccucaccgccuucgggcuggucgccgagugguuccuggccuacauccucuucacccgguucuucuacgugcugggccuggcggccaucaugcagcucuucuucuccuacuucgccgugcacuucaucagcaacuccuggcugauguggcugaucaucaaccugguccagauggcccccaucagcgcgauggugcgcauguacaucuucuucgccuccuucuacuacguguggaagagcuacguccacgugguggacgggugcaacagcuccaccugcaugaugugcuacaagcggaaccgcgccacgcgggucgagugcaccaccaucgugaacggcguccgccggagcuucuacguguacgccaacggcgggaagggcuucugcaagcuccacaacuggaacugcgugaacugcgacaccuucugcgccggguccacguucaucagcgacgaggucgcgcgcgaccugucccugcaguucaagcggccgaucaaccccaccgaccagagcuccuacaucguggacagcgugaccgucaagaacggcuccauccaccucuacuucgacaaggccgggcagaagaccuacgagcgccacagccugucccacuucgugaaccuggacaaccuccgggccaacaacacgaagggcagccugcccaucaacgugaucgucuucgacggcaaguccaagugcgaggagagcuccgccaagagcgccuccguguacuacagccagcugaugugccagcccauccuccugcuggaccaggcgcucguguccgacgucggggacagcgccgagguggccgugaagauguucgacgccuacgucaacaccuucagcuccaccuucaacgugccgauggagaagcugaagacccugguggccacggcggaggccgagcucgccaagaacgucagccuggacaacgugcuguccaccuucaucagcgccgcgcgccagggcuucguggacuccgacgucgagaccaaggacgugguggagugccucaagcugagccaccaguccgacaucgaggucaccggggacagcugcaacaacuacaugcugacguacaacaagguggagaacaugaccccccgggaccucggcgccugcaucgacugcuccgcccgccacaucaacgcccagguggccaagagccacaacaucgcgcugaucuggaacgucaaggacuucaugucccugagcgagcagcuccggaagcagauccgcuccgccgccaagaagaacaaccugcccuucaagcugaccugcgccaccacgcgccagguggugaacgucgugaccaccaagaucgcccucaaggggggcugaggacuaguuauaagacugacuagcccgaugggccucccaacgggcccuccuccccuccuugcaccgagauuaauaaaaaaaaaaaaaaaaaaaaaaaaaaaaaaaaaaaaaaaaaaaaaaaaaaaaaaaaaaaaaaaaugcaucccccccccccccccccccccccccccccccaaaggcucuuuucagagccaccagaauu

SEQ ID NO: 21559 - RNA, 6058 nt, Artificial Sequence
  SARS-CoV-2__MT834661.1__non-structural protein 3 (NSP3) mRNA gc
aggagaaagcuuaccauggcccccaccaaggugaccuucggcgacgacacggucaucgaggugcagggguacaagagcgugaacaucaccuucgagcuggacgagcgcaucgacaagguccucaacgagaagugcuccgccuacaccguggagcugggcaccgaggugaacgaguucgcgugcgucguggccgacgccgugaucaagacgcugcagccggucagcgagcuccugaccccccuggggaucgaccucgacgagugguccauggccaccuacuaccuguucgacgagagcggcgaguucaagcuggccucccacauguacugcagcuucuacccccccgacgaggacgaggaggagggggacugcgaggaggaggaguucgagccguccacccaguacgaguacggcacggaggacgacuaccagggcaagccccucgaguucggggcgaccagcgccgcccugcagcccgaggaggagcaggaggaggacuggcuggacgacgacucccagcagaccgugggccagcaggacgggagcgaggacaaccagaccacgaccauccagaccaucguggagguccagccccagcucgagauggagcugaccccgguggugcagacgaucgaggucaacuccuucagcggcuaccugaagcucaccgacaacguguacaucaagaacgccgacaucguggaggaggcgaagaaggucaagcccaccgugguggucaacgccgccaacguguaccugaagcacgggggcggcguggccggggcccugaacaaggcgaccaacaacgccaugcaggucgaguccgacgacuacaucgccacgaacggcccccucaagguggggggcagcugcguccuguccggccacaaccuggccaagcacugccuccacgugguggggcccaacgucaacaagggcgaggacauccagcugcugaagagcgccuacgagaacuucaaccagcacgaggugcuccuggcgccgcugcucuccgccgggaucuucggcgccgaccccauccacagccugcgggugugcgucgacaccgugcgcaccaacguguaccuggccgucuucgacaagaaccucuacgacaagcugguguccagcuuccuggagaugaagagcgagaagcagguggagcagaagaucgccgagauccccaaggaggaggucaagcccuucaucaccgaguccaagccgagcguggagcagcggaagcaggacgacaagaagaucaaggcgugcguggaggaggucacgaccacccucgaggagaccaaguuccugacggagaaccugcuccuguacaucgacaucaacgggaaccugcaccccgacuccgccacccucgugagcgacaucgacaucaccuuccugaagaaggacgcccccuacaucgugggcgacgucgugcaggagggcgugcugaccgccgucgugauccccacgaagaaggccgggggcaccaccgagaugcucgcgaaggcccugcgcaaggugccgaccgacaacuacaucacgaccuaccccgggcagggccugaacggguacaccgucgaggaggccaagaccgugcucaagaagugcaaguccgccuucuacauccugcccagcaucaucuccaacgagaagcaggagauccugggcaccgugagcuggaaccuccgggagaugcuggcgcacgccgaggagacgcgcaagcugaugcccgucugcguggagaccaaggccaucguguccaccauccagcggaaguacaagggcaucaagauccaggagggggucguggacuacggcgcccgcuucuacuucuacaccagcaagacgaccguggccucccugaucaacacccucaacgaccugaacgagacccuggucacgaugccgcucggguacgugacccacggccugaaccuggaggaggcggcccgguacaugcgcagccucaaggugcccgccaccgucuccgugagcucccccgacgccgugaccgccuacaacggguaccugacgagcuccagcaagacccccgaggagcacuucaucgagaccaucucccuggcgggcagcuacaaggacuggagcuacuccggccagagcacccagcucgggaucgaguuccugaagcggggcgacaaguccgucuacuacacgagcaacccgaccaccuuccaccuggacggggaggugaucaccuucgacaaccucaagacgcugcugucccuccgcgaggugcggaccaucaaggucuucaccaccguggacaacaucaaccugcacacgcagguggucgacaugagcaugaccuacggccagcaguucggccccaccuaccuggacggggccgacgugaccaagaucaagccccacaacucccacgagggcaagacguucuacgugcucccgaacgacgacacccugcgcgucgaggccuucgaguacuaccacaccaccgaccccagcuuccuggggcgguacauguccgcccucaaccacacgaagaaguggaaguacccccaggugaacggccugaccagcaucaagugggccgacaacaacugcuaccuggcgaccgcccuccugacccugcagcagaucgagcucaaguucaaccccccggcccugcaggacgccuacuaccgcgcgcgggccggggaggccgccaacuucugcgcccugauccucgcguacugcaacaagacggugggcgagcugggcgacguccgcgagaccauguccuaccuguuccagcacgccaaccucgacagcugcaagcgggugcugaacgucgugugcaagaccugcgggcagcagcagaccacccugaagggcguggaggccgucauguacauggggacgcucuccuacgagcaguucaagaagggcgugcagauccccugcaccugcgggaagcaggccaccaaguaccuggugcagcaggagagccccuucgucaugauguccgcccccccggcgcaguacgagcugaagcacggcaccuucacgugcgccagcgaguacaccggcaacuaccagugcgggcacuacaagcacaucaccuccaaggagacccucuacugcaucgacggcgcccugcugacgaagagcagcgaguacaaggggcccaucaccgacguguucuacaaggagaacuccuacaccaccacgaucaagcccgugaccuacaagcucgacggcgucgugugcaccgagaucgaccccaagcuggacaacuacuacaagaaggacaacagcuacuucaccgagcagccgaucgaccuggugcccaaccagcccuaccccaacgccuccuucgacaacuucaaguucgucugcgacaacaucaaguucgccgacgaccucaaccagcugacgggguacaagaagccggcgagccgcgagcugaaggugaccuucuuccccgaccucaacggcgacguggucgccaucgacuacaagcacuacacccccuccuucaagaagggcgccaagcugcugcacaagcccaucguguggcacgugaacaacgccaccaacaaggcgacguacaagccgaacaccuggugcauccggugccucuggagcaccaagcccgucgagaccuccaacagcuucgacgugcugaaguccgaggacgcccaggggauggacaaccuggccugcgaggaccucaagcccgugagcgaggaggucguggagaaccccacgauccagaaggacgugcuggagugcaacgucaagaccaccgagguggugggcgacaucauccugaagccggccaacaacucccucaagaucaccgaggaggucgggcacacggaccugauggccgcguacguggacaacagcucccugaccaucaagaagcccaacgagcucagccgcgugcugggccugaagacccucgccacccacgggcuggccgccgucaacuccgugcccugggacacgaucgccaacuacgcgaagccguuccugaacaagguggucagcaccaccaccaacaucgugacgcgcugccucaaccgggugugcaccaacuacaugcccuacuucuucacccugcugcuccagcugugcaccuucacccgcuccacgaacagccggaucaaggccuccaugcccaccaccaucgccaagaacaccgucaagagcgugggcaaguucugccuggaggccagcuucaacuaccucaagucccccaacuucagcaagcugaucaacaucaucaucugguuccugcuccuguccgugugccugggcagccucaucuacuccacggccgcgcuggggguccugaugagcaaccucggcaugccguccuacugcaccggguaccgcgagggcuaccugaacagcaccaacgugaccaucgccacguacugcaccggcuccauccccugcagcgugugccuguccgggcucgacagccuggacaccuaccccucccuggagaccauccagaucacgaucagcuccuucaagugggaccucaccgccuucggccuggucgccgagugguuccuggccuacauccucuucacccgguucuucuacgugcuggggcuggcggccaucaugcagcucuucuucagcuacuucgccgugcacuucaucuccaacagcuggcugauguggcugaucaucaaccugguccagauggcccccaucuccgcgauggugcgcauguacaucuucuucgccagcuucuacuacguguggaagagcuacguccacgugguggacggcugcaacuccagcaccugcaugaugugcuacaagcggaaccgcgccacgcgggucgagugcaccaccaucgugaacgggguccgccgguccuucuacguguacgccaacggcggcaagggguucugcaagcuccacaacuggaacugcgugaacugcgacaccuucugcgccggcagcacguucaucuccgacgaggucgcgcgcgaccugagccugcaguucaagcggccgaucaaccccaccgaccaguccuucuacaucguggacagcgugaccgucaagaacggguccauccaccucuacuucgacaaggccggccagaagaccuacgagcgccacagccugucccacuucgugaaccuggacaaccuccgggccaacaacacgaaggggagccugcccaucaacgugaucgucuucgacggcaaguccaagugcgaggagagcuccgccaagagcgccuccguguacuacagccagcugaugugccagcccauccuccugcuggaccaggcgcucguguccgacgucggcgacagcgccgagguggccgugaagauguucgacgccuacgucaacaccuucagcuccaccuucaacgugccgauggagaagcugaagacccugguggccacggcggaggccgagcucgccaagaacgucagccuggacaacgugcuguccaccuucaucagcgccgcgcgccagggguucguggacuccgacgucgagaccaaggacgugguggagugccucaagcugagccaccaguccgacaucgaggucaccggcgacagcugcaacaacuacaugcugacguacaacaagguggagaacaugaccccccgggaccucggggccugcaucgacugcuccgcccgccacaucaacgcccagguggccaagagccacaacaucgcgcugaucuggaacgucaaggacuucaugucccugagcgagcagcuccggaagcagauccgcuccgccgccaagaagaacaaccugcccuucaagcugaccugcgccaccacgcgccagguggugaacgucgugaccaccaagaucgcccucaagggcgggugaggacuaguuauaagacugacuagcccgaugggccucccaacgggcccuccuccccuccuugcaccgagauuaauaaaaaaaaaaaaaaaaaaaaaaaaaaaaaaaaaaaaaaaaaaaaaaaaaaaaaaaaaaaaaaaaugcaucccccccccccccccccccccccccccccccaaaggcucuuuucagagccaccagaauu

SEQ ID NO: 21560 - RNA, 6058 nt, Artificial Sequence
  SARS-CoV-2__MT834662.1__non-structural protein 3 (NSP3) mRNA gc
aggagaaagcuuaccauggcccccaccaaggugaccuucggcgacgacacggucaucgaggugcagggguacaagagcgugaacaucaccuucgagcuggacgagcgcaucgacaagguccucaacgagaagugcuccgccuacaccguggagcugggcaccgaggugaacgaguucgcgugcgucguggccgacgccgugaucaagacgcugcagccggucagcgagcuccugaccccccuggggaucgaccucgacgagugguccauggccaccuacuaccuguucgacgagagcggcgaguucaagcuggccucccacauguacugcagcuucuacccccccgacgaggacgaggaggagggggacugcgaggaggaggaguucgagccguccacccaguacgaguacggcacggaggacgacuaccagggcaagccccucgaguucggggcgaccagcgccgcccugcagcccgaggaggagcaggaggaggacuggcuggacgacgacucccagcagaccgugggccagcaggacgggagcgaggacaaccagaccacgaccauccagaccaucguggagguccagccccagcucgagauggagcugaccccgguggugcagacgaucgaggucaacuccuucagcggcuaccugaagcucaccgacaacguguacaucaagaacgccgacaucguggaggaggcgaagaaggucaagcccaccgugguggucaacgccgccaacguguaccugaagcacgggggcggcguggccggggcccugaacaaggcgaccaacaacgccaugcaggucgaguccgacgacuacaucgccacgaacggcccccucaagguggggggcagcugcguccuguccggccacaaccuggccaagcacugccuccacgugguggggcccaacgucaacaagggcgaggacauccagcugcugaagagcgccuacgagaacuucaaccagcacgaggugcuccuggcgccgcugcucuccgccgggaucuucggcgccgaccccauccacagccugcgggugugcgucgacaccgugcgcaccaacguguaccuggccgucuucgacaagaaccucuacgacaagcugguguccagcuuccuggagaugaagagcgagaagcagguggagcagaagaucgccgagauccccaaggaggaggucaagcccuucaucaccgaguccaagccgagcguggagcagcggaagcaggacgacaagaagaucaaggcgugcguggaggaggucacgaccacccucgaggagaccaaguuccugacggagaaccugcuccuguacaucgacaucaacgggaaccugcaccccgacuccgccacccucgugagcgacaucgacaucaccuuccugaagaaggacgcccccuacaucgugggcgacgucgugcaggagggcgugcugaccgccgucgugauccccacgaagaaggccgggggcaccaccgagaugcucgcgaaggcccugcgcaaggugccgaccgacaacuacaucacgaccuaccccgggcagggccugaacggguacaccgucgaggaggccaagaccgugcucaagaagugcaaguccgccuucuacauccugcccagcaucaucuccaacgagaagcaggagauccugggcaccgugagcuggaaccuccgggagaugcuggcgcacgccgaggagacgcgcaagcugaugcccgucugcguggagaccaaggccaucguguccaccauccagcggaaguacaagggcaucaagauccaggagggggucguggacuacggcgcccgcuucuacuucuacaccagcaagacgaccguggccucccugaucaacacccucaacgaccugaacgagacccuggucacgaugccgcucggguacgugacccacggccugaaccuggaggaggcggcccgguacaugcgcagccucaaggugcccgccaccgucuccgugagcucccccgacgccgugaccgccuacaacggguaccugacgagcuccagcaagacccccgaggagcacuucaucgagaccaucucccuggcgggcagcuacaaggacuggagcuacuccggccagagcacccagcucgggaucgaguuccugaagcggggcgacaaguccgucuacuacacgagcaacccgaccaccuuccaccuggacggggaggugaucaccuucgacaaccucaagacgcugcugucccuccgcgaggugcggaccaucaaggucuucaccaccguggacaacaucaaccugcacacgcagguggucgacaugagcaugaccuacggccagcaguucggccccaccuaccuggacggggccgacgugaccaagaucaagccccacaacucccacgagggcaagacguucuacgugcucccgaacgacgacacccugcgcgucgaggccuucgaguacuaccacaccaccgaccccagcuuccuggggcgguacauguccgcccucaaccacacgaagaaguggaaguacccccaggugaacggccugaccagcaucaagugggccgacaacaacugcuaccuggcgaccgcccuccugacccugcagcagaucgagcucaaguucaaccccccggcccugcaggacgccuacuaccgcgcgcgggccggggaggccgccaacuucugcgcccugauccucgcguacugcaacaagacggugggcgagcugggcgacguccgcgagaccauguccuaccuguuccagcacgccaaccucgacagcugcaagcgggugcugaacgucgugugcaagaccugcgggcagcagcagaccacccugaagggcguggaggccgucauguacauggggacgcucuccuacgagcaguucaagaagggcgugcagauccccugcaccugcgggaagcaggccaccaaguaccuggugcagcaggagagccccuucgucaugauguccgcccccccggcgcaguacgagcugaagcacggcaccuucacgugcgccagcgaguacaccggcaacuaccagugcgggcacuacaagcacaucaccuccaaggagacccucuacugcaucgacggcgcccugcugacgaagagcagcgaguacaaggggcccaucaccgacguguucuacaaggagaacuccuacaccaccacgaucaagcccgugaccuacaagcucgacggcgucgugugcaccgagaucgaccccaagcuggacaacuacuacaagaaggacaacagcuacuucaccgagcagccgaucgaccuggugcccaaccagcccuaccccaacgccuccuucgacaacuucaaguucgucugcgacaacaucaaguucgccgacgaccucaaccagcugacgggguacaagaagccggcgagccgcgagcugaaggugaccuucuuccccgaccucaacggcgacguggucgccaucgacuacaagcacuacacccccuccuucaagaagggcgccaagcugcugcacaagcccaucguguggcacgugaacaacgccaccaacaaggcgacguacaagccgaacaccuggugcauccggugccucuggagcaccaagcccgucgagaccuccaacagcuucgacgugcugaaguccgaggacgcccaggggauggacaaccuggccugcgaggaccucaagcccgugagcgaggaggucguggagaaccccacgauccagaaggacgugcuggagugcaacgucaagaccaccgagguggugggcgacaucauccugaagccggccaacaacucccucaagaucaccgaggaggucgggcacacggaccugauggccgcguacguggacaacagcucccugaccaucaagaagcccaacgagcucagccgcgugcugggccugaagacccucgccacccacgggcuggccgccgucaacuccgugcccugggacacgaucgccaacuacgcgaagccguuccugaacaagguggucagcaccaccaccaacaucgugacgcgcugccucaaccgggugugcaccaacuacaugcccuacuucuucacccugcugcuccagcugugcaccuucacccgcuccacgaacagccggaucaaggccuccaugcccaccaccaucgccaagaacaccgucaagagcgugggcaaguucugccuggaggccagcuucaacuaccucaagucccccaacuucagcaagcugaucaacaucaucaucugguuccugcuccuguccgugugccugggcagccucaucuacuccacggccgcgcuggggguccugaugagcaaccucggcaugccguccuacugcaccggguaccgcgagggcuaccugaacagcaccaacgugaccaucgccacguacugcaccggcuccauccccugcagcgugugccuguccgggcucgacagccuggacaccuaccccucccuggagaccauccagaucacgaucagcuccuucaagugggaccucaccgccuucggccuggucgccgagugguuccuggccuacauccucuucacccgguucuucuacgugcuggggcuggcggccaucaugcagcucuucuucagcuacuucgccgugcacuucaucuccaacagcuggcugauguggcugaucaucaaccugguccagauggcccccaucuccgcgauggugcgcauguacaucuucuucgccagcuucuacuacguguggaagagcuacguccacgugguggacggcugcaacuccagcaccugcaugaugugcuacaagcggaaccgcgccacgcgggucgagugcaccaccaucgugaacgggguccgccgguccuucuacguguacgccaacggcggcaagggguucugcaagcuccacaacuggaacugcgugaacugcgacaccuucugcgccggcagcacguucaucuccgacgaggucgcgcgcgaccugagccugcaguucaagcggccgaucaaccccaccgaccaguccagcuacaucguggacuccgugaccgucaagaacgggagcauccaccucuacuucgacaaggccggccagaagaccuacgagcgccacucccugagccacuucgugaaccuggacaaccuccgggccaacaacacgaaggggucccugcccaucaacgugaucgucuucgacggcaagagcaagugcgaggaguccagcgccaaguccgccagcguguacuacucccagcugaugugccagcccauccuccugcuggaccaggcgcucgugagcgacgucggcgacagcgccgagguggccgugaagauguucgacgccuacgucaacaccuucuccagcaccuucaacgugccgauggagaagcugaagacccugguggccacggcggaggccgagcucgccaagaacgucucccuggacaacgugcugagcaccuucaucuccgccgcgcgccagggguucguggacagcgacgucgagaccaaggacgugguggagugccucaagcugucccaccagagcgacaucgaggucaccggcgacuccugcaacaacuacaugcugacguacaacaagguggagaacaugaccccccgggacuucggggccugcaucgacugcagcgcccgccacaucaacgcccagguggccaagucccacaacaucgcgcucaucuggaacgucaaggacuucaugagccuguccgagcagcugcggaagcagauccgcagcgccgccaagaagaacaaccuccccuucaagcugaccugcgccaccacgcgccagguggugaacgucgugaccaccaagaucgcccugaagggcgggugaggacuaguuauaagacugacuagcccgaugggccucccaacgggcccuccuccccuccuugcaccgagauuaauaaaaaaaaaaaaaaaaaaaaaaaaaaaaaaaaaaaaaaaaaaaaaaaaaaaaaaaaaaaaaaaaugcaucccccccccccccccccccccccccccccccaaaggcucuuuucagagccaccagaauu

SEQ ID NO: 21561 - RNA, 6058 nt, Artificial Sequence
  SARS-CoV-2__MT834668.1__non-structural protein 3 (NSP3) mRNA gc
aggagaaagcuuaccauggcccccaccaaggugaccuucggcgacgacacggucaucgaggugcagggguacaagagcgugaacaucaccuucgagcuggacgagcgcaucgacaagguccucaacgagaagugcuccgccuacaccguggagcugggcaccgaggugaacgaguucgcgugcgucguggccgacgccgugaucaagacgcugcagccggucagcgagcuccugaccccccuggggaucgaccucgacgagugguccauggccaccuacuaccuguucgacgagagcggcgaguucaagcuggccucccacauguacugcagcuucuacccccccgacgaggacgaggaggagggggacugcgaggaggaggaguucgagccguccacccaguacgaguacggcacggaggacgacuaccagggcaagccccucgaguucggggcgaccagcgccgcccugcagcccgaggaggagcaggaggaggacuggcuggacgacgacucccagcagaccgugggccagcaggacgggagcgaggacaaccagaccacgaccauccagaccaucguggagguccagccccagcucgagauggagcugaccccgguggugcagacgaucgaggucaacuccuucagcggcuaccugaagcucaccgacaacguguacaucaagaacgccgacaucguggaggaggcgaagaaggucaagcccaccgugguggucaacgccgccaacguguaccugaagcacgggggcggcguggccggggcccugaacaaggcgaccaacaacgccaugcaggucgaguccgacgacuacaucgccacgaacggcccccucaagguggggggcagcugcguccuguccggccacaaccuggccaagcacugccuccacgugguggggcccaacgucaacaagggcgaggacauccagcugcugaagagcgccuacgagaacuucaaccagcacgaggugcuccuggcgccgcugcucuccgccgggaucuucggcgccgaccccauccacagccugcgggugugcgucgacaccgugcgcaccaacguguaccuggccgucuucgacaagaaccucuacgacaagcugguguccagcuuccuggagaugaagagcgagaagcagguggagcagaagaucgccgagauccccaaggaggaggucaagcccuucaucaccgaguccaagccgagcguggagcagcggaagcaggacgacaagaagaucaaggcgugcguggaggaggucacgaccacccucgaggagaccaaguuccugacggagaaccugcuccuguacaucgacaucaacgggaaccugcaccccgacuccgccacccucgugagcgacaucgacaucaccuuccugaagaaggacgcccccuacaucgugggcgacgucgugcaggagggcgugcugaccgccgucgugauccccacgaagaaggccgggggcaccaccgagaugcucgcgaaggcccugcgcaaggugccgaccgacaacuacaucacgaccuaccccgggcagggccugaacggguacaccgucgaggaggccaagaccgugcucaagaagugcaaguccgccuucuacauccugcccagcaucaucuccaacgagaagcaggagauccugggcaccgugagcuggaaccuccgggagaugcuggcgcacgccgaggagacgcgcaagcugaugcccgucugcguggagaccaaggccaucguguccaccauccagcggaaguacaagggcaucaagauccaggagggggucguggacuacggcgcccgcuucuacuucuacaccagcaagacgaccguggccucccugaucaacacccucaacgaccugaacgagacccuggucacgaugccgcucggguacgugacccacggccugaaccuggaggaggcggcccgguacaugcgcagccucaaggugcccgccaccgucuccgugagcucccccgacgccgugaccgccuacaacggguaccugacgagcuccagcaagacccccgaggagcacuucaucgagaccaucucccuggcgggcagcuacaaggacuggagcuacuccggccagagcacccagcucgggaucgaguuccugaagcggggcgacaaguccgucuacuacacgagcaacccgaccaccuuccaccuggacggggaggugaucaccuucgacaaccucaagacgcugcugucccuccgcgaggugcggaccaucaaggucuucaccaccguggacaacaucaaccugcacacgcagguggucgacaugagcaugaccuacggccagcaguucggccccaccuaccuggacggggccgacgugaccaagaucaagucccacaacagccacgagggcaagacguucuacgugcuccccaacgacgacacccugcgcgucgaggccuucgaguacuaccacaccaccgacccguccuuccuggggcgguacaugagcgcccucaaccacacgaagaaguggaaguacccccaggugaacggccugaccuccaucaagugggccgacaacaacugcuaccuggcgaccgcccuccugacccugcagcagaucgagcucaaguucaacccccccgcccugcaggacgccuacuaccgcgcgcgggccggggaggccgccaacuucugcgcccugauccucgcguacugcaacaagacggugggcgagcugggcgacguccgcgagaccaugagcuaccuguuccagcacgccaaccucgacuccugcaagcgggugcugaacgucgugugcaagaccugcgggcagcagcagaccacccugaagggcguggaggccgucauguacauggggacgcucagcuacgagcaguucaagaagggcgugcagaucccgugcaccugcgggaagcaggccaccaaguaccuggugcagcaggagucccccuucgucaugaugagcgccccccccgcgcaguacgagcugaagcacggcaccuucacgugcgccuccgaguacaccggcaacuaccagugcgggcacuacaagcacaucaccagcaaggagacccucuacugcaucgacggcgcccugcugacgaagagcuccgaguacaaggggccgaucaccgacguguucuacaaggagaacagcuacaccaccacgaucaagcccgugaccuacaagcucgacggcgucgugugcaccgagaucgaccccaagcuggacaacuacuacaagaaggacaacuccuacuucaccgagcagcccaucgaccuggugccgaaccagcccuaccccaacgccagcuucgacaacuucaaguucgucugcgacaacaucaaguucgccgacgaccucaaccagcugacgggguacaagaagcccgcgucccgcgagcugaaggugaccuucuucccggaccucaacggcgacguggucgccaucgacuacaagcacuacacccccagcuucaagaagggcgccaagcugcugcacaagcccaucguguggcacgugaacaacgccaccaacaaggcgacguacaagcccaacaccuggugcauccggugccucugguccaccaagccggucgagaccagcaacuccuucgacgugcugaagagcgaggacgcccaggggauggacaaccuggccugcgaggaccucaagcccguguccgaggaggucguggagaaccccacgauccagaaggacgugcuggagugcaacgucaagaccaccgagguggugggcgacaucauccugaagcccgccaacaacagccucaagaucaccgaggaggucgggcacacggaccugauggccgcguacguggacaacuccagccugaccaucaagaagccgaacgagcucucccgcgugcugggccugaagacccucgccacccacgggcuggccgccgucaacagcgugcccugggacacgaucgccaacuacgcgaagcccuuccugaacaagguggucuccaccaccaccaacaucgugacgcgcugccucaaccgggugugcaccaacuacaugccguacuucuucacccugcugcuccagcugugcaccuucacccgcagcacgaacucccggaucaaggccagcaugcccaccaccaucgccaagaacaccgucaagagcgugggcaaguucugccuggaggccuccuucaacuaccucaagagccccaacuucuccaagcugaucaacaucaucaucugguuccugcuccugagcgugugccugggcucccucaucuacagcacggccgcgcuggggguccugauguccaaccucggcaugcccagcuacugcaccggguaccgcgagggcuaccugaacuccaccaacgugaccaucgccacguacugcaccggcagcaucccgugcuccgugugccugagcgggcucgacucccuggacaccuaccccagccuggagaccauccagaucacgaucuccagcuucaagugggaccucaccgccuucggccuggucgccgagugguuccuggccuacauccucuucacccgguucuucuacgugcuggggcuggcggccaucaugcagcucuucuucuccuacuucgccgugcacuucaucagcaacuccuggcugauguggcugaucaucaaccugguccagauggcccccaucagcgcgauggugcgcauguacaucuucuucgccagcuucuacuacguguggaaguccuacguccacgugguggacggcugcaacagcuccaccugcaugaugugcuacaagcggaaccgcgccacgcgggucgagugcaccaccaucgugaacgggguccgccggagcuucuacguguacgccaacggcggcaagggguucugcaagcuccacaacuggaacugcgugaacugcgacaccuucugcgccggcuccacguucaucagcgacgaggucgcgcgcgaccugucccugcaguucaagcggcccaucaacccgaccgaccagagcuccuacaucguggacagcgugaccgucaagaacggguccauccaccucuacuucgacaaggccggccagaagaccuacgagcgccacagccugucccacuucgugaaccuggacaaccuccgggccaacaacacgaaggggagccugcccaucaacgugaucgucuucgacggcaaguccaagugcgaggagagcuccgccaagagcgccuccguguacuacagccagcugaugugccagcccauccuccugcuggaccaggcgcucgugagcgacgucggcgacuccgccgagguggccgugaagauguucgacgccuacgucaacaccuucagcuccaccuucaacgugcccauggagaagcugaagacccugguggccacggcggaggccgagcucgccaagaacgucagccuggacaacgugcuguccaccuucaucagcgccgcgcgccagggguucguggacuccgacgucgagaccaaggacgugguggagugccucaagcugagccaccaguccgacaucgaggucaccggcgacagcugcaacaacuacaugcugacguacaacaagguggagaacaugaccccgcgggaccucggggccugcaucgacugcuccgcccgccacaucaacgcccagguggccaagagccacaacaucgcgcugaucuggaacgucaaggacuucaugucccugagcgagcagcuccggaagcagauccgcuccgccgccaagaagaacaaccugcccuucaagcugaccugcgccaccacgcgccagguggugaacgucgugaccaccaagaucgcccucaagggcgggugaggacuaguuauaagacugacuagcccgaugggccucccaacgggcccuccuccccuccuugcaccgagauuaauaaaaaaaaaaaaaaaaaaaaaaaaaaaaaaaaaaaaaaaaaaaaaaaaaaaaaaaaaaaaaaaaugcaucccccccccccccccccccccccccccccccaaaggcucuuuucagagccaccagaauu

SEQ ID NO: 21562 - RNA, 6058 nt, Artificial Sequence
  SARS-CoV-2__MT834697.1__non-structural protein 3 (NSP3) mRNA gc
aggagaaagcuuaccauggcccccaccaaggugaccuucggcgacgacacggucaucgaggugcagggguacaagagcgugaacaucaccuucgagcuggacgagcgcaucgacaagguccucaacgagaagugcuccgccuacaccguggagcugggcaccgaggugaacgaguucgcgugcgucguggccgacgccgugaucaagacgcugcagccggucagcgagcuccugaccccccuggggaucgaccucgacgagugguccauggccaccuacuaccuguucgacgagagcggcgaguucaagcuggccucccacauguacugcagcuucuacccccccgacgaggacgaggaggagggggacugcgaggaggaggaguucgagccguccacccaguacgaguacggcacggaggacgacuaccagggcaagccccucgaguucggggcgaccagcgccgcccugcagcccgaggaggagcaggaggaggacuggcuggacgacgacucccagcagaccgugggccagcaggacgggagcgaggacaaccagaccacgaccauccagaccaucguggagguccagccccagcucgagauggagcugaccccgguggugcagacgaucgaggucaacuccuucagcggcuaccugaagcucaccgacaacguguacaucaagaacgccgacaucguggaggaggcgaagaaggucaagcccaccgugguggucaacgccgccaacguguaccugaagcacgggggcggcguggccggggcccugaacaaggcgaccaacaacgccaugcaggucgaguccgacgacuacaucgccacgaacggcccccucaagguggggggcagcugcguccuguccggccacaaccuggccaagcacugccuccacgugguggggcccaacgucaacaagggcgaggacauccagcugcugaagagcgccuacgagaacuucaaccagcacgaggugcuccuggcgccgcugcucuccgccgggaucuucggcgccgaccccauccacagccugcgggugugcgucgacaccgugcgcaccaacguguaccuggccgucuucgacaagaaccucuacgacaagcugguguccagcuuccuggagaugaagagcgagaagcagguggagcagaagaucgccgagauccccaaggaggaggucaagcccuucaucaccgaguccaagccgagcguggagcagcggaagcaggacgacaagaagaucaaggcgugcguggaggaggucacgaccacccucgaggagaccaaguuccugacggagaaccugcuccuguacaucgacaucaacgggaaccugcaccccgacuccgccacccucgugagcgacaucgacaucaccuuccugaagaaggacgcccccuacaucgugggcgacgucgugcaggagggcgugcugaccgccgucgugauccccacgaagaaggccgggggcaccaccgagaugcucgcgaaggcccugcgcaaggugccgaccgacaacuacaucacgaccuaccccgggcagggccugaacggguacaccgucgaggaggccaagaccgugcucaagaagugcaaguccgccuucuacauccugcccagcaucaucuccaacgagaagcaggagauccugggcaccgugagcuggaaccuccgggagaugcuggcgcacgccgaggagacgcgcaagcugaugcccgucugcguggagaccaaggccaucguguccaccauccagcggaaguacaagggcaucaagauccaggagggggucguggacuacggcgcccgcuucuacuucuacaccagcaagacgaccguggccucccugaucaacacccucaacgaccugaacgagacccuggucacgaugccgcucggguacgugacccacggccugaaccuggaggaggcggcccgguacaugcgcagccucaaggugcccgccaccgucuccgugagcucccccgacgccgugaccgccuacaacggguaccugacgagcuccagcaagacccccgaggagcacuucaucgagaccaucucccuggcgggcagcuacaaggacuggagcuacuccggccagagcacccagcucgggaucgaguuccugaagcggggcgacaaguccgucuacuacacgagcaacccgaccaccuuccaccuggacggggaggugaucaccuucgacaaccucaagacgcugcugucccuccgcgaggugcggaccaucaaggucuucaccaccguggacaacaucaaccugcacacgcagguggucgacaugagcaugaccuacggccagcaguucggccccaccuaccuggacggggccgacgugaccaagaucaagccccacaacucccacgagggcaagacguucuacgugcucccgaacgacgacacccugcgcgucgaggccuucgaguacuaccacaccaccgaccccagcuuccuggggcgguacauguccgcccucaaccacacgaagaaguggaaguacccccaggugaacggccugaccagcaucaagugggccgacaacaacugcuaccuggcgaccgcccuccugacccugcagcagaucgagcucaaguucaaccccccggcccugcaggacgccuacuaccgcgcgcgggccggggaggccgccaacuucugcgcccugauccucgcguacugcaacaagacggugggcgagcugggcgacguccgcgagaccauguccuaccuguuccagcacgccaaccucgacagcugcaagcgggugcugaacgucgugugcaagaccugcgggcagcagcagaccacccugaagggcguggaggccgucauguacauggggacgcucuccuacgagcaguucaagaagggcgugcagauccccugcaccugcgggaagcaggccaccaaguaccuggugcagcaggagagccccuucgucaugauguccgcccccccggcgcaguacgagcugaagcacggcaccuucacgugcgccagcgaguacaccggcaacuaccagugcgggcacuacaagcacaucaccuccaaggagacccucuacugcaucgacggcgcccugcugacgaagagcagcgaguacaaggggcccaucaccgacguguucuacaaggagaacuccuacaccaccacgaucaagcccgugaccuacaagcucgacggcgucgugugcaccgagaucgaccccaagcuggacaacuacuacaagaaggacaacagcuacuucaccgagcagccgaucgaccuggugcccaaccagcccuaccccaacgccaucuucgacaacuucaaguucgucugcgacaacaucaaguucgccgacgaccucaaccagcugacgggguacaagaagccggcgucccgcgagcugaaggugaccuucuuccccgaccucaacggcgacguggucgccaucgacuacaagcacuacacccccagcuucaagaagggcgccaagcugcugcacaagcccaucguguggcacgugaacaacgccaccaacaaggcgacguacaagccgaacaccuggugcauccggugccucugguccaccaagcccgucgagaccagcaacuccuucgacgugcugaagagcgaggacgcccaggggauggacaaccuggccugcgaggaccucaagcccguguccgaggaggucguggagaaccccacgauccagaaggacgugcuggagugcaacgucaagaccaccgagguggugggcgacaucauccugaagccggccaacaacagccucaagaucaccgaggaggucgggcacacggaccugauggccgcguacguggacaacuccagccugaccaucaagaagcccaacgagcucucccgcgugcugggccugaagacccucgccacccacgggcuggccgccgucaacagcgugcccugggacacgaucgccaacuacgcgaagccguuccugaacaagguggucuccaccaccaccaacaucgugacgcgcugccucaaccgggugugcaccaacuacaugcccuacuucuucacccugcugcuccagcugugcaccuucacccgcagcacgaacucccggaucaaggccagcaugcccaccaccaucgccaagaacaccgucaaguccgugggcaaguucugccuggaggccagcuucaacuaccucaagagccccaacuucuccaagcugaucaacaucaucaucugguuccugcuccugagcgugugccugggcucccucaucuacagcacggccgcgcuggggguccugauguccaaccucggcaugccgagcuacugcaccggguaccgcgagggcuaccugaacuccaccaacgugaccaucgccacguacugcaccggcagcauccccugcuccgugugccugagcgggcucgacucccuggacaccuaccccagccuggagaccauccagaucacgaucuccagcuucaagugggaccucaccgccuucggccuggucgccgagugguuccuggccuacauccucuucacccgguucuucuacgugcuggggcuggcggccaucaugcagcucuucuucuccuacuucgccgugcacuucaucagcaacuccuggcugauguggcugaucaucaaccugguccagauggcccccaucagcgcgauggugcgcauguacaucuucuucgccuccuucuacuacguguggaagagcuacguccacgugguggacggcugcaacagcuccaccugcaugaugugcuacaagcggaaccgcgccacgcgggucgagugcaccaccaucgugaacgggguccgccggagcuucuacguguacgccaacggcggcaagggguucugcaagcuccacaacuggaacugcgugaacugcgacaccuucugcgccggcuccacguucaucagcgacgaggucgcgcgcgaccugucccugcaguucaagcggccgaucaaccccaccgaccagagcuccuacaucguggacagcgugaccgucaagaacggguccauccaccucuacuucgacaaggccggccagaagaccuacgagcgccacagccugucccacuucgugaaccuggacaaccuccgggccaacaacacgaaggggagccugcccaucaacgugaucgucuucgacggcaaguccaagugcgaggagagcuccgccaagagcgccuccguguacuacagccagcugaugugccagcccauccuccugcuggaccaggcgcucguguccgacgucggcgacagcgccgagguggccgugaagauguucgacgccuacgucaacaccuucagcuccaccuucaacgugccgauggagaagcugaagacccugguggccacggcggaggccgagcucgccaagaacgucagccuggacaacgugcuguccaccuucaucagcgccgcgcgccagggguucguggacuccgacgucgagaccaaggacgugguggagugccucaagcugagccaccaguccgacaucgaggucaccggcgacagcugcaacaacuacaugcugacguacaacaagguggagaacaugaccccccgggaccucggggccugcaucgacugcuccgcccgccacaucaacgcccagguggccaagagccacaacaucgcgcugaucuggaacgucaaggacuucaugucccugagcgagcagcuccggaagcagauccgcuccgccgccaagaagaacaaccugcccuucaagcugaccugcgccaccacgcgccagguggugaacgucgugaccaccaagaucgcccucaagggcgggugaggacuaguuauaagacugacuagcccgaugggccucccaacgggcccuccuccccuccuugcaccgagauuaauaaaaaaaaaaaaaaaaaaaaaaaaaaaaaaaaaaaaaaaaaaaaaaaaaaaaaaaaaaaaaaaaugcaucccccccccccccccccccccccccccccccaaaggcucuuuucagagccaccagaauu

SEQ ID NO: 21563 - RNA, 6058 nt, Artificial Sequence
  SARS-CoV-2__MT834733.1__non-structural protein 3 (NSP3) mRNA gc
aggagaaagcuuaccauggcccccaccaaggugaccuucggcgacgacacggucaucgaggugcagggguacaagagcgugaacaucaccuucgagcuggacgagcgcaucgacaagguccucaacgagaagugcuccgccuacaccguggagcugggcaccgaggugaacgaguucgcgugcgucguggccgacgccgugaucaagacgcugcagccggucagcgagcuccugaccccccuggggaucgaccucgacgagugguccauggccaccuacuaccuguucgacgagagcggcgaguucaagcuggccucccacauguacugcagcuucuacccccccgacgaggacgaggaggagggggacugcgaggaggaggaguucggcccguccacccaguacgaguacggcacggaggacgacuaccaggggaagccccucgaguucggcgcgaccagcgccgcccugcagcccgaggaggagcaggaggaggacuggcuggacgacgacucccagcagaccguggggcagcaggacggcagcgaggacaaccagaccacgaccauccagaccaucguggagguccagccccagcucgagauggagcugaccccgguggugcagacgaucgaggucaacuccuucagcggguaccugaagcucaccgacaacguguacaucaagaacgccgacaucguggaggaggcgaagaaggucaagcccaccgugguggucaacgccgccaacguguaccugaagcacggcggcgggguggccggcgcccugaacaaggcgaccaacaacgccaugcaggucgaguccgacgacuacaucgccacgaacgggccccucaaggugggcggcagcugcguccuguccgggcacaaccuggccaagcacugccuccacguggugggccccaacgucaacaagggggaggacauccagcugcugaagagcgccuacgagaacuucaaccagcacgaggugcuccuggcgccgcugcucuccgccggcaucuucggggccgaccccauccacagccugcgggugugcgucgacaccgugcgcaccaacguguaccuggccgucuucgacaagaaccucuacgacaagcugguguccagcuuccuggagaugaagagcgagaagcagguggagcagaagaucgccgagauccccaaggaggaggucaagcccuucaucaccgaguccaagccgagcguggagcagcggaagcaggacgacaagaagaucaaggcgugcguggaggaggucacgaccacccucgaggagaccaaguuccugacggagaaccugcuccuguacaucgacaucaacggcaaccugcaccccgacuccgccacccucgugagcgacaucgacaucaccuuccugaagaaggacgcccccuacaucgugggcgacgucgugcaggagggggugcugaccgccgucgugauccccacgaagaaggccggcgggaccaccgagaugcucgcgaaggcccugcgcaaggugccgaccgacaacuacaucacgaccuaccccggccaggggcugaacggcuacaccgucgaggaggccaagaccgugcucaagaagugcaaguccgccuucuacauccugcccagcaucaucuccaacgagaagcaggagauccugggcaccgugagcuggaaccuccgggagaugcuggcgcacgccgaggagacgcgcaagcugaugcccgucugcguggagaccaaggccaucguguccaccauccagcggaaguacaaggggaucaagauccaggagggcgucguggacuacggggcccgcuucuacuucuacaccagcaagacgaccguggccucccugaucaacacccucaacgaccugaacgagacccuggucacgaugccgcucggcuacgugacccacgggcugaaccuggaggaggcggcccgguacaugcgcagccucaaggugcccgccaccgucuccgugagcucccccgacgccgugaccgccuacaacggcuaccugacgagcuccagcaagacccccgaggagcacuucaucgagaccaucucccuggcgggcagcuacaaggacuggagcuacuccgggcagagcacccagcucggcaucgaguuccugaagcggggggacaaguccgucuacuacacgagcaacccgaccaccuuccaccuggacggcgaggugaucaccuucgacaaccucaagacgcugcugucccuccgcgaggugcggaccaucaaggucuucaccaccguggacaacaucaaccugcacacgcagguggucgacaugagcaugaccuacggccagcaguucgggcccaccuaccuggacggcgccgacgugaccaagaucaagccccacaacucccacgaggggaagacguucuacgugcucccgaacgacgacacccugcgcgucgaggccuucgaguacuaccacaccaccgaccccagcuuccugggccgguacauguccgcccucaaccacacgaagaaguggaaguacccccaggugaacgggcugaccagcaucaagugggccgacaacaacugcuaccuggcgaccgcccuccugacccugcagcagaucgagcucaaguucaaccccccggcccugcaggacgccuacuaccgcgcgcgggccggcgaggccgccaacuucugcgcccugauccucgcguacugcaacaagacggugggcgagcugggggacguccgcgagaccauguccuaccuguuccagcacgccaaccucgacagcugcaagcgggugcugaacgucgugugcaagaccugcggccagcagcagaccacccugaaggggguggaggccgucauguacaugggcacgcucuccuacgagcaguucaagaagggggugcagauccccugcaccugcggcaagcaggccaccaaguaccuggugcagcaggagagccccuucgucaugauguccgcccccccggcgcaguacgagcugaagcacggcaccuucacgugcgccagcgaguacaccgggaacuaccagugcggccacuacaagcacaucaccuccaaggagacccucuacugcaucgacggggcccugcugacgaagagcagcgaguacaagggccccaucaccgacguguucuacaaggagaacuccuacaccaccacgaucaagcccgugaccuacaagcucgacggggucgugugcaccgagaucgaccccaagcuggacaacuacuacaagaaggacaacagcuacuucaccgagcagccgaucgaccuggugcccaaccagcccuaccccaacgccuccuucgacaacuucaaguucgucugcgacaacaucaaguucgccgacgaccucaaccagcugacgggcuacaagaagccggcgagccgcgagcugaaggugaccuucuuccccgaccucaacggcgacguggucgccaucgacuacaagcacuacacccccuccuucaagaagggggccaagcugcugcacaagcccaucguguggcacgugaacaacgccaccaacaaggcgacguacaagccgaacaccuggugcauccggugccucuggagcaccaagcccgucgagaccuccaacagcuucgacgugcugaaguccgaggacgcccagggcauggacaaccuggccugcgaggaccucaagcccgugagcgaggaggucguggagaaccccacgauccagaaggacgugcuggagugcaacgucaagaccaccgagguggugggggacaucauccugaagccggccaacaacucccucaagaucaccgaggaggucggccacacggaccugauggccgcguacguggacaacagcucccugaccaucaagaagcccaacgagcucagccgcgugcuggggcugaagacccucgccacccacggccuggccgccgucaacuccgugcccugggacacgaucgccaacuacgcgaagccguuccugaacaagguggucagcaccaccaccaacaucgugacgcgcugccucaaccgggugugcaccaacuacaugcccuacuucuucacccugcugcuccagcugugcaccuucacccgcuccacgaacagccggaucaaggccuccaugcccaccaccaucgccaagaacaccgucaagagcgugggcaaguucugccuggaggccagcuucaacuaccucaagucccccaacuucagcaagcugaucaacaucaucaucugguuccugcuccuguccgugugccuggggagccucaucuacuccacggccgcgcugggcguccugaugagcaaccucgggaugccguccuacugcaccggcuaccgcgagggcuaccugaacagcaccaacgugaccaucgccacguacugcaccggguccauccccugcagcgugugccuguccggccucgacagccuggacaccuaccccucccuggagaccauccagaucacgaucagcuccuucaagugggaccucaccgccuucgggcuggucgccgagugguuccuggccuacauccucuucacccgguucuucuacgugcugggccuggcggccaucaugcagcucuucuucagcuacuucgccgugcacuucaucuccaacagcuggcugauguggcugaucaucaaccugguccagauggcccccaucuccgcgauggugcgcauguacaucuucuucgccagcuucuacuacguguggaagagcuacguccacgugguggacgggugcaacuccagcaccugcaugaugugcuacaagcggaaccgcgccacgcgggucgagugcaccaccaucgugaacggcguccgccgguccuucuacguguacgccaacggcgggaagggcuucugcaagcuccacaacuggaacugcgugaacugcgacaccuucugcgccgggagcacguucaucuccgacgaggucgcgcgcgaccugagccugcaguucaagcggccgaucaaccccaccgaccaguccagcuacaucguggacuccgugaccgucaagaacggcagcauccaccucuacuucgacaaggccgggcagaagaccuacgagcgccacucccugagccacuucgugaaccuggacaaccuccgggccaacaacacgaagggcucccugcccaucaacgugaucgucuucgacggcaagagcaagugcgaggaguccagcgccaaguccgccagcguguacuacucccagcugaugugccagcccauccuccugcuggaccaggcgcucgugagcgacgucggggacagcgccgagguggccgugaagauguucgacgccuacgucaacaccuucuccagcaccuucaacgugccgauggagaagcugaagacccugguggccacggcggaggccgagcucgccaagaacgucucccuggacaacgugcugagcaccuucaucuccgccgcgcgccagggcuucguggacagcgacgucgagaccaaggacgugguggagugccucaagcugucccaccagagcgacaucgaggucaccggggacuccugcaacaacuacaugcugacguacaacaagguggagaacaugaccccccgggaccucggcgccugcaucgacugcagcgcccgccacaucaacgcccagguggccaagucccacaacaucgcgcugaucuggaacgucaaggacuucaugagccuguccgagcagcuccggaagcagauccgcagcgccgccaagaagaacaaccugcccuucaagcugaccugcgccaccacgcgccagguggugaacgucgugaccaccaagaucgcccucaaggggggcugaggacuaguuauaagacugacuagcccgaugggccucccaacgggcccuccuccccuccuugcaccgagauuaauaaaaaaaaaaaaaaaaaaaaaaaaaaaaaaaaaaaaaaaaaaaaaaaaaaaaaaaaaaaaaaaaugcaucccccccccccccccccccccccccccccccaaaggcucuuuucagagccaccagaauu

SEQ ID NO: 21564 - RNA, 6058 nt, Artificial Sequence
  SARS-CoV-2__MT704820.1__non-structural protein 3 (NSP3) mRNA gc
aggagaaagcuuaccauggcccccaccaaggugaccuucggcgacgacacggucaucgaggugcagggguacaagagcgugaacaucaccuucgagcuggacgagcgcaucgacaagguccucaacgagaagugcuccgccuacaccguggagcugggcaccgaggugaacgaguucgcgugcgucguggccgacgccgugaucaagacgcugcagccggucagcgagcuccugaccccccuggggaucgaccucgacgagugguccauggccaccuacuaccuguucgacgagagcggcgaguucaagcuggccucccacauguacugcagcuucuacccccccgacgaggacgaggaggagggggacugcgaggaggaggaguucgagccguccacccaguacgaguacggcacggaggacgacuaccagggcaagccccucgaguucggggcgaccagcgccgcccugcagcccgaggaggagcaggaggaggacuggcuggacgacgacucccagcagaccgugggccagcaggacgggagcgaggacaaccagaccacgaccauccagaccaucguggagguccagccccagcucgagauggagcugaccccgguggugcagacgaucgaggucaacuccuucagcggcuaccugaagcucaccgacaacguguacaucaagaacgccgacaucguggaggaggcgaagaaggucaagcccaccgugguggucaacgccgccaacguguaccugaagcacgggggcggcguggccggggcccugaacaaggcgaccaacaacgccaugcaggucgaguccgacgacuacaucgccacgaacggcccccucaagguggggggcagcugcguccuguccggccacaaccuggccaagcacugccuccacgugguggggcccaacgucaacaagggcgaggacauccagcugcugaagagcgccuacgagaacuucaaccagcacgaggugcuccuggcgccgcugcucuccgccgggaucuucggcgccgaccccauccacagccugcgggugugcgucgacaccgugcgcaccaacguguaccuggccgucuucgacaagaaccucuacgacaagcugguguccagcuuccuggagaugaagagcgagaagcagguggagcagaagaucgccgagauccccaaggaggaggucaagcccuucaucaccgaguccaagccgagcguggagcagcggaagcaggacgacaacaagaucaaggcgugcguggaggaggucacgaccacccucgaggagaccaaguuccugacggagaaccugcuccuguacaucgacaucaacgggaaccugcaccccgacuccgccacccucgugagcgacaucgacaucaccuuccugaagaaggacgcccccuacaucgugggcgacgucgugcaggagggcgugcugaccgccgucgugauccccacgaagaaggccgggggcaccaccgagaugcucgcgaaggcccugcgcaaggugccgaccgacaacuacaucacgaccuaccccgggcagggccugaacggguacaccgucgaggaggccaagaccgugcucaagaagugcaaguccgccuucuacauccugcccagcaucaucuccaacgagaagcaggagauccugggcaccgugagcuggaaccuccgggagaugcuggcgcacgccgaggagacgcgcaagcugaugcccgucugcguggagaccaaggccaucguguccaccauccagcggaaguacaagggcaucaagauccaggagggggucguggacuacggcgcccgcuucuacuucuacaccagcaagacgaccguggccucccugaucaacacccucaacgaccugaacgagacccuggucacgaugccgcucggguacgugacccacggccugaaccuggaggaggcggcccgguacaugcgcagccucaaggugcccgccaccgucuccgugagcucccccgacgccgugaccgccuacaacggguaccugacgagcuccagcaagacccccgaggagcacuucaucgagaccaucucccuggcgggcagcuacaaggacuggagcuacuccggccagagcacccagcucgggaucgaguuccugaagcggggcgacaaguccgucuacuacacgagcaacccgaccaccuuccaccuggacggggaggugaucaccuucgacaaccucaagacgcugcugucccuccgcgaggugcggaccaucaaggucuucaccaccguggacaacaucaaccugcacacgcagguggucgacaugagcaugaccuacggccagcaguucggccccaccuaccuggacggggccgacgugaccaagaucaagccccacaacucccacgagggcaagacguucuacgugcucccgaacgacgacacccugcgcgucgaggccuucgaguacuaccacaccaccgaccccagcuuccuggggcgguacauguccgcccucaaccacacgaagaaguggaaguacccccaggugaacggccugaccagcaucaagugggccgacaacaacugcuaccuggcgaccgcccuccugacccugcagcagaucgagcucaaguucaaccccccggcccugcaggacgccuacuaccgcgcgcgggccggggaggccgccaacuucugcgcccugauccucgcguacugcaacaagacggugggcgagcugggcgacguccgcgagaccauguccuaccuguuccagcacgccaaccucgacagcugcaagcgggugcugaacgucgugugcaagaccugcgggcagcagcagaccacccugaagggcguggaggccgucauguacauggggacgcucuccuacgagcaguucaagaagggcgugcagauccccugcaccugcgggaagcaggccaccaaguaccuggugcagcaggagagccccuucgucaugauguccgcccccccggcgcaguacgagcugaagcacggcaccuucacgugcgccagcgaguacaccggcaacuaccagugcgggcacuacaagcacaucaccuccaaggagacccucuacugcaucgacggcgcccugcugacgaagagcagcgaguacaaggggcccaucaccgacguguucuacaaggagaacuccuacaccaccacgaucaagcccgugaccuacaagcucgacggcgucgugugcaccgagaucgaccccaagcuggacaacuacuacaagaaggacaacagcuacuucaccgagcagccgaucgaccuggugcccaaccagcccuaccccaacgccuccuucgacaacuucaaguucgucugcgacaacaucaaguucgccgacgaccucaaccagcugacgggguacaagaagccggcgagccgcgagcugaaggugaccuucuuccccgaccucaacggcgacguggucgccaucgacuacaagcacuacacccccuccuucaagaagggcgccaagcugcugcacaagcccaucguguggcacgugaacaacgccaccaacaaggcgacguacaagccgaacaccuggugcauccggugccucuggagcaccaagcccgucgagaccuccaacagcuucgacgugcugaaguccgaggacgcccaggggauggacaaccuggccugcgaggaccucaagcccgugagcgaggaggucguggagaaccccacgauccagaaggacgugcuggagugcaacgucaagaccaccgagguggugggcgacaucauccugaagccggccaacaacucccucaagaucaccgaggaggucgggcacacggaccugauggccgcguacguggacaacagcucccugaccaucaagaagcccaacgagcucagccgcgugcugggccugaagacccucgccacccacgggcuggccgccgucaacuccgugcccugggacacgaucgccaacuacgcgaagccguuccugaacaagguggucagcaccaccaccaacaucgugacgcgcugccucaaccgggugugcaccaacuacaugcccuacuucuucacccugcugcuccagcugugcaccuucacccgcuccacgaacagccggaucaaggccuccaugcccaccaccaucgccaagaacaccgucaagagcgugggcaaguucugccuggaggccagcuucaacuaccucaagucccccaacuucagcaagcugaucaacaucaucaucugguuccugcuccuguccgugugccugggcagccucaucuacuccacggccgcgcuggggguccugaugagcaaccucggcaugccguccuacugcaccggguaccgcgagggcuaccugaacagcaccaacgugaccaucgccacguacugcaccggcuccauccccugcagcgugugccuguccgggcucgacagccuggacaccuaccccucccuggagaccauccagaucacgaucagcuccuucaagugggaccucaccgccuucggccuggucgccgagugguuccuggccuacauccucuucacccgguucuucuacgugcuggggcuggcggccaucaugcagcucuucuucagcuacuucgccgugcacuucaucuccaacagcuggcugauguggcugaucaucaaccugguccagauggcccccaucuccgcgauggugcgcauguacaucuucuucgccagcuucuacuacguguggaagagcuacguccacgugguggacggcugcaacuccagcaccugcaugaugugcuacaagcggaaccgcgccacgcgggucgagugcaccaccaucgugaacgggguccgccgguccuucuacguguacgccaacggcggcaagggguucugcaagcuccacaacuggaacugcgugaacugcgacaccuucugcgccggcagcacguucaucuccgacgaggucgcgcgcgaccugagccugcaguucaagcggccgaucaaccccaccgaccaguccagcuacaucguggacuccgugaccgucaagaacgggagcauccaccucuacuucgacaaggccggccagaagaccuacgagcgccacucccugagccacuucgugaaccuggacaaccuccgggccaacaacacgaaggggucccugcccaucaacgugaucgucuucgacggcaagagcaagugcgaggaguccagcgccaaguccgccagcguguacuacucccagcugaugugccagcccauccuccugcuggaccaggcgcucgugagcgacgucggcgacagcgccgagguggccgugaagauguucgacgccuacgucaacaccuucuccagcaccuucaacgugccgauggagaagcugaagacccugguggccacggcggaggccgagcucgccaagaacgucucccuggacaacgugcugagcaccuucaucuccgccgcgcgccagggguucguggacagcgacgucgagaccaaggacgugguggagugccucaagcugucccaccagagcgacaucgaggucaccggcgacuccugcaacaacuacaugcugacguacaacaagguggagaacaugaccccccgggaccucggggccugcaucgacugcagcgcccgccacaucaacgcccagguggccaagucccacaacaucgcgcugaucuggaacgucaaggacuucaugagccuguccgagcagcuccggaagcagauccgcagcgccgccaagaagaacaaccugcccuucaagcugaccugcgccaccacgcgccagguggugaacgucgugaccaccaagaucgcccucaagggcgggugaggacuaguuauaagacugacuagcccgaugggccucccaacgggcccuccuccccuccuugcaccgagauuaauaaaaaaaaaaaaaaaaaaaaaaaaaaaaaaaaaaaaaaaaaaaaaaaaaaaaaaaaaaaaaaaaugcaucccccccccccccccccccccccccccccccaaaggcucuuuucagagccaccagaauu

SEQ ID NO: 21565 - RNA, 6058 nt, Artificial Sequence
  SARS-CoV-2__MT827209.1__non-structural protein 3 (NSP3) mRNA gc
aggagaaagcuuaccauggcccccaccaaggugaccuucggcgacgacacggucaucgaggugcagggguacaagagcgugaacaucaccuucgagcuggacgagcgcaucgacaagguccucaacgagaagugcuccgccuacaccguggagcugggcaccgaggugaacgaguucgcgugcgucguggccgacgccgugaucaagacgcugcagccggucagcgagcuccugaccccccuggggaucgaccucgacgagugguccauggccaccuacuaccuguucgacgagagcggcgaguucaagcuggccucccacauguacugcagcuucuacccccccgacgaggacgaggaggagggggacugcgaggaggaggaguucgagccguccacccaguacgaguacggcacggaggacgacuaccagggcaagccccucgaguucggggcgaccagcgccgcccugcagcccgaggaggagcaggaggaggacuggcuggacgacgacucccagcagaccgugggccagcaggacgggagcgaggacaaccagaccacgaccauccagaccaucguggagguccagccccagcucgagauggagcugaccccgguggugcagacgaucgaggucaacuccuucagcggcuaccugaagcucaccgacaacguguacaucaagaacgccgacaucguggaggaggcgaagaaggucaagcccaccgugguggucaacgccgccaacguguaccugaagcacgggggcggcguggccggggcccugaacaaggcgaccaacaacgccaugcaggucgaguccgacgacuacaucgccacgaacggcccccucaagguggggggcagcugcguccuguccggccacaaccuggccaagcacugccuccacgugguggggcccaacgucaacaagggcgaggacauccagcugcugaagagcgccuacgagaacuucaaccagcacgaggugcuccuggcgccgcugcucuccgccgggaucuucggcgccgaccccauccacagccugcgggugugcgucgacaccgugcgcaccaacguguaccuggccgucuucgacaagaaccucuacgacaagcugguguccagcuuccuggagaugaagagcgagaagcagguggagcagaagaucgccgagauccccaaggaggaggucaagcccuucaucaccgaguccaagccgagcguggagcagcggaagcaggacgacaagaagaucaaggcgugcguggaggaggucacgaccacccucgaggagaccaaguuccugacggagaaccugcuccuguacaucgacaucaacgggaaccugcaccccgacuccgccacccucgugagcgacaucgacaucaccuuccugaagaaggacgcccccuacaucgugggcgacgucgugcaggagggcgugcugaccgccgucgugauccccacgaagaaggccgggggcaccaccgagaugcucgcgaaggcccugcgcaaggugccgaccgacaacuacaucacgaccuaccccgggcagggccugaacggguacaccgucgaggaggccaagaccgugcucaagaagugcaaguccgccuucuacauccugcccagcaucaucuccaacgagaagcaggagauccugggcaccgugagcuggaaccuccgggagaugcuggcgcacgccgaggagacgcgcaagcugaugcccgucugcguggagaccaaggccaucguguccaccauccagcggaaguacaagggcaucaagauccaggagggggucguggacuacggcgcccgcuucuacuucuacaccagcaagacgaccguggccucccugaucaacacccucaacgaccugaacgagacccuggucacgaugccgcucggguacgugacccacggccugaaccuggaggaggcggcccgguacaugcgcagccucaaggugcccgccaccgucuccgugagcucccccgacgccgugaccgccuacaacggguaccugacgagcuccagcaagacccccgaggagcacuucaucgagaccaucucccuggcgggcagcuacaaggacuggagcuacuccggccagagcacccagcucgggaucgaguuccugaagcggggcgacaaguccgucuacuacacgagcaacccgaccaccuuccaccuggacggggaggugaucaccuucgacaaccucaagacgcugcugucccuccgcgaggugcggaccaucaaggucuucaccaccguggacaacaucaaccugcacacgcagguggucgacaugagcaugaccuacggccagcaguucggccccaccuaccuggacggggccgacgugaccaagaucaagccccacaacucccacgagggcaagacguucuacgugcucccgaacgacgacacccugcgcgucgaggccuucgaguacuaccacaccaccgaccccagcuuccuggggcgguacauguccgcccucaaccacacgaagaaguggaaguacccccaggugaacggccugaccagcaucaagugggccgacaacaacugcuaccuggcgaccgcccuccugacccugcagcagaucgagcucaaguucaaccccccggcccugcaggacgccuacuaccgcgcgcgggccggggaggccgccaacuucugcgcccugauccucgcguacugcaacaagacggugggcgagcugggcgacguccgcgagaccauguccuaccuguuccagcacgccaaccucgacagcugcaagcgggugcugaacgucgugugcaagaccugcgggcagcagcagaccacccugaagggcguggaggccgucauguacauggggacgcucuccuacgagcaguucaagaagggcgugcagauccccugcaccugcgggaagcaggccaccaaguaccuggugcagcaggagagccccuucgucaugauguccgcccccccggcgcaguacgagcugaagcacggcaccuucacgugcgccagcgaguacaccggcaacuaccagugcgggcacuacaagcacaucaccuccaaggagacccucuacugcaucgacggcgcccugcugacgaagagcagcgaguacaaggggcccaucaccgacguguucuacaaggagaacuccuacaccaccacgaucaagcccgugaccuacaagcucgacggcgucgugugcaccgagaucgaccccaagcuggacaacuacuacaagaaggacaacagcuacuucaccgagcagccgaucgaccuggugcccaaccagcccuaccccaacgccuccuucgacaacuucaaguucgucugcgacaacaucaaguucgccgacgaccucaaccagcugacgggguacaagaagccggcgagccgcgagcugaaggugaccuucuuccccgaccucaacggcgacguggucgccaucgacuacaagcacuacacccccuccuucaagaagggcgccaagcugcugcacaagcccaucguguggcacgugaacaacgccaccaacaaggucacguacaagccgaacaccuggugcauccggugccucuggagcaccaagcccguggagaccuccaacagcuucgacgugcugaaguccgaggacgcgcaggggauggacaaccuggccugcgaggaccucaagcccgucagcgaggaggugguggagaaccccacgauccagaaggacguccuggagugcaacgugaagaccaccgagguggucggcgacaucauccugaagccggccaacaacucccucaagaucaccgaggagguggggcacacggaccugauggccgccuacguggacaacagcucccugaccaucaagaagcccaacgagcucagccgcguccugggccugaagacccucgcgacccacgggcuggccgccgugaacuccgugcccugggacacgaucgccaacuacgccaagccguuccugaacaaggucgugagcaccaccaccaacaucgugacgcgcugccucaaccgggucugcaccaacuacaugcccuacuucuucacccugcugcuccagcugugcaccuucacccgcuccacgaacagccggaucaaggcguccaugcccaccaccaucgccaagaacaccgugaagagcgugggcaaguucugccuggaggccagcuucaacuaccucaagucccccaacuucagcaagcugaucaacaucaucaucugguuccugcuccuguccgucugccugggcagccucaucuacuccacggccgcccugggggugcugaugagcaaccucggcaugccguccuacugcaccggguaccgcgagggcuaccugaacagcaccaacgugaccaucgcgacguacugcaccggcuccauccccugcagcgucugccuguccgggcucgacagccuggacaccuaccccucccuggagaccauccagaucacgaucagcuccuucaagugggaccucaccgccuucggccugguggccgagugguuccuggccuacauccucuucacccgguucuucuacgugcuggggcuggccgcgaucaugcagcucuucuucagcuacuucgccguccacuucaucuccaacagcuggcugauguggcugaucaucaaccuggugcagauggcccccaucuccgccauggugcgcauguacaucuucuucgcgagcuucuacuacgucuggaagagcuacgugcacguggucgacggcugcaacuccagcaccugcaugaugugcuacaagcggaaccgcgccacgcggguggagugcaccaccaucgucaacggggugcgccgguccuucuacguguacgccaacggcggcaagggguucugcaagcuccacaacuggaacugcgucaacugcgacaccuucugcgccggcagcacguucaucuccgacgagguggcccgcgaccugagccugcaguucaagcggccgaucaaccccaccgaccaguccagcuacaucguggacuccgucaccgugaagaacgggagcauccaccucuacuucgacaaggcgggccagaagaccuacgagcgccacucccugagccacuucgugaaccuggacaaccuccgggccaacaacacgaaggggucccugcccaucaacgucaucguguucgacggcaagagcaagugcgaggaguccagcgccaaguccgccagcguguacuacucccagcugaugugccagcccauccuccugcuggaccaggcccucgucagcgacgugggcgacagcgcggagguggccgucaagauguucgacgccuacgugaacaccuucuccagcaccuucaacgugccgauggagaagcugaagacccuggucgccacggccgaggcggagcucgccaagaacgugucccuggacaacgugcugagcaccuucaucuccgccgcccgccagggguucgucgacagcgacguggagaccaaggacguggucgagugccucaagcugucccaccagagcgacaucgaggugaccggcgacuccugcaacaacuacaugcugacguacaacaagguggagaacaugaccccccgggaccucggggcgugcaucgacugcagcgcccgccacaucaacgcccaggucgccaagucccacaacaucgcccugaucuggaacgugaaggacuucaugagccuguccgagcagcuccggaagcagauccgcagcgcggccaagaagaacaaccugcccuucaagcugaccugcgccaccacgcgccagguggucaacguggugaccaccaagaucgcccucaagggcgggugaggacuaguuauaagacugacuagcccgaugggccucccaacgggcccuccuccccuccuugcaccgagauuaauaaaaaaaaaaaaaaaaaaaaaaaaaaaaaaaaaaaaaaaaaaaaaaaaaaaaaaaaaaaaaaaaugcaucccccccccccccccccccccccccccccccaaaggcucuuuucagagccaccagaauu

SEQ ID NO: 21566 - RNA, 6058 nt, Artificial Sequence
  SARS-CoV-2__MT827213.1__non-structural protein 3 (NSP3) mRNA gc
aggagaaagcuuaccauggcccccaccaaggugaccuucggcgacgacacggucaucgaggugcagggguacaagagcgugaacaucaccuucgagcuggacgagcgcaucgacaagguccucaacgagaagugcuccgccuacaccguggagcugggcaccgaggugaacgaguucgcgugcgucguggccgacgccgugaucaagacgcugcagccggucagcgagcuccugaccccccuggggaucgaccucgacgagugguccauggccaccuacuaccuguucgacgagagcggcgaguucaagcuggccucccacauguacugcagcuucuacccccccgacgaggacgaggaggagggggacugcgaggaggaggaguucgagccguccacccaguacgaguacggcacggaggacgacuaccagggcaagccccucgaguucggggcgaccagcgccgcccugcagcccgaggaggagcaggaggaggacuggcuggacgacgacucccagcagaccgugggccagcaggacgggagcgaggacaaccagaccacgaccauccagaccaucguggagguccagccccagcucgagauggagcugaccccgguggugcagacgaucgaggucaacuccuucagcggcuaccugaagcucaccgacaacguguacaucaagaacgccgacaucguggaggaggcgaagaaggucaagcccaccgugguggucaacgccgccaacguguaccugaagcacgggggcggcguggccggggcccugaacaaggcgaccaacaacgccaugcaggucgaguccgacgacuacaucgccacgaacggcccccucaagguggggggcagcugcguccuguccggccacaaccuggccaagcacugccuccacgugguggggcccaacgucaacaagggcgaggacauccagcugcugaagagcgccuacgagaacuucaaccagcacgaggugcuccuggcgccgcugcucuccgccgggaucuucggcgccgaccccauccacagccugcgggugugcgucgacaccgugcgcaccaacguguaccuggccgucuucgacaagaaccucuacgacaagcugguguccagcuuccuggagaugaagagcgagaagcagguggagcagaagaucgccgagauccccaaggaggaggucaagcccuucaucaccgaguccaagccgagcguggagcagcggaagcaggacgacaagaagaucaaggcgugcguggaggaggucacgaccacccucgaggagaccaaguuccugacggagaaccugcuccuguacaucgacaucaacgggaaccugcaccccgacuccgccacccucgugagcgacaucgacaucaccuuccugaagaaggacgcccccuacaucgugggcgacgucgugcaggagggcgugcugaccgccgucgugauccccacgaagaaggccgggggcaccaccgagaugcucgcgaaggcccugcgcaaggugccgaccgacaacuacaucacgaccuaccccgggcagggccugaacggguacaccgucgaggaggccaagaccgugcucaagaagugcaaguccgccuucuacauccugcccagcaucaucuccaacgagaagcaggagauccugggcaccgugagcuggaaccuccgggagaugcuggcgcacgccgaggagacgcgcaagcugaugcccgucugcguggagaccaaggccaucguguccaccauccagcggaaguacaagggcaucaagauccaggagggggucguggacuacggcgcccgcuucuacuucuacaccagcaagacgaccguggccucccugaucaacacccucaacgaccugaacgagacccuggucacgaugccgcucggguacgugacccacggccugaaccuggaggaggcggcccgguacaugcgcagccucaaggugcccgccaccgucuccgugagcucccccgacgccgugaccgccuacaacggguaccugacgagcuccagcaagacccccgaggagcacuucaucgagaccaucucccuggcgggcagcuacaaggacuggagcuacuccggccagagcacccagcucgggaucgaguuccugaagcggggcgacaaguccgucuacuacacgagcaacccgaccaccuuccaccuggacggggaggugaucaccuucgacaaccucaagacgcugcugucccuccgcgaggugcggaccaucaaggucuucaccaccguggacaacaucaaccugcacacgcagguggucgacaugagcaugaccuacggccagcaguucggccccaccuaccuggacggggccgacgugaccaagaucaagccccacaacucccacgagggcaagacguucuacgugcucccgaacgacgacacccugcgcgucgaggccuucgaguacuaccacaccaccgaccccagcuuccuggggcgguacauguccgcccucaaccacacgaagaaguggaaguacccccaggugaacggccugaccagcaucaagugggccgacaacaacugcuaccuggcgaccgcccuccugacccugcagcagaucgagcucaaguucaaccccccggcccugcaggacgccuacuaccgcgcgcgggccggggaggccgccaacuucugcgcccugauccucgcguacugcaacaagacggugggcgagcugggcgacguccgcgagaccauguccuaccuguuccagcacgccaaccucgacagcugcaagcgggugcugaacgucgugugcaagaccugcgggcagcagcagaccacccugaagggcguggaggccgucauguacauggggacgcucuccuacgagcaguucaagaagggcgugcagauccccugcaccugcgggaagcaggccaccaaguaccuggugcagcaggagagccccuucgucaugauguccgcccccccggcgcaguacgagcugaagcacggcaccuucacgugcgccagcgaguacaccggcaacuaccagugcgggcacuacaagcacaucaccuccaaggagacccucuacugcaucgacggcgcccugcugacgaagagcagcgaguacaaggggcccaucaccgacguguucuacaaggagaacuccuacaccaccacgaucaagcccgugaccuacaagcucgacggcgucgugugcaccgagaucgaccccaagcuggacaacuacuacaagaaggacaacagcuacuucaccgagcagccgaucgaccuggugcccaaccagcccuaccccaacgccuccuucgacaacuucaaguucgucugcgacaacaucaaguucgccgacgaccucaaccagcugacgggguacaagaagccggcgagccgcgagcugaaggugaccuucuuccccgaccucaacggcgacguggucgccaucgacuacaagcacuacacccccuccuucaagaagggcgccaagcugcugcacaagcccaucguguggcacgugaacaacgccaccaacaaggcgacguacaagccgaacaccuggugcauccggugccucuggagcaccaagcccgucgagaccuccaacagcuucgacgugcugaaguccgaggacgcccaggggauggacaaccuggccugcgaggaccucaagcccgugagcgaggaggucguggagaaccccacgauccagaaggacgugcuggagugcaacgucaagaccaccgagguggugggcgacaucauccugaagccggccaacaacucccucaagaucaccgaggaggucgggcacacggaccugauggccgcguacguggacaacagcucccugaccaucaagaagcccaacgagcucagccgcgugcugggccugaagacccucgccacccacgggcuggccgccgucaacuccgugcccugggacacgaucgccaacuacgcgaagccguuccugaacaagguggucagcaccaccaccaacaucgugacgcgcugccucaaccgggugugcaccaacuacaugcccuacuucuucacccugcugcuccagcugugcaccuucacccgcuccacgaacagccggaucaaggccuccaugcccaccaccaucgccaagaacaccgucaagagcgugggcaaguucugccuggaggccagcuucaacuaccucaagucccccaacuucagcaagcugaucaacaucaucaucugguuccugcuccuguccgugugccugggcagccucaucuacuccacggccgcgcuggggguccugaugagcaaccucggcaugccguccuacugcaccggguaccgcgagggcuaccugaacagcaccaacgugaccaucgccacguacugcaccggcuccauccccugcagcgugugccuguccgggcucgacagccuggacaccuaccccucccuggagaccauccagaucacgaucagcuccuucaagugggaccucaccgccuucggccuggucgccgagugguuccuggccuacauccucuucacccgguucuucuacgugcuggggcuggcggccaucaugcagcucuucuucagcuacuucgccgugcacuucaucuccaacagcuggcugauguggcugaucaucaaccugguccagauggcccccaucuccgcgauggugcgcauguacaucuucuucgccagcuucuacuacguguggaagagcuacguccacgugguggacggcugcaacuccagcaccugcaugaugugcuacaagcggaaccgcgccacgcgggucgagugcaccaccaucgugaacgggguccgccgguccuucuacguguacgccaacggcggcaagggguucugcaagcuccacaacuggaacugcgugaacugcgacaccuucugcgccggcagcacguucaucuccgacgaggucgcgcgcgaccugagccugcaguucaagcggccgaucaaccccaccgaccaguccagcuacaucguggacuccgugaccgucaagaacgggagcauccaccucuacuucgacaaggccggccagaagaccuacgagcgccacucccugagccacuucgugaaccuggacaaccuccgggccaacaacacgaaggggucccugcccaucaacgugaucgucuucgacggcaagagcaagugcgaggaguccagcgccaaguccgccagcguguacuacucccagcugaugugccagcccauccuccugcuggaccaggcgcucgugagcgacgucggcgacagcguggagguggccgucaagauguucgacgccuacgugaacaccuucuccagcaccuucaacgugccgauggagaagcugaagacccuggucgccacggccgaggcggagcucgccaagaacgugucccuggacaacgugcugagcaccuucaucuccgccgcccgccagggguucgucgacagcgacguggagaccaaggacguggucgagugccucaagcugucccaccagagcgacaucgaggugaccggcgacuccugcaacaacuacaugcugacguacaacaagguggagaacaugaccccccgggaccucggggcgugcaucgacugcagcgcccgccacaucaacgcccaggucgccaagucccacaacaucgcccugaucuggaacgugaaggacuucaugagccuguccgagcagcuccggaagcagauccgcagcgcggccaagaagaacaaccugcccuucaagcugaccugcgccaccacgcgccagguggucaacguggugaccaccaagaucgcccucaagggcgggugaggacuaguuauaagacugacuagcccgaugggccucccaacgggcccuccuccccuccuugcaccgagauuaauaaaaaaaaaaaaaaaaaaaaaaaaaaaaaaaaaaaaaaaaaaaaaaaaaaaaaaaaaaaaaaaaugcaucccccccccccccccccccccccccccccccaaaggcucuuuucagagccaccagaauu

SEQ ID NO: 21567 - RNA, 6058 nt, Artificial Sequence
  SARS-CoV-2__MT827229.1__non-structural protein 3 (NSP3) mRNA gc
aggagaaagcuuaccauggcccccaccaaggugaccuucggcgacgacacggucaucgaggugcagggguacaagagcgugaacaucaccuucgagcuggacgagcgcaucgacaagguccucaacgagaagugcuccgccuacaccguggagcugggcaccgaggugaacgaguucgcgugcgucguggccgacgccgugaucaagacgcugcagccggucagcgagcuccugaccccccuggggaucgaccucgacgagugguccauggccaccuacuaccuguucgacgagagcggcgaguucaagcuggccucccacauguacugcagcuucuacccccccgacgaggacgaggaggagggggacugcgaggaggaggaguucgagccguccacccaguacgaguacggcacggaggacgacuaccagggcaagccccucgaguucggggcgaccagcgccgcccugcagcccgaggaggagcaggaggaggacuggcuggacgacgacucccagcagaccgugggccagcaggacgggagcgaggacaaccagaccacgaccauccagaccaucguggagguccagccccagcucgagauggagcugaccccgguggugcagacgaucgaggucaacuccuucagcggcuaccugaagcucaccgacaacguguacaucaagaacgccgacaucguggaggaggcgaagaaggucaagcccaccgugguggucaacgccgccaacguguaccugaagcacgggggcggcguggccggggcccugaacaaggcgaccaacaacgccaugcaggucgaguccgacgacuacaucgccacgaacggcccccucaagguggggggcagcugcguccuguccggccacaaccuggccaagcacugccuccacgugguggggcccaacgucaacaagggcgaggacauccagcugcugaagagcgccuacgagaacuucaaccagcacgaggugcuccuggcgccgcugcucuccgccgggaucuucggcgccgaccccauccacagccugcgggugugcgucgacaccgugcgcaccaacguguaccuggccgucuucgacaagaaccucuacgacaagcugguguccagcuuccuggagaugaagagcgagaagcagguggagcagaagaucgccgagauccccaaggaggaggucaagcccuucaucaccgaguccaagccgagcguggagcagcggaagcaggacgacaagaagaucaaggcgugcguggaggaggucacgaccacccucgaggagaccaaguuccugacggagaaccugcuccuguacaucgacaucaacgggaaccugcaccccgacuccgccacccucgugagcgacaucgacaucaccuuccugaagaaggacgcccccuacaucgugggcgacgucgugcaggagggcgugcugaccgccgucgugauccccacgaagaaggccgggggcaccaccgagaugcucgcgaaggcccugcgcaaggugccgaccgacaacuacaucacgaccuaccccgggcagggccugaacggguacaccgucgaggaggccaagaccgugcucaagaagugcaaguccgccuucuacauccugcccagcaucaucuccaacgagaagcaggagauccugggcaccgugagcuggaaccuccgggagaugcuggcgcacgccgaggagacgcgcaagcugaugcccgucugcguggagaccaaggccaucguguccaccauccagcggaaguacaagggcaucaagauccaggagggggucguggacuacggcgcccgcuucuacuucuacaccagcaagacgaccguggccucccugaucaacacccucaacgaccugaacgagacccuggucacgaugccgcucggguacgugacccacggccugaaccuggaggaggcggcccgguacaugcgcagccucaaggugcccgccaccgucuccgugagcucccccgacgccgugaccgccuacaacggguaccugacgagcuccagcaagacccccgaggagcacuucaucgagaccaucucccuggcgggcagcuacaaggacuggagcuacuccggccagagcacccagcucgggaucgaguuccugaagcggggcgacaaguccgucuacuacacgagcaacccgaccaccuuccaccuggacggggaggugaucaccuucgacaaccucaagacgcugcugucccuccgcgaggugcggaccaucaaggucuucaccaccguggacaacaucaaccugcacacgcagguggucgacaugagcaugaccuacggccagcaguucggccccaccuaccuggacggggccgacgugaccaagaucaagccccacaacucccacgagggcaagacguucuacgugcucccgaacgacgacacccugcgcgucgaggccuucgaguacuaccacaccaccgaccccagcuuccuggggcgguacauguccgcccucaaccacacgaagaaguggaaguacccccaggugaacggccugaccagcaucaagugggccgacaacaacugcuaccuggcgaccgcccuccugacccugcagcagaucgagcucaaguucaaccccccggcccugcaggacgccuacuaccgcgcgcgggccggggaggccgccaacuucugcgcccugauccucgcguacugcaacaagacggugggcgagcugggcgacguccgcgagaccauguccuaccuguuccagcacgccaaccucgacagcugcaagcgggugcugaacgucgugugcaagaccugcgggcagcagcagaccacccugaagggcguggaggccgucauguacauggggacgcucuccuacgagcaguucaagaagggcgugcagauccccugcaccugcgggaagcaggccaccaaguaccuggugcagcaggagagccccuucgucaugauguccgcccccccggcgcaguacgagcugaagcacggcaccuucacgugcgccagcgaguacaccggcaacuaccagugcgggcacuacaagcacaucaccuccaaggagacccucuacugcaucgacggcgcccugcugacgaagagcagcgaguacaaggggcccaucaccgacguguucuacaaggagaacuccuacaccaccacgaucaagcccgugaccuacaagcucgacggcgucgugugcaccgagaucgaccccaagcuggacaacuacuacaagaaggacaacagcuacuucaccgagcagccgaucgaccuggugcccaaccagcccuaccccaacgccuccuucgacaacuucaaguucgucugcgacaacaucaaguucgccgacgaccucaaccagcugacgggguacaagaagccggcgagccgcgagcugaaggugaccuucuuccccgaccucaacggcgacguggucgccaucgacuacaagcacuacacccccuccuucaagaagggcgccaagcugcugcacaagcccaucguguggcacgugaacaacgccaccaacaaggcgacguacaagccgaacaccuggugcauccggugccucuggagcaccaagcccgucgagaccuccaacagcuucgacgugcugaaguccgaggacgcccaggggauggacaaccuggccugcgaggaccucaagcccgugagcgaggaggucguggagaaccccacgauccagaaggacgugcuggagugcaacgucaagaccaccgagguggugggcgacaucauccugaagccggccaacaacucccucaagaucaccgaggaggucgggcacacggaccugauggccgcguacguggacaacagcucccugaccaucaagaagcccaacgagcucagccgcgugcugggccugaagacccucgccacccacgggcuggccgccgucaacuccgugcccugggacacgaucgccaacuacgcgaagccguuccugaacaagguggucagcaucaccaccaacaucgugacccgcugccucaaccgggugugcacgaacuacaugcccuacuucuucacccugcugcuccagcugugcaccuucacccgcuccaccaacagccggaucaaggccuccaugcccacgaccaucgccaagaacaccgucaagagcgugggcaaguucugccuggaggccagcuucaacuaccucaagucccccaacuucagcaagcugaucaacaucaucaucugguuccugcuccuguccgugugccugggcagccucaucuacuccaccgccgcgcuggggguccugaugagcaaccucggcaugccguccuacugcacgggguaccgcgagggcuaccugaacagcaccaacgugaccaucgccaccuacugcacgggcuccauccccugcagcgugugccuguccgggcucgacagccuggacaccuaccccucccuggagaccauccagaucaccaucagcuccuucaagugggaccucacggccuucggccuggucgccgagugguuccuggccuacauccucuucacccgguucuucuacgugcuggggcuggcggccaucaugcagcucuucuucagcuacuucgccgugcacuucaucuccaacagcuggcugauguggcugaucaucaaccugguccagauggcccccaucuccgcgauggugcgcauguacaucuucuucgccagcuucuacuacguguggaagagcuacguccacgugguggacggcugcaacuccagcaccugcaugaugugcuacaagcggaaccgcgccacccgggucgagugcacgaccaucgugaacgggguccgccgguccuucuacguguacgccaacggcggcaagggguucugcaagcuccacaacuggaacugcgugaacugcgacaccuucugcgccggcagcaccuucaucuccgacgaggucgcgcgcgaccugagccugcaguucaagcggccgaucaaccccacggaccaguccagcuacaucguggacuccgugaccgucaagaacgggagcauccaccucuacuucgacaaggccggccagaagaccuacgagcgccacucccugagccacuucgugaaccuggacaaccuccgggccaacaacaccaaggggucccugcccaucaacgugaucgucuucgacggcaagagcaagugcgaggaguccagcgccaaguccgccagcguguacuacucccagcugaugugccagcccauccuccugcuggaccaggcgcucgugagcgacgucggcgacagcgccgagguggccgugaagauguucgacgccuacgucaacacguucuccagcaccuucaacgugccgauggagaagcugaagacccugguggccaccgcggaggccgagcucgccaagaacgucucccuggacaacgugcugagcacguucaucuccgccgcgcgccagggguucguggacagcgacgucgagaccaaggacgugguggagugccucaagcugucccaccagagcgacaucgaggucaccggcgacuccugcaacaacuacaugcugaccuacaacaagguggagaacaugacgccccgggaccucggggccugcaucgacugcagcgcccgccacaucaacgcccagguggccaagucccacaacaucgcgcugaucuggaacgucaaggacuucaugagccuguccgagcagcuccggaagcagauccgcagcgccgccaagaagaacaaccugcccuucaagcugaccugcgccaccacccgccagguggugaacgucgugacgaccaagaucgcccucaagggcgggugaggacuaguuauaagacugacuagcccgaugggccucccaacgggcccuccuccccuccuugcaccgagauuaauaaaaaaaaaaaaaaaaaaaaaaaaaaaaaaaaaaaaaaaaaaaaaaaaaaaaaaaaaaaaaaaaugcaucccccccccccccccccccccccccccccccaaaggcucuuuucagagccaccagaauu

SEQ ID NO: 21568 - RNA, 6058 nt, Artificial Sequence
  SARS-CoV-2__MT827234.1__non-structural protein 3 (NSP3) mRNA gc
aggagaaagcuuaccauggcccccaccaaggugaccuucggcgacgacacggucaucgaggugcagggguacaagagcgugaacaucaccuucgagcuggacgagcgcaucgacaagguccucaacgagaagugcuccgccuacaccguggagcugggcaccgaggugaacgaguucgcgugcgucguggccgacgccgugaucaagacgcugcagccggucagcgagcuccugaccccccuggggaucgaccucgacgagugguccauggccaccuacuaccuguucgacgagagcggcgaguucaagcuggccucccacauguacugcagcuucuacccccccgacgaggacgaggaggagggggacugcgaggaggaggaguucgagccguccacccaguacgaguacggcacggaggacgacuaccagggcaagccccucgaguucggggcgaccagcgccgcccugcagcccgaggaggagcaggaggaggacuggcuggacgacgacucccagcagaccgugggccagcaggacgggagcgaggacaaccagaccacgaccauccagaccaucguggagguccagccccagcucgagauggagcugaccccgguggugcagacgaucgaggucaacuccuucagcggcuaccugaagcucaccgacaacguguacaucaagaacgccgacaucguggaggaggcgaagaaggucaagcccaccgugguggucaacgccgccaacguguaccugaagcacgggggcggcguggccggggcccugaacaaggcgaccaacaacgccaugcaggucgaguccgacgacuacaucgccacgaacggcccccucaagguggggggcagcugcguccuguccggccacaaccuggccaagcacugccuccacgugguggggcccaacgucaacaagggcgaggacauccagcugcugaagagcgccuacgagaacuucaaccagcacgaggugcuccuggcgccgcugcucuccgccgggaucuucggcgccgaccccaucuacagccugcgggugugcgucgacaccgugcgcaccaacguguaccuggccgucuucgacaagaaccucuacgacaagcugguguccagcuuccuggagaugaagagcgagaagcagguggagcagaagaucgccgagauccccaaggaggaggucaagcccuucaucaccgaguccaagccgagcguggagcagcggaagcaggacgacaagaagaucaaggcgugcguggaggaggucacgaccacccucgaggagaccaaguuccugacggagaaccugcuccuguacaucgacaucaacgggaaccugcaccccgacuccgccacccucgugagcgacaucgacaucaccuuccugaagaaggacgcccccuacaucgugggcgacgucgugcaggagggcgugcugaccgccgucgugauccccacgaagaaggccgggggcaccaccgagaugcucgcgaaggcccugcgcaaggugccgaccgacaacuacaucacgaccuaccccgggcagggccugaacggguacaccgucgaggaggccaagaccgugcucaagaagugcaaguccgccuucuacauccugcccagcaucaucuccaacgagaagcaggagauccugggcaccgugagcuggaaccuccgggagaugcuggcgcacgccgaggagacgcgcaagcugaugcccgucugcguggagaccaaggccaucguguccaccauccagcggaaguacaagggcaucaagauccaggagggggucguggacuacggcgcccgcuucuacuucuacaccagcaagacgaccguggccucccugaucaacacccucaacgaccugaacgagacccuggucacgaugccgcucggguacgugacccacggccugaaccuggaggaggcggcccgguacaugcgcagccucaaggugcccgccaccgucuccgugagcucccccgacgccgugaccgccuacaacggguaccugacgagcuccagcaagacccccgaggagcacuucaucgagaccaucucccuggcgggcagcuacaaggacuggagcuacuccggccagagcacccagcucgggaucgaguuccugaagcggggcgacaaguccgucuacuacacgagcaacccgaccaccuuccaccuggacggggaggugaucaccuucgacaaccucaagacgcugcugucccuccgcgaggugcggaccaucaaggucuucaccaccguggacaacaucaaccugcacacgcagguggucgacaugagcaugaccuacggccagcaguucggccccaccuaccuggacggggccgacgugaccaagaucaagccccacaacucccacgagggcaagacguucuacgugcucccgaacgacgacacccugcgcgucgaggccuucgaguacuaccacaccaccgaccccagcuuccuggggcgguacauguccgcccucaaccacacgaagaaguggaaguacccccaggugaacggccugaccagcaucaagugggccgacaacaacugcuaccuggcgaccgcccuccugacccugcagcagaucgagcucaaguucaaccccccggcccugcaggacgccuacuaccgcgcgcgggccggggaggccgccaacuucugcgcccugauccucgcguacugcaacaagacggugggcgagcugggcgacguccgcgagaccauguccuaccuguuccagcacgccaaccucgacagcugcaagcgggugcugaacgucgugugcaagaccugcgggcagcagcagaccacccugaagggcguggaggccgucauguacauggggacgcucuccuacgagcaguucaagaagggcgugcagauccccugcaccugcgggaagcaggccaccaaguaccuggugcagcaggagagccccuucgucaugauguccgcccccccggcgcaguacgagcugaagcacggcaccuucacgugcgccagcgaguacaccggcaacuaccagugcgggcacuacaagcacaucaccuccaaggagacccucuacugcaucgacggcgcccugcugacgaagagcagcgaguacaaggggcccaucaccgacguguucuacaaggagaacuccuacaccaccacgaucaagcccgugaccuacaagcucgacggcgucgugugcaccgagaucgaccccaagcuggacaacuacuacaagaaggacaacagcuacuucaccgagcagccgaucgaccuggugcccaaccagcccuaccccaacgccuccuucgacaacuucaaguucgucugcgacaacaucaaguucgccgacgaccucaaccagcugacgggguacaagaagccggcgagccgcgagcugaaggugaccuucuuccccgaccucaacggcgacguggucgccaucgacuacaagcacuacacccccuccuucaagaagggcgccaagcugcugcacaagcccaucguguggcacgugaacaacgccaccaacaaggcgacguacaagccgaacaccuggugcauccggugccucuggagcaccaagcccgucgagaccuccaacagcuucgacgugcugaaguccgaggacgcccaggggauggacaaccuggccugcgaggaccucaagcccgugagcgaggaggucguggagaaccccacgauccagaaggacgugcuggagugcaacgucaagaccaccgagguggugggcgacaucauccugaagccggccaacaacucccucaagaucaccgaggaggucgggcacacggaccugauggccgcguacguggacaacagcucccugaccaucaagaagcccaacgagcucagccgcgugcugggccugaagacccucgccacccacgggcuggccgccgucaacuccgugcccugggacacgaucgccaacuacgcgaagccguuccugaacaagguggucagcaccaccaccaacaucgugacgcgcugccucaaccgggugugcaccaacuacaugcccuacuucuucacccugcugcuccagcugugcaccuucacccgcuccacgaacagccggaucaaggccuccaugcccaccaccaucgccaagaacaccgucaagagcgugggcaaguucugccuggaggccagcuucaacuaccucaagucccccaacuucagcaagcugaucaacaucaucaucugguuccugcuccuguccgugugccugggcagccucaucuacuccacggccgcgcuggggguccugaugagcaaccucggcaugccguccuacugcaccggguaccgcgagggcuaccugaacagcaccaacgugaccaucgccacguacugcaccggcuccauccccugcagcgugugccuguccgggcucgacagccuggacaccuaccccucccuggagaccauccagaucacgaucagcuccuucaagugggaccucaccgccuucggccuggucgccgagugguuccuggccuacauccucuucacccgguucuucuacgugcuggggcuggcggccaucaugcagcucuucuucagcuacuucgccgugcacuucaucuccaacagcuggcugauguggcugaucaucaaccugguccagauggcccccaucuccgcgauggugcgcauguacaucuucuucgccagcuucuacuacguguggaagagcuacguccacgugguggacggcugcaacuccagcaccugcaugaugugcuacaagcggaaccgcgccacgcgggucgagugcaccaccaucgugaacgggguccgccgguccuucuacguguacgccaacggcggcaagggguucugcaagcuccacaacuggaacugcgugaacugcgacaccuucugcgccggcagcacguucaucuccgacgaggucgcgcgcgaccugagccugcaguucaagcggccgaucaaccccaccgaccaguccagcuacaucguggacuccgugaccgucaagaacgggagcauccaccucuacuucgacaaggccggccagaagaccuacgagcgccacucccugagccacuucgugaaccuggacaaccuccgggccaacaacacgaaggggucccugcccaucaacgugaucgucuucgacggcaagagcaagugcgaggaguccagcgccaaguccgccagcguguacuacucccagcugaugugccagcccauccuccugcuggaccaggcgcucgugagcgacgucggcgacagcgccgagguggccgugaagauguucgacgccuacgucaacaccuucuccagcaccuucaacgugccgauggagaagcugaagacccugguggccacggcggaggccgagcucgccaagaacgucucccuggacaacgugcugagcaccuucaucuccgccgcgcgccagggguucguggacagcgacgucgagaccaaggacgugguggagugccucaagcugucccaccagagcgacaucgaggucaccggcgacuccugcaacaacuacaugcugacguacaacaagguggagaacaugaccccccgggaccucggggccugcaucgacugcagcgcccgccacaucaacgcccagguggccaagucccacaacaucgcgcugaucuggaacgucaaggacuucaugagccuguccgagcagcuccggaagcagauccgcagcgccgccaagaagaacaaccugcccuucaagcugaccugcgccaccacgcgccagguggugaacgucgugaccaccaagaucgcccucaagggcgggugaggacuaguuauaagacugacuagcccgaugggccucccaacgggcccuccuccccuccuugcaccgagauuaauaaaaaaaaaaaaaaaaaaaaaaaaaaaaaaaaaaaaaaaaaaaaaaaaaaaaaaaaaaaaaaaaugcaucccccccccccccccccccccccccccccccaaaggcucuuuucagagccaccagaauu

SEQ ID NO: 21569 - RNA, 6058 nt, Artificial Sequence
  SARS-CoV-2__MT827253.1__non-structural protein 3 (NSP3) mRNA gc
aggagaaagcuuaccauggcccccaccaaggugaccuucggcgacgacacggucaucgaggugcagggguacaagagcgugaacaucaccuucgagcuggacgagcgcaucgacaagguccucaacgagaagugcuccgccuacaccguggagcugggcaccgaggugaacgaguucgcgugcgucguggccgacgccgugaucaagacgcugcagccggucagcgagcuccugaccccccuggggaucgaccucgacgagugguccauggccaccuacuaccuguucgacgagagcggcgaguucaagcuggccucccacauguacugcagcuucuacccccccgacgaggacgaggaggagggggacugcgaggaggaggaguucgagccguccacccaguacgaguacggcacggaggacgacuaccagggcaagccccucgaguucggggcgaccagcgccgcccugcagcccgaggaggagcaggaggaggacuggcuggacgacgacucccagcagaccgugggccagcaggacgggagcgaggacaaccagaccacgaccauccagaccaucguggagguccagccccagcucgagauggagcugaccccgguggugcagacgaucgaggucaacuccuucagcggcuaccugaagcucaccgacaacguguacaucaagaacgccgacaucguggaggaggcgaagaaggucaagcccaccgugguggucaacgccgccaacguguaccugaagcacgggggcggcguggccggggcccugaacaaggcgaccaacaacgccaugcaggucgaguccgacgacuacaucgccacgaacggcccccucaagguggggggcagcugcguccuguccggccacaaccuggccaagcacugccuccacgugguggggcccaacgucaacaagggcgaggacauccagcugcugaagagcgccuacgagaacuucaaccagcacgaggugcuccuggcgccgcugcucuccgccgggaucuucggcgccgaccccauccacagccugcgggugugcgucgacaccgugcgcaccaacguguaccuggccgucuucgacaagaaccucuacgacaagcugguguccagcuuccuggagaugaagagcgagaagcagguggagcagaagaucgccgagauccccaaggaggaggucaagcccuucaucaccgaguccaagccgagcguggagcagcggaagcaggacgacaagaagaucaaggcgugcguggaggaggucacgaccacccucgaggagaccaaguuccugacggagaaccugcuccuguacaucgacaucaacgggaaccugcaccccgacuccgccacccucgugagcgacaucgacaucaccuuccugaagaaggacgcccccuacaucgugggcgacgucgugcaggagggcgugcugaccgccgucgugauccccacgaagaaggccgggggcaccaccgagaugcucgcgaaggcccugcgcaaggugccgaccgacaacuacaucacgaccuaccccgggcagggccugaacggguacaccgucgaggaggccaagaccgugcucaagaagugcaaguccgccuucuacauccugcccagcaucaucuccaacgagaagcaggagauccugggcaccgugagcuggaaccuccgggagaugcuggcgcacgccgaggagacgcgcaagcugaugcccgucugcguggagaccaaggccaucguguccaccauccagcggaaguacaagggcaucaagauccaggagggggucguggacuacggcgcccgcuucuacuucuacaccagcaagacgaccguggccucccugaucaacacccucaacgaccugaacgagacccuggucacgaugccgcucggguacgugacccacggccugaaccuggaggaggcggcccgguacaugcgcagccucaaggugcccgccaccgucuccgugagcucccccgacgccgugaccgccuacaacggguaccugacgagcuccagcaagacccccgaggagcacuucaucgagaccaucucccuggcgggcagcuacaaggacuggagcuacuccggccagagcacccagcucgggaucgaguuccugaagcggggcgacaaguccgucuacuacacgagcaacccgaccaccuuccaccuggacggggaggugaucaccuucgacaaccucaagacgcugcugucccuccgcgaggugcggaccaucaaggucuucaccaccguggacaacaucaaccugcacacgcagguggucgacaugagcaugaccuacggccagcaguucggccccaccuaccuggacggggccgacgugaccaagaucaagccccacaacucccacgagggcaagacguucuacgugcucccgaacgacgacacccugcgcgucgaggccuucgaguacuaccacaccaccgaccccagcuuccuggggcgguacauguccgcccucaaccacacgaagaaguggaaguacccccaggugaacggccugaccagcaucaagugggccgacaacaacugcuaccuggcgaccgcccuccugacccugcagcagaucgagcucaaguucaaccccccggcccugcaggacgccuacuaccgcgcgcgggccggggaggccgccaacuucugcgcccugauccucgcguacugcaacaagacggugggcgagcugggcgacguccgcgagaccauguccuaccuguuccagcacgccaaccucgacagcugcaagcgggugcugaacgucgugugcaagaccugcgggcagcagcagaccacccugaagggcguggaggccgucauguacauggggacgcucuccuacgagcaguucaagaagggcgugcagauccccugcaccugcgggaagcaggccaccaaguaccuggugcagcaggagagccccuucgucaugauguccgcccccccggcgcaguacgagcugaagcacggcaccuucacgugcgccagcgaguacaccggcaacuaccagugcgggcacuacaagcacaucaccuccaaggagacccucuacugcaucgacggcgcccugcugacgaagagcagcgaguacaaggggcccaucaccgacguguucuacaaggagaacuccuacaccaccacgaucaagcccgugaccuacaagcucgacggcgucgugugcaccgagaucgaccccaagcuggacaacuacuacaagaaggacaacagcuacuucaccgagcagccgaucgaccuggugcccaaccagcccuaccccaacgccuccuucgacaacuucaaguucgucugcgacaacaucaaguucgccgacgaccucaaccagcugacgggguacaagaagccggcgagccgcgagcugaaggugaccuucuuccccgaccucaacggcgacguggucgccaucgacuacaagcacuacacccccuccuucaagaagggcgccaagcugcugcacaagcccaucguguggcacgugaacaacgccaccaacaaggcgacguacaagccgaacaccuggugcauccggugccucuggagcaccaagcccgucgagaccuccaacagcuucgacgugcugaaguccgaggacgcccaggggauggacaaccuggccugcgaggaccucaagcccgugagcgaggaggucguggagaaccccacgauccagaaggacgugcuggagugcaacgucaagaccaccgagguggugggcgacaucauccugaagccggccaacaacucccucaagaucaccgaggaggucgggcacacggaccugauggccgcguacguggacaacagcucccugaccaucaagaagcccaacgagcucagccgcgugcugggccugaagacccucgccacccacgggcuggccgccgucaacuccgugcccugggacacgaucgccaacuacgcgaagccguuccugaacaagguggucagcaccaccaccaacaucgugacgcgcugccucaaccgggugugcaccaacuacaugcccuacuucuucacccugcugcuccagcugugcaccuucacccgcuccacgaacagccggaucaaggccuccaugcccaccaccaucgccaacaacaccgucaagagcgugggcaaguucugccuggaggccagcuucaacuaccucaagucccccaacuucagcaagcugaucaacaucaucaucugguuccugcuccuguccgugugccugggcagccucaucuacuccacggccgcgcuggggguccugaugagcaaccucggcaugccguccuacugcaccggguaccgcgagggcuaccugaacagcaccaacgugaccaucgccacguacugcaccggcuccauccccugcagcgugugccuguccgggcucgacagccuggacaccuaccccucccuggagaccauccagaucacgaucagcuccuucaagugggaccucaccgccuucggccuggucgccgagugguuccuggccuacauccucuucacccgguucuucuacgugcuggggcuggcggccaucaugcagcucuucuucagcuacuucgccgugcacuucaucuccaacagcuggcugauguggcugaucaucaaccugguccagauggcccccaucuccgcgauggugcgcauguacaucuucuucgccagcuucuacuacguguggaagagcuacguccacgugguggacggcugcaacuccagcaccugcaugaugugcuacaagcggaaccgcgccacgcgggucgagugcaccaccaucgugaacgggguccgccgguccuucuacguguacgccaacggcggcaagggguucugcaagcuccacaacuggaacugcgugaacugcgacaccuucugcgccggcagcacguucaucuccgacgaggucgcgcgcgaccugagccugcaguucaagcggccgaucaaccccaccgaccaguccagcuacaucguggacuccgugaccgucaagaacgggagcauccaccucuacuucgacaaggccggccagaagaccuacgagcgccacucccugagccacuucgugaaccuggacaaccuccgggccaacaacacgaaggggucccugcccaucaacgugaucgucuucgacggcaagagcaagugcgaggaguccagcgccaaguccgccagcguguacuacucccagcugaugugccagcccauccuccugcuggaccaggcgcucgugagcgacgucggcgacagcgccgagguggccgugaagauguucgacgccuacgucaacaccuucuccagcaccuucaacgugccgauggagaagcugaagacccugguggccacggcggaggccgagcucgccaagaacgucucccuggacaacgugcugagcaccuucaucuccgccgcgcgccagggguucguggacagcgacgucgagaccaaggacgugguggagugccucaagcugucccaccagagcgacaucgaggucaccggcgacuccugcaacaacuacaugcugacguacaacaagguggagaacaugaccccccgggaccucggggccugcaucgacugcagcgcccgccacaucaacgcccagguggccaagucccacaacaucgcgcugaucuggaacgucaaggacuucaugagccuguccgagcagcuccggaagcagauccgcagcgccgccaagaagaacaaccugcccuucaagcugaccugcgccaccacgcgccagguggugaacgucgugaccaccaagaucgcccucaagggcgggugaggacuaguuauaagacugacuagcccgaugggccucccaacgggcccuccuccccuccuugcaccgagauuaauaaaaaaaaaaaaaaaaaaaaaaaaaaaaaaaaaaaaaaaaaaaaaaaaaaaaaaaaaaaaaaaaugcaucccccccccccccccccccccccccccccccaaaggcucuuuucagagccaccagaauu

SEQ ID NO: 21570 - RNA, 6058 nt, Artificial Sequence
  SARS-CoV-2__MT827840.1__non-structural protein 3 (NSP3) mRNA gc
aggagaaagcuuaccauggcccccaccaaggugaccuucggcgacgacacggucaucgaggugcagggguacaagagcgugaacaucaccuucgagcuggacgagcgcaucgacaagguccucaacgagaagugcuccgccuacaccguggagcugggcaccgaggugaacgaguucgcgugcgucguggccgacgccgugaucaagacgcugcagccggucagcgagcuccugaccccccuggggaucgaccucgacgagugguccauggccaccuacuaccuguucgacgagagcggcgaguucaagcuggccucccacauguacugcagcuucuacccccccgacgaggacgaggaggagggggacugcgaggaggaggaguucgagccguccacccaguacgaguacggcacggaggacgacuaccagggcaagccccucgaguucggggcgaccagcgccgcccugcagcccgaggaggagcaggaggaggacuggcuggacgacgacucccagcagaccgugggccagcaggacgggagcgaggacaaccagaccacgaccauccagaccaucguggagguccagccccagcucgagauggagcugaccccgguggugcagacgaucgaggucaacuccuucagcggcuaccugaagcucaccgacaacguguacaucaagaacgccgacaucguggaggaggcgaagaaggucaagcccaccgugguggucaacgccgccaacguguaccugaagcacgggggcggcguggccggggcccugaacaaggcgaccaacaacgccaugcaggucgaguccgacgacuacaucgccacgaacggcccccucaagguggggggcagcugcguccuguccggccacaaccuggccaagcacugccuccacgugguggggcccaacgucaacaagggcgaggacauccagcugcugaagagcgccuacgagaacuucaaccagcacgaggugcuccuggcgccgcugcucuccgccgggaucuucggcgccgaccccauccacagccugcgggugugcgucgacaccgugcgcaccaacguguaccuggccgucuucgacaagaaccucuacgacaagcugguguccagcuuccuggagaugaagagcgagaagcagguggagcagaagaucgccgagauccccaaggaggaggucaagcccuucaucaccgaguccaagccgagcguggagcagcggaagcaggacgacaagaagaucaaggcgugcguggaggaggucacgaccacccucgaggagaccaaguuccugacggagaaccugcuccuguacaucgacaucaacgggaaccugcaccccgacuccgccacccucgugagcgacaucgacaucaccuuccugaagaaggacgcccccuacaucgugggcgacgucgugcaggagggcgugcugaccgccgucgugauccccacgaagaaggccgggggcaccaccgagaugcucgcgaaggcccugcgcaaggugccgaccgacaacuacaucacgaccuaccccgggcagggccugaacggguacaccgucgaggaggccaagaccgugcucaagaagugcaaguccgccuucuacauccugcccagcaucaucuccaacgagaagcaggagauccugggcaccgugagcuggaaccuccgggagaugcuggcgcacgccgaggagacgcgcaagcugaugcccgucugcguggagaccaaggccaucguguccaccauccagcggaaguacaagggcaucaagauccaggagggggucguggacuacggcgcccgcuucuacuucuacaccagcaagacgaccguggccucccugaucaacacccucaacgaccugaacgagacccuggucacgaugccgcucggguacgugacccacggccugaaccuggaggaggcggcccgguacaugcgcagccucaaggugcccgccaccgucuccgugagcucccccgacgccgugaccgccuacaacggguaccugacgagcuccagcaagacccccgaggagcacuucaucgagaccaucucccuggcgggcagcuacaaggacuggagcuacuccggccagagcacccagcucgggaucgaguuccugaagcggggcgacaaguccgucuacuacacgaacccgaccaccuuccaccuggacggggaggugaucaccuucgacaaccucaagacgcugcugagccuccgcgaggugcggaccaucaaggucuucaccaccguggacaacaucaaccugcacacgcagguggucgacauguccaugaccuacggccagcaguucggccccaccuaccuggacggggccgacgugaccaagaucaagccccacaacagccacgagggcaagacguucuacgugcucccgaacgacgacacccugcgcgucgaggccuucgaguacuaccacaccaccgaccccuccuuccuggggcgguacaugagcgcccucaaccacacgaagaaguggaaguacccccaggugaacggccugaccuccaucaagugggccgacaacaacugcuaccuggcgaccgcccuccugacccugcagcagaucgagcucaaguucaaccccccggcccugcaggacgccuacuaccgcgcgcgggccggggaggccgccaacuucugcgcccugauccucgcguacugcaacaagacggugggcgagcugggcgacguccgcgagaccaugagcuaccuguuccagcacgccaaccucgacuccugcaagcgggugcugaacgucgugugcaagaccugcgggcagcagcagaccacccugaagggcguggaggccgucauguacauggggacgcucagcuacgagcaguucaagaagggcgugcagauccccugcaccugcgggaagcaggccaccaaguaccuggugcagcaggagucccccuucgucaugaugagcgcccccccggcgcaguacgagcugaagcacggcaccuucacgugcgccuccgaguacaccggcaacuaccagugcgggcacuacaagcacaucaccagcaaggagacccucuacugcaucgacggcgcccugcugacgaaguccagcgaguacaaggggcccaucaccgacguguucuacaaggagaacagcuacaccaccacgaucaagcccgugaccuacaagcucgacggcgucgugugcaccgagaucgaccccaagcuggacaacuacuacaagaaggacaacuccuacuucaccgagcagccgaucgaccuggugcccaaccagcccuaccccaacgccagcuucgacaacuucaaguucgucugcgacaacaucaaguucgccgacgaccucaaccagcugacgggguacaagaagccggcgucccgcgagcugaaggugaccuucuuccccgaccucaacggcgacguggucgccaucgacuacaagcacuacacccccagcuucaagaagggcgccaagcugcugcacaagcccaucguguggcacgugaacaacgccaccaacaaggcgacguacaagccgaacaccuggugcauccggugccucugguccaccaagcccgucgagaccagcaacuccuucgacgugcugaagagcgaggacgcccaggggauggacaaccuggccugcgaggaccucaagcccguguccgaggaggucguggagaaccccacgauccagaaggacgugcuggagugcaacgucaagaccaccgagguggugggcgacaucauccugaagccggccaacaacagccucaagaucaccgaggaggucgggcacacggaccugauggccgcguacguggacaacuccagccugaccaucaagaagcccaacgagcucucccgcgugcugggccugaagacccucgccacccacgggcuggccgccgucaacagcgugcccugggacacgaucgccaacuacgcgaagccguuccugaacaagguggucuccaccaccaccaacaucgugacgcgcugccucaaccgggugugcaccaacuacaugcccuacuucuucacccugcugcuccagcugugcaccuucacccgcagcacgaacucccggaucaaggccagcaugcccaccaccaucgccaagaacaccgucaaguccgugggcaaguucugccuggaggccagcuucaacuaccucaagagccccaacuucuccaagcugaucaacaucaucaucugguuccugcuccugagcgugugccugggcucccucaucuacagcacggccgcgcuggggguccugauguccaaccucggcaugccgagcuacugcaccggguaccgcgagggcuaccugaacuccaccaacgugaccaucgccacguacugcaccggcagcauccccugcuccgugugccugagcgggcucgacucccuggacaccuaccccagccuggagaccauccagaucacgaucuccagcuucaagugggaccucaccgccuucggccuggucgccgagugguuccuggccuacauccucuucacccgguucuucuacgugcuggggcuggcggccaucaugcagcucuucuucuccuacuucgccgugcacuucaucagcaacuccuggcugauguggcugaucaucaaccugguccagauggcccccaucagcgcgauggugcgcauguacaucuucuucgccuccuucuacuacguguggaagagcuacguccacgugguggacggcugcaacagcuccaccugcaugaugugcuacaagcggaaccgcgccacgcgggucgagugcaccaccaucgugaacgggguccgccggagcuucuacguguacgccaacggcggcaagggguucugcaagcuccacaacuggaacugcgugaacugcgacaccuucugcgccggcuccacguucaucagcgacgaggucgcgcgcgaccugucccugcaguucaagcggccgaucaaccccaccgaccagagcuccuacaucguggacagcgugaccgucaagaacggguccauccaccucuacuucgacaaggccggccagaagaccuacgagcgccacagccugucccacuucgugaaccuggacaaccuccgggccaacaacacgaaggggagccugcccaucaacgugaucgucuucgacggcaaguccaagugcgaggagagcuccgccaagagcgccuccguguacuacagccagcugaugugccagcccauccuccugcuggaccaggcgcucguguccgacgucggcgacagcgccgagguggccgugaagauguucgacgccuacgucaacaccuucagcuccaccuucaacgugccgauggagaagcugaagacccugguggccacggcggaggccgagcucgccaagaacgucagccuggacaacgugcuguccaccuucaucagcgccgcgcgccagggguucguggacuccgacgucgagaccaaggacgugguggagugccucaagcugagccaccaguccgacaucgaggucaccggcgacagcugcaacaacuacaugcugacguacaacaagguggagaacaugaccccccgggaccucggggccugcaucgacugcuccgcccgccacaucaacgcccagguggccaagagccacaacaucgcgcugaucuggaacgucaaggacuucaugucccugagcgagcagcuccggaagcagauccgcuccgccgccaagaagaacaaccugcccuucaagcugaccugcgccaccacgcgccagguggugaacgucgugaccaccaagaucgcccucaagggcgggaagugaggacuaguuauaagacugacuagcccgaugggccucccaacgggcccuccuccccuccuugcaccgagauuaauaaaaaaaaaaaaaaaaaaaaaaaaaaaaaaaaaaaaaaaaaaaaaaaaaaaaaaaaaaaaaaaaugcaucccccccccccccccccccccccccccccccaaaggcucuuuucagagccaccagaauu

SEQ ID NO: 21571 - RNA, 6058 nt, Artificial Sequence
  SARS-CoV-2__MT825091.1__non-structural protein 3 (NSP3) mRNA gc
aggagaaagcuuaccauggcccccaccaaggugaccuucggcgacgacacggucaucgaggugcagggguacaagagcgugaacaucaccuucgagcuggacgagcgcaucgacaagguccucaacgagaagugcuccgccuacaccguggagcugggcaccgaggugaacgaguucgcgugcgucguggccgacgccgugaucaagacgcugcagccggucagcgagcuccugaccccccuggggaucgaccucgacgagugguccauggccaccuacuaccuguucgacgagagcggcgaguucaagcuggccucccacauguacugcagcuucuacccccccgacgaggacgaggaggagggggacugcgaggaggaggaguucgagccguccacccaguacgaguacggcacggaggacgacuaccagggccagccccucgaguucggggcgaccagcgccgcccugcagcccgaggaggagcaggaggaggacuggcuggacgacgacucccagcagaccgugggccagcaggacgggagcgaggacaaccagaccacgaccauccagaccaucguggagguccagccccagcucgagauggagcugaccccgguggugcagacgaucgaggucaacuccuucagcggcuaccugaagcucaccgacaacguguacaucaagaacgccgacaucguggaggaggcgaagaaggucaagcccaccgugguggucaacgccgccaacguguaccugaagcacgggggcggcguggccggggcccugaacaaggcgaccaacaacgccaugcaggucgaguccgacgacuacaucgccacgaacggcccccucaagguggggggcagcugcguccuguccggccacaaccuggccaagcaccggcuccacgugguggggcccaacgucaacaagggcgaggacauccagcugcugaagagcgccuacgagaacuucaaccagcacgaggugcuccuggcgccgcugcucuccgccgggaucuucggcgccgaccccauccacagccugcgcgugugcgucgacaccgugcggaccaacguguaccuggccgucuucgacaagaaccucuacgacaagcugguguccagcuuccuggagaugaagagcgugaagcaggucgagcagaagaucgccgagauccccaaggaggaggugaagcccuucaucaccgaguccaagccgagcguggagcagcgcaagcaggacgacaagaagaucaaggcgugcgucgaggaggugacgaccacccucgaggagaccaaguuccugacggagaaccugcuccuguacaucgacaucaacgggaaccugcaccccgacuccgccacccucgugagcgacaucgacaucaccuuccugaagaaggacgcccccuacaccgucggcgacguggugcaggagggcguccugacggccguggugauccccaccaagaaggccgggggcaccaccgagaugcucgcgaaggcccugcggaaggucccgacggacaacuacaucaccaccuaccccgggcagggccugaacggguacaccguggaggaggccaagaccgugcucaagaagugcaaguccgccuucuacauccugcccagcaucaucuccaacgagaagcaggagauccugggcacggucagcuggaaccuccccgagaugcuggcgcacgccgaggagacccgcaagcugaugccggugugcguggagaccaaggccaucgucuccaccauccagcggaaguacaagggcaucaagauccaggagggggugguggacuacggcgcccgcuucuacuucuacacgagcaagaccaccgucgccucccugaucaacacccucaacgaccugaacgagacgcuggugaccaugccccucggguacgugacccacggccugaaccuggaggaggcggcccgguacaugcgcagccucaagguccccgccaccguguccgugagcucccccgacgccgucacggccuacaacggguaccugaccuacagcuccaagaccccggaggagcacuucaucgagaccaucagccuggcgggcuccuacaaggacuggagcuacagcggccaguccacgcagcucgggaucgaguuccugaagcggggcgacaagagcguguacuacaccaacaaccccaccaccuuccaccuggacggggaggugaucacguucgacaaccucaagacccugcugucccuccgcgagguccggaccaucaagguguucaccacgguggacaacaucaaccugcacacccaggucguggacaugagcaugaccuacggccagcaguucggccccaccuacuccgacggggccgacgugacgaagaucaagccgcacaacagccacgagggcaagaccuucuacguccugcccaacgacgacacccuccgcguggaggccuucgaguacuaccacaccacggaccccuccuuccuggggcgguacaugagcgcccugaaccacaccaagaaguggaaguacccccaggugaacggccucaccuccaucaagugggccgacaacaacugcuaccuggcgaccgcccugcucacgcugcagcagaucgagcugaaguucaacccgcccgcccuccaggacgccuacuaccgcgcgcgggacggggaggccgccaacuucugcgcccugauccuggccuacugcaacaagaccgucggcgagcucggcgacgugcgcgagaccaugagcuaccuguuccagcacgcgaaccuggacuccugcaagcggguccucaacguggugugcaagaccugcgggcagcagcagaccacgcugaagggcgucgaggccgugauguacauggggacccugagcuacgagcaguucaagaagggcgugcagauccccugcaccugcgggaagcaggccaccaaguaccucguccagcaggagucccccuucgugaugaugagcgccccgcccgcccaguacgagcugaagcacggcacguucaccugcgcguccgaguacaccggcaacuaccagugcgggcacuacaagcacaucaccagcaaggagacgcuguacugcaucgacggcgcccuccugaccaaguccagcgaguacaaggggcccaucaccgacguguucuacaaggagaacagcuacaccacgaccaucaagcccgucaccuacaagcuggacggcguggugugcaccgagaucgacccgaagcucgacaacuacuacaagaaggacaacuccuacuucacggagcagcccaucgaccugguccccaaccagcccuacccgaacgggagcuucgacaacuucaaguucgugugcgacaacaucaaguucgccgacgaccugaaccagcucaccggcuacaagaagcccgccucccgcgagcugaaggugaccuucuuccccgaccugaacggcgacgucguggccaucgacuacaagcacuacacccccagcuucaagaagggggcgaagcuccugcacaagccgaucguguggcacgucaacaacgccacgaacaaggccaccuacaagcccaacaccuggugcauccggugccugugguccaccaagcccguggagacgagcaacuccuucgacgugcucaagagcgaggacgcccagggcauggacaaccuggcgugcgaggaccugaagcccgucuccgaggaggugguggagaacccgaccauccagaaggacguccucgagugcaacgugaagaccaccgagguggucggggacaucauccugaagcccgccaacaacagccugaagaucacggaggaggugggccacaccgaccucauggacgccuacguggacaacuccagccugaccaucaagaagcccaacgagcugucccgcguccucgggcugaagacccuggccacgcacggccucgccgcggugaacagcgugccgugggacaccaucgccaacuacgccaagcccuuccugaacaaggucguguccaccaccacgaacaucgugacccugugccucaaccuggucugcaccaacuacaugcccuacuucuucacccugcuccugcagcugugcaccuucacgcgcagcaccaacucccggaucaaggccagcaugcccaccaccaucgccaagaacacggugaaguccguggacaaguucugccucgaggcgagcuucaacuaccugaagagcccgaacuucuccaagcugaucaacaucaucaucugguuccuccugcugagcgucugccucggcucccugaucuacagcaccgccgcccugggggugcucauguccaaccugggcaugcccagcuacugcaccggguaccgcgagggcuaccugaacuccaccaacgugacgaucgccaccuacugcaccggcagcauccccugcuccgucugccucagcgggcuggacucccuggacaucuaccccagccucgagaccauccagaucacgaucuccagcuucaagugggaccugaccgccuucggccugguggcggagugguuccucgccuacauccuguucacccgguucuucuacgugcacgggcuggccgccaucaugcagcucuucuucuccuacuucgccguccacuucaucagcaacuccuggcugauguggcugaucaucaaccuggugcagauggcgccgaucagcgccauggugcgcauguacaucuucuucgccuccuucuacuacgucuggaagagcuacgugcacguggucgacggcugcaacagcuccaccugcaugaugugcuaccggcgcaaccgggccacgcgcguggagugcaccaccaucgucaacggggugcggcgcagcuucuacguguacgcgaacggcggcaagggguucugcaagcuccacaacuggaacugcgucaacugcgacaccuucugcgccggcuccacguucaucagcgacgagguggcccgggaccugucccugcaguucaagcgccccaucaaccccaccgaccagagcuccuacaucgacgacagcgugaccgucaagaacggguccauccaccucuacuucgacaaggccggccagaagaccuacgagcggcacagccugucccacuucgugaaccuggacaaccuccgcgccaacaacacgcgggggagccugcccaucaacgugaucgucuucgacggcaaguccaagugcgaggagagcuccgcgaagagcgccuccguguacuacagccagcugaugugccagccgauccuccugcuggaccaggcccucguguccgacgucggcgacagcgccgagguggccgugaagauguucgacgcguacgucagcaccuucuccagcaccuucaacgugcccauggagaagcugaagacccugguggccacggccgaggccgagcucgccaagaacgucucccuggacaacgugcugagcaccuucaucuccgcggcccgccagggguucguggacagcgacgucgagaccaaggacgugguggagugccuccggcugucccaccagagcgacaucgaggucaccggcgacuccugcaacaacuacaugcugacguacaacaagguggagaacaccaccccccgcgaccucggggccugcaucgacugcagcgcccggcacaucaacgcgcagguggccaagucccacaacaucgcccugaucuggaacgucaaggacuucaugagccuguccgagcagcuccgcaagcagauccgcagcgccgccaagaagaacaaccugcccuucaagcugaccugcgcgacgacccggcagguggugaacgucgugaccaccaagaucgcccucaaggugggcugaggacuaguuauaagacugacuagcccgaugggccucccaacgggcccuccuccccuccuugcaccgagauuaauaaaaaaaaaaaaaaaaaaaaaaaaaaaaaaaaaaaaaaaaaaaaaaaaaaaaaaaaaaaaaaaaugcaucccccccccccccccccccccccccccccccaaaggcucuuuucagagccaccagaauu

SEQ ID NO: 21572 - RNA, 6058 nt, Artificial Sequence
  SARS-CoV-2__MT821531.1__non-structural protein 3 (NSP3) mRNA gc
aggagaaagcuuaccauggcccccaccaaggugaccuucggcgacgacacggucaucgaggugcagggguacaagagcgugaacaucaccuucgagcuggacgagcgcaucgacaagguccucaacgagaagugcuccgccuacaccguggagcugggcaccgaggugaacgaguucgcgugcgucguggccgacgccgugaucaagacgcugcagccggucagcgagcuccugaccccccuggggaucgaccucgacgagugguccauggccaccuacuaccuguucgacgagagcggcgaguucaagcuggccucccacauguacugcagcuucuacccccccgacgaggacgaggaggagggggacugcgaggaggaggaguucgagccguccacccaguacgaguacggcacggaggacgacuaccagggcaagccccucgaguucggggcgaccagcgccgcccugcagcccgaggaggagcaggaggaggacuggcuggacgacgacucccagcagaccgugggccagcaggacgggagcgaggacaaccagaccacgaccauccagaccaucguggagguccagccccagcucgagauggagcugaccccgguggugcagacgaucgaggucaacuccuucagcggcuaccugaagcucaccgacaacguguacaucaagaacgccgacaucguggaggaggcgaagaaggucaagcccaccgugguggucaacgccgccaacguguaccugaagcacgggggcggcguggccggggcccugaacaaggcgaccaacaacgccaugcaggucgaguccgacgacuacaucgccacgaacggcccccucaagguggggggcagcugcguccuguccggccacaaccuggccaagcacugccuccacgugguggggcccaacgucaacaagggcgaggacauccagcugcugaagagcgccuacgagaacuucaaccagcacgaggugcuccuggcgccgcugcucuccgccgggaucuucggcgccgaccccauccacagccugcgggugugcgucgacaccgugcgcaccaacguguaccuggccgucuucgacaagaaccucuacgacaagcugguguccagcuuccuggagaugaagagcgagaagcagguggagcagaagaucgccgagauccccaaggaggaggucaagcccuucaucaccgaguccaagccgagcguggagcagcggaagcaggacgacaagaagaucaaggcgugcguggaggaggucacgaccacccucgaggagaccaaguuccugacggagaaccugcuccuguacaucgacaucaacgggaaccugcaccccgacuccgccacccucgugagcgacaucgacaucaccuuccugaagaaggacgcccccuacaucgugggcgacgucgugcaggagggcgugcugaccgccgucgugauccccacgaagaaggccgggggcaccaccgagaugcucgcgaaggcccugcgcaaggugccgaccgacaacuacaucacgaccuaccccgggcagggccugaacggguacaccgucgaggaggccaagaccgugcucaagaagugcaaguccgccuucuacauccugcccagcaucaucuccaacgagaagcaggagauccugggcaccgugagcuggaaccuccgggagaugcuggcgcacgccgaggagacgcgcaagcugaugcccgucugcguggagaccaaggccaucguguccaccauccagcggaaguacaagggcaucaagauccaggagggggucguggacuacggcgugcgcuucuacuucuacaccagcaagacgaccgucgccucccugaucaacacccucaacgaccugaacgagacccuggugacgaugccgcucggguacgugacccacggccugaaccuggaggaggccgcgcgguacaugcgcagccucaagguccccgccaccguguccgugagcucccccgacgccgucaccgccuacaacggguaccugacgagcuccagcaagacccccgaggagcacuucaucgagaccaucucccuggccggcagcuacaaggacuggagcuacuccggccagagcacccagcucgggaucgaguuccugaagcggggcgacaaguccguguacuacacgagcaacccgaccaccuuccaccuggacggggaggugaucaccuucgacaaccucaagacgcugcugucccuccgcgagguccggaccaucaagguguucaccaccguggacaacaucaaccugcacacgcaggucguggacaugagcaugaccuacggccagcaguucggccccaccuaccuggacggggcggacgugaccaagaucaagccccacaacucccacgagggcaagacguucuacguccucccgaacgacgacacccugcgcguggaggccuucgaguacuaccacaccaccgaccccagcuuccuggggcgguacauguccgcccucaaccacacgaagaaguggaaguacccccaggugaacggccugaccagcaucaagugggccgacaacaacugcuaccuggccaccgcgcuccugacccugcagcagaucgagcucaaguucaaccccccggcccugcaggacgccuacuaccgcgcccgggcgggggaggccgccaacuucugcgcccugauccucgccuacugcaacaagacggucggcgagcugggcgacgugcgcgagaccauguccuaccuguuccagcacgcgaaccucgacagcugcaagcggguccugaacguggugugcaagaccugcgggcagcugcagaccacccucaagggcgucgaggccgugauguacauggggacgcuguccuacgagcaguucaagaagggcgugcagauccccugcaccugcgggaagcaggccaccaaguaccugguccagcaggagagccccuucgugaugauguccgcccccccggcccaguacgagcucaagcacggcaccuucacgugcgcgagcgaguacaccggcaacuaccagugcgggcacuacaagcacaucaccuccaaggagacccuguacugcaucgacggcgcccugcucacgaagagcagcgaguacaaggggcccaucaccgacguguucuacaaggagaacuccuacaccaccacgaucaagcccgucaccuacaagcuggacggcguggugugcaccgagaucgaccccaagcuggacaacuacuacaagaaggacaacagcuacuucaccgagcagccgaucgaccucguccccaaccagcccuaccccaacgccuccuucgacaacuucaaguucgugugcgacaacaucaaguucgccgacgaccugaaccagcugacgggguacaagaagccggccagccgcgagcucaaggugaccuucuuccccgaccugaacggcgacgucguggcgaucgacuacaagcacuacacccccuccuucaagaagggcgccaagcugcuccacaagcccaucguguggcacgucaacaacgccaccaacaaggccacguacaagccgaacaccuggugcauccggugccuguggagcaccaagcccguggagaccuccaacagcuucgacgugcugaaguccgaggacgcgcaggggauggacaaccucgccugcgaggaccugaagcccgucagcgaggaggugguggagaaccccacgauccagaaggacguccuggagugcaacgugaagaccaccgagguggucggcgacaucauccucaagccggccaacaacucccugaagaucaccgaggagguggggcacacggaccugauggccgccuacguggacaacagcucccucaccaucaagaagcccaacgagcugagccgcguccugggccucaagacccuggcgacccacgggcuggccgccgugaacuccgugcccugggacacgaucgccaacuacgccaagccguuccucaacaaggucgugagcaccaccaccaacaucgugacgcgcugccugaaccgggucugcaccaacuacaugcccuacuucuucacccugcuccugcagcugugcaccuucacccgcuccacgaacagccggaucaaggcguccaugcccaccaccaucgccaagaacaccgugaagagcgugggcaaguucugccucgaggccagcuucaacuaccugaagucccccaacuucagcaagcugaucaacaucaucaucugguuccuccugcuguccgucugccucggcagccugaucuacuccacggccgcccugggggugcucaugagcaaccugggcaugccguccuacugcaccggguaccgcgagggcuaccugaacagcaccaacgugaccaucgcgacguacugcaccggcuccauccccugcagcgucugccucuccgggcuggacagccuggacaccuaccccucccucgagaccauccagaucacgaucagcuccuucaagugggaccugaccgccuucggccugguggccgagugguuccucgccuacauccuguucacccgguucuucuacgugcuggggcucgccgcgaucaugcagcuguucuucagcuacuucgccguccacuucaucuccaacagcuggcugauguggcugaucaucaaccucgugcagauggcccccaucuccgccauggugcgcauguacaucuucuucgcgagcuucuacuacgucuggaagagcuacgugcacguggucgacggcugcaacuccagcaccugcaugaugugcuacaagcggaaccgcgccacgcggguggagugcaccaccaucgucaacggggugcgccgguccuucuacguguacgccaacggcggcaagggguucugcaagcugcacaacuggaacugcgucaacugcgacaccuucugcgccggcagcacguucaucuccgacgagguggcccgcgaccugagccuccaguucaagcggccgaucaaccccaccgaccaguccagcuacaucguggacuccgucaccgugaagaacgggagcauccaccuguacuucgacaaggcgggccagaagaccuacgagcgccacucccugagccacuucgugaaccucgacaaccugcgggccaacaacacgaaggggucccugcccaucaacgucaucguguucgacggcaagagcaagugcgaggaguccagcgccaaguccgccagcguguacuacucccagcucaugugccagcccauccugcugcucgaccaggcccuggucagcgacgugggcgacagcgcggagguggccgucaagauguucgacgccuacgugaacaccuucuccagcaccuucaacgugccgauggagaagcugaagacccucgucgccacggccgaggcggagcuggccaagaacgugucccuggacaacgugcucagcaccuucaucuccgccgcccgccagggguucgucgacagcgacguggagaccaaggacguggucgagugccugaagcugucccaccagagcgacaucgaggugaccggcgacuccugcaacaacuacaugcucacguacaacaagguggagaacaugaccccccgggaccugggggcgugcaucgacugcagcgcccgccacaucaacgcccaggucgccaagucccacaacaucgcccugaucuggaacgugaaggacuucaugagccucuccgagcagcugcggaagcagauccgcagcgcggccaagaagaacaaccugcccuucaagcucaccugcgccaccacgcgccagguggucaacguggugaccaccaagaucgcccugaagggcgggugaggacuaguuauaagacugacuagcccgaugggccucccaacgggcccuccuccccuccuugcaccgagauuaauaaaaaaaaaaaaaaaaaaaaaaaaaaaaaaaaaaaaaaaaaaaaaaaaaaaaaaaaaaaaaaaaugcaucccccccccccccccccccccccccccccccaaaggcucuuuucagagccaccagaauu

SEQ ID NO: 21573 - RNA, 6058 nt, Artificial Sequence
  SARS-CoV-2__MT821535.1__non-structural protein 3 (NSP3) mRNA gc
aggagaaagcuuaccauggcccccaccaaggugaccuucggcgacgacacggucaucgaggugcagggguacaagagcgugaacaucaccuucgagcuggacgagcgcaucgacaagguccucaacgagaagugcuccgccuacaccguggagcugggcaccgaggugaacgaguucgcgugcgucguggccgacgccgugaucaagacgcugcagccggucagcgagcuccugaccccccuggggaucgaccucgacgagugguccauggccaccuacuaccuguucgacgagagcggcgaguucaagcuggccucccacauguacugcagcuucuacccccccgacgaggacgaggaggagggggacugcgaggaggaggaguucgagccguccacccaguacgaguacggcacggaggacgacuaccagggcaagccccucgaguucggggcgaccagcgccgcccugcagcccgaggaggagcaggaggaggacuggcuggacgacgacucccagcagaccgugggccagcaggacgggagcgaggacaaccagaccacgaccauccagaccaucguggagguccagccccagcucgagauggagcugaccccgguggugcagacgaucgaggucaacuccuucagcggcuaccugaagcucaccgacaacguguacaucaagaacgccgacaucguggaggaggcgaagaaggucaagcccaccgugguggucaacgccgccaacguguaccugaagcacgggggcggcguggccggggcccugaacaaggcgaccaacaacgccaugcaggucgaguccgacgacuacaucgccacgaacggcccccucaagguggggggcagcugcguccuguccggccacaaccuggccaagcacugccuccacgugguggggcccaacgucaacaagggcgaggacauccagcugcugaagagcgccuacgagaacuucaaccagcacgaggugcuccuggcgccgcugcucuccgccgggaucuucggcgccgaccccauccacagccugcgggugugcgucgacaccgugcgcaccaacguguaccuggccgucuucgacaagaaccucuacgacaagcugguguccagcuuccuggagaugaagagcgagaagcagguggagcagaagaucgccgagauccccaaggaggaggucaagcccuucaucaccgaguccaagccgagcguggagcagcggaagcaggacgacaagaagaucaaggcgugcguggaggaggucacgaccacccucgaggagaccaaguuccugacggagaaccugcuccuguacaucgacaucaacgggaaccugcaccccgacuccgccacccucgugagcgacaucgacaucaccuuccugaagaaggacgcccccuacaucgugggcgacgucgugcaggagggcgugcugaccgccgucgugauccccacgaagaaggccgggggcaccaccgagaugcucgcgaaggcccugcgcaaggugccgaccgacaacuacaucacgaccuaccccgggcagggccugaacggguacaccgucgaggaggccaagaccgugcucaagaagugcaaguccgccuucuacauccugcccagcaucaucuccaacgagaagcaggagauccugggcaccgugagcuggaaccuccgggagaugcuggcgcacgccgaggagacgcgcaagcugaugcccgucugcguggagaccaaggccaucguguccaccauccagcggaaguacaagggcaucaagauccaggagggggucguggacuacggcgcccgcuucuacuucuacaccagcaagacgaccguggccucccugaucaacacccucaacgaccugaacgagacccuggucacgaugccgcucggguacgugacccacggccugaaccuggaggaggcggcccgguacaugcgcagccucaaggugcccgccaccgucuccgugagcucccccgacgccgugaccgccuacaacggguaccugacgagcuccagcaagacccccgaggagcacuucaucgagaccaucucccuggcgggcagcuacaaggacuggagcuacuccggccagagcacccagcucgggaucgaguuccugaagcggggcgacaaguccgucuacuacacgagcaacccgaccaccuuccaccuggacggggaggugaucaccuucgacaaccucaagacgcugcugucccuccgcgaggugcggaccaucaaggucuucaccaccguggacaacaucaaccugcacacgcagguggucgacaugagcaugaccuacggccagcaguucggccccaccuaccuggacggggccgacgugaccaagaucaagccccacaacucccacgagggcaagacguucuacgugcucccgaacgacgacacccugcgcgucgaggccuucgaguacuaccacaccaccgaccccagcuuccuggggcgguacauguccgcccucaaccacacgaagaaguggaaguacccccaggugaacggccugaccagcaucaagugggccgacaacaacugcuaccuggcgaccgcccuccugacccugcagcagaucgagcucaaguucaaccccccggcccugcaggacgccuacuaccgcgcgcgggccggggaggccgccaacuucugcgcccugauccucgcguacugcaacaagacggugggcgagcugggcgacguccgcgagaccauguccuaccuguuccagcacgccaaccucgacagcugcaagcgggugcugaacgucgugugcaagaccugcgggcagcugcagaccacccucaagggcguggaggccgucauguacauggggacgcuguccuacgagcaguucaagaagggcgugcagauccccugcaccugcgggaagcaggccaccaaguaccuggugcagcaggagagccccuucgucaugauguccgcccccccggcgcaguacgagcucaagcacggcaccuucacgugcgccagcgaguacaccggcaacuaccagugcgggcacuacaagcacaucaccuccaaggagacccuguacugcaucgacggcgcccugcucacgaagagcagcgaguacaaggggcccaucaccgacguguucuacaaggagaacuccuacaccaccacgaucaagcccgugaccuacaagcuggacggcgucgugugcaccgagaucgaccccaagcuggacaacuacuacaagaaggacaacagcuacuucaccgagcagccgaucgaccucgugcccaaccagcccuaccccaacgccuccuucgacaacuucaaguucgucugcgacaacaucaaguucgccgacgaccugaaccagcugacgggguacaagaagccggcgagccgcgagcucaaggugaccuucuuccccgaccugaacggcgacguggucgccaucgacuacaagcacuacacccccuccuucaagaagggcgccaagcugcuccacaagcccaucguguggcacgugaacaacgccaccaacaaggcgacguacaagccgaacaccuggugcauccggugccuguggagcaccaagcccgucgagaccuccaacagcuucgacgugcugaaguccgaggacgcccaggggauggacaaccucgccugcgaggaccugaagcccgugagcgaggaggucguggagaaccccacgauccagaaggacgugcuggagugcaacgucaagaccaccgagguggugggcgacaucauccucaagccggccaacaacucccugaagaucaccgaggaggucgggcacacggaccugauggccgcguacguggacaacagcucccucaccaucaagaagcccaacgagcugagccgcgugcugggccucaagacccuggccacccacgggcuggccgccgucaacuccgugcccugggacacgaucgccaacuacgcgaagccguuccucaacaagguggucagcaccaccaccaacaucgugacgcgcugccugaaccgggugugcaccaacuacaugcccuacuucuucacccugcuccugcagcugugcaccuucacccgcuccacgaacagccggaucaaggccuccaugcccaccaccaucgccaagaacaccgucaagagcgugggcaaguucugccucgaggccagcuucaacuaccugaagucccccaacuucagcaagcugaucaacaucaucaucugguuccuccugcuguccgugugccucggcagccugaucuacuccacggccgcgcuggggguccucaugagcaaccugggcaugccguccuacugcaccggguaccgcgagggcuaccugaacagcaccaacgugaccaucgccacguacugcaccggcuccauccccugcagcgugugccucuccgggcuggacagccuggacaccuaccccucccucgagaccauccagaucacgaucagcuccuucaagugggaccugaccgccuucggccuggucgccgagugguuccucgccuacauccuguucacccgguucuucuacgugcuggggcucgcggccaucaugcagcuguucuucagcuacuucgccgugcacuucaucuccaacagcuggcugauguggcugaucaucaaccucguccagauggcccccaucuccgcgauggugcgcauguacaucuucuucgccagcuucuacuacguguggaagagcuacguccacgugguggacggcugcaacuccagcaccugcaugaugugcuacaagcggaaccgcgccacgcgggucgagugcaccaccaucgugaacgggguccgccgguccuucuacguguacgccaacggcggcaagggguucugcaagcugcacaacuggaacugcgugaacugcgacaccuucugcgccggcagcacguucaucuccgacgaggucgcgcgcgaccugagccuccaguucaagcggccgaucaaccccaccgaccaguccagcuacaucguggacuccgugaccgucaagaacgggagcauccaccuguacuucgacaaggccggccagaagaccuacgagcgccacucccugagccacuucgugaaccucgacaaccugcgggccaacaacacgaaggggucccugcccaucaacgugaucgucuucgacggcaagagcaagugcgaggaguccagcgccaaguccgccagcguguacuacucccagcucaugugccagcccauccugcugcucgaccaggcgcuggugagcgacgucggcgacagcgccgagguggccgugaagauguucgacgccuacgucaacaccuucuccagcaccuucaacgugccgauggagaagcugaagacccucguggccacggcggaggccgagcuggccaagaacgucucccuggacaacgugcucagcaccuucaucuccgccgcgcgccagggguucguggacagcgacgucgagaccaaggacgugguggagugccugaagcugucccaccagagcgacaucgaggucaccggcgacuccugcaacaacuacaugcucacguacaacaagguggagaacaugaccccccgggaccugggggccugcaucgacugcagcgcccgccacaucaacgcccagguggccaagucccacaacaucgcgcugaucuggaacgucaaggacuucaugagccucuccgagcagcugcggaagcagauccgcagcgccgccaagaagaacaaccugcccuucaagcucaccugcgccaccacgcgccagguggugaacgucgugaccaccaagaucgcccugaagggcgggugaggacuaguuauaagacugacuagcccgaugggccucccaacgggcccuccuccccuccuugcaccgagauuaauaaaaaaaaaaaaaaaaaaaaaaaaaaaaaaaaaaaaaaaaaaaaaaaaaaaaaaaaaaaaaaaaugcaucccccccccccccccccccccccccccccccaaaggcucuuuucagagccaccagaauu

SEQ ID NO: 21574 - RNA, 6058 nt, Artificial Sequence
  SARS-CoV-2__MT821537.1__non-structural protein 3 (NSP3) mRNA gc
aggagaaagcuuaccauggcccccaccaaggugaccuucggcgacgacacggucaucgaggugcagggguacaagagcgugaacaucaccuucgagcuggacgagcgcaucgacaagguccucaacgagaagugcuccgccuacaccguggagcugggcaccgaggugaacgaguucgcgugcgucguggccgacgccgugaucaagacgcugcagccggucagcgagcuccugaccccccuggggaucgaccucgacgagugguccauggccaccuacuaccuguucgacgagagcggcgaguucaagcuggccucccacauguacugcagcuucuacccccccgacgaggacgaggaggagggggacugcgaggaggaggaguucgagccguccacccaguacgaguacggcacggaggacgacuaccagggcaagccccucgaguucggggcgaccagcgccgcccugcagcccgaggaggagcaggaggaggacuggcuggacgacgacucccagcagaccgugggccagcaggacgggagcgaggacaaccagaccacgaccauccagaccaucguggagguccagccccagcucgagauggagcugaccccgguggugcagacgaucgaggucaacuccuucagcggcuaccugaagcucaccgacaacguguacaucaagaacgccgacaucguggaggaggcgaagaaggucaagcccaccgugguggucaacgccgccaacguguaccugaagcacgggggcggcguggccggggcccugaacaaggcgaccaacaacgccaugcaggucgaguccgacgacuacaucgccacgaacggcccccucaagguggggggcagcugcguccuguccggccacaaccuggccaagcacugccuccacgugguggggcccaacgucaacaagggcgaggacauccagcugcugaagagcgccuacgagaacuucaaccagcacgaggugcuccuggcgccgcugcucuccgccgggaucuucggcgccgaccccauccacagccugcgggugugcgucgacaccgugcgcaccaacguguaccuggccgucuucgacaagaaccucuacgacaagcugguguccagcuuccuggagaugaagagcgagaagcagguggagcagaagaucgccgagauccccaaggaggaggucaagcccuucaucaccgaguccaagccgagcguggagcagcggaagcaggacgacaagaagaucaaggcgugcguggaggaggucacgaccacccucgaggagaccaaguuccugacggagaaccugcuccuguacaucgacaucaacgggaaccugcaccccgacuccgccacccucgugagcgacaucgacaucaccuuccugaagaaggacgcccccuacaucgugggcgacgucgugcaggagggcgugcugaccgccgucgugauccccacgaagaaggccgggggcaccaccgagaugcucgcgaaggcccugcgcaaggugccgaccgacaacuacaucacgaccuaccccgggcagggccugaacggguacaccgucgaggaggccaagaccgugcucaagaagugcaaguccgccuucuacauccugcccagcaucaucuccaacgagaagcaggagauccugggcaccgugagcuggaaccuccgggagaugcuggcgcacgccgaggagacgcgcaagcugaugcccgucugcguggagaccaaggccaucguguccaccauccagcggaaguacaagggcaucaagauccaggagggggucguggacuacggcgcccgcuucuacuucuacaccagcaagacgaccguggccucccugaucaacacccucaacgaccugaacgagacccuggucacgaugccgcucggguacgugacccacggccugaaccuggaggaggcggcccgguacaugcgcagccucaaggugcccgccaccgucuccgugagcucccccgacgccgugaccgccuacaacggguaccugacgagcuccagcaagacccccgaggagcacuucaucgagaccaucucccuggcgggcagcuacaaggacuggagcuacuccggccagagcacccagcucgggaucgaguuccugaagcggggcgacaaguccgucuacuacacgagcaacccgaccaccuuccaccuggacggggaggugaucaccuucgacaaccucaagacgcugcugucccuccgcgaggugcggaccaucaaggucuucaccaccguggacaacaucaaccugcacacgcagguggucgacaugagcaugaccuacggccagcaguucggccccaccuaccuggacggggccgacgugaccaagaucaagccccacaacucccacgagggcaagacguucuacgugcucccgaacgacgacacccugcgcgucgaggccuucgaguacuaccacaccaccgaccccagcuuccuggggcgguacauguccgcccucaaccacacgaagaaguggaaguacccccaggugaacggccugaccagcaucaagugggccgacaacaacugcuaccuggcgaccgcccuccugacccugcagcagaucgagcucaaguucaaccccccggcccugcaggacgccuacuaccgcgcgcgggccggggaggccgccaacuucugcgcccugauccucgcguacugcaacaagacggugggcgagcugggcgacguccgcgagaccauguccuaccuguuccagcacgccaaccucgacagcugcaagcgggugcugaacgucgugugcaagaccugcgggcagcagcagaccacccugaagggcguggaggccgucauguacauggggacgcucuccuacgagcaguucaagaagggcgugcagauccccugcaccugcgggaagcaggccaccaaguaccuggugcagcaggagagccccuucgucaugauguccgcccccccggcgcaguacgagcugaagcacggcaccuucacgugcgccagcgaguacaccggcaacuaccagugcgggcacuacaagcacaucaccuccaaggagacccucuacugcaucgacggcgugcugcugacgaagagcagcgaguacaaggggcccaucaccgacguguucuacaaggagaacuccuacaccaccacgaucaagcccgucaccuacaagcucgacggcguggugugcaccgagaucgaccccaagcuggacaacuacuacaagaaggacaacagcuacuucaccgagcagccgaucgaccugguccccaaccagcccuaccccaacgccuccuucgacaacuucaaguucgugugcgacaacaucaaguucgccgacgaccucaaccagcugacgggguacaagaagccggccagccgcgagcugaaggugaccuucuuccccgaccucaacggcgacgucguggcgaucgacuacaagcacuacacccccuccuucaagaagggcgccaagcugcugcacaagcccaucguguggcacgucaacaacgccaccaacaaggccacguacaagccgaacaccuggugcauccggugccucuggagcaccaagcccguggagaccuccaacagcuucgacgugcugaaguccgaggacgcgcaggggauggacaaccuggccugcgaggaccucaagcccgucagcgaggaggugguggagaaccccacgauccagaaggacguccuggagugcaacgugaagaccaccgagguggucggcgacaucauccugaagccggccaacaacucccucaagaucaccgaggagguggggcacacggaccugauggccgccuacguggacaacagcucccugaccaucaagaagcccaacgagcucagccgcguccugggccugaagacccucgcgacccacgggcuggccgccgugaacuccgugcccugggacacgaucgccaacuacgccaagccguuccugaacaaggucgugagcaccaccaccaacaucgugacgcgcugccucaaccgggucugcaccaacuacaugcccuacuucuucacccugcugcuccagcugugcaccuucacccgcuccacgaacagccggaucaaggcguccaugcccaccaccaucgccaagaacaccgugaagagcgugggcaaguucugccuggaggccagcuucaacuaccucaagucccccaacuucagcaagcugaucaacaucaucaucugguuccugcuccuguccgucugccugggcagccucaucuacuccacggccgcccugggggugcugaugagcaaccucggcaugccguccuacugcaccggguaccgcgagggcuaccugaacagcaccaacgugaccaucgcgacguacugcaccggcuccauccccugcagcgucugccuguccgggcucgacagccuggacaccuaccccucccuggagaccauccagaucacgaucagcuccuucaagugggaccucaccgccuucggccugguggccgagugguuccuggccuacauccucuucacccgguucuucuacgugcuggggcuggccgcgaucaugcagcucuucuucagcuacuucgccguccacuucaucuccaacagcuggcugauguggcugaucaucaaccuggugcagauggcccccaucuccgccauggugcgcauguacaucuucuucgcgagcuucuacuacgucuggaagagcuacgugcacguggucgacggcugcaacuccagcaccugcaugaugugcuacaagcggaaccgcgccacgcggguggagugcaccaccaucgucaacggggugcgccgguccuucuacguguacgccaacggcggcaagggguucugcaagcuccacaacuggaacugcgucaacugcgacaccuucugcgccggcagcacguucaucuccgacgagguggcccgcgaccugagccugcaguucaagcggccgaucaaccccaccgaccaguccagcuacaucguggacuccgucaccgugaagaacgggagcauccaccucuacuucgacaaggcgggccagaagaccuacgagcgccacucccugagccacuucgugaaccuggacaaccuccgggccaacaacacgaaggggucccugcccaucaacgucaucguguucgacggcaagagcaagugcgaggaguccagcgccaaguccgccagcguguacuacucccagcugaugugccagcccauccuccugcuggaccaggcccucgucagcgacgugggcgacagcgcggagguggccgucaagauguucgacgccuacgugaacaccuucuccagcaccuucaacgugccgauggagaagcugaagacccuggucgccacggccgaggcggagcucgccaagaacgugucccuggacaacgugcugagcaccuucaucuccgccgcccgccagggguucgucgacagcgacguggagaccaaggacguggucgagugccucaagcugucccaccagagcgacaucgaggugaccggcgacuccugcaacaacuacaugcugacguacaacaagguggagaacaugaccccccgggaccucggggcgugcaucgacugcagcgcccgccacaucaacgcccaggucgccaagucccacaacaucgcccugaucuggaacgugaaggacuucaugagccuguccgagcagcuccggaagcagauccgcagcgcggccaagaagaacaaccugcccuucaagcugaccugcgccaccacgcgccagguggucaacguggugaccaccaagaucgcccucaagggcgggugaggacuaguuauaagacugacuagcccgaugggccucccaacgggcccuccuccccuccuugcaccgagauuaauaaaaaaaaaaaaaaaaaaaaaaaaaaaaaaaaaaaaaaaaaaaaaaaaaaaaaaaaaaaaaaaaugcaucccccccccccccccccccccccccccccccaaaggcucuuuucagagccaccagaauu

SEQ ID NO: 21575 - RNA, 6058 nt, Artificial Sequence
  SARS-CoV-2__MT821555.1__non-structural protein 3 (NSP3) mRNA gc
aggagaaagcuuaccauggcccccaccaaggugaccuucggcgacgacacggucaucgaggugcagggguacaagagcgugaacaucaccuucgagcuggacgagcgcaucgacaagguccucaacgagaagugcuccgccuacaccguggagcugggcaccgaggugaacgaguucgcgugcgucguggccgacgccgugaucaagacgcugcagccggucagcgagcuccugaccccccuggggaucgaccucgacgagugguccauggccaccuacuaccuguucgacgagagcggcgaguucaagcuggccucccacauguacugcagcuucuacccccccgacgaggacgaggaggagggggacugcgaggaggaggaguucgagccguccacccaguacgaguacggcacggaggacgacuaccagggcaagccccucgaguucggggcgaccagcgccgcccugcagcccgaggaggagcaggaggaggacuggcuggacgacgacucccagcagaccgugggccagcaggacgggagcgaggacaaccagaccacgaccauccagaccaucguggagguccagccccagcucgagauggagcugaccccgguggugcagacgaucgaggucaacuccuucagcggcuaccugaagcucaccgacaacguguacaucaagaacgccgacaucguggaggaggcgaagaaggucaagcccaccgugguggucaacgccgccaacguguaccugaagcacgggggcggcguggccggggcccugaacaaggcgaccaacaacgccaugcaggucgaguccgacgacuacaucgccacgaacggcccccucaagguggggggcagcugcguccuguccggccacaaccuggccaagcacugccuccacgugguggggcccaacgucaacaagggcgaggacauccagcugcugaagagcgccuacgagaacuucaaccagcacgaggugcuccuggcgccgcugcucuccgccgggaucuucggcgccgaccccauccacagccugcgggugugcgucgacaccgugcgcaccaacguguaccuggccgucuucgacaagaaccucuacgacaagcugguguccagcuuccuggagaugaagagcgagaagcagguggagcagaagaucgccgagauccccaaggaggaggucaagcccuucaucaccgaguccaagccgagcguggagcagcggaagcaggacgacaagaagaucaaggcgugcguggaggaggucacgaccacccucgaggagaccaaguuccugacggagaaccugcuccuguacaucgacaucaacgggaaccugcaccccgacuccgccacccucgugagcgacaucgacaucaccuuccugaagaaggacgcccccuacaucgugggcgacgucgugcaggagggcgugcugaccgccgucgugauccccacgaagaaggccgggggcaccaccgagaugcucgcgaaggcccugcgcaaggugccgaccgacaacuacaucacgaccuaccccgggcagggccugaacggguacaccgucgaggaggccaagaccgugcucaagaagugcaaguccgccuucuacauccugcccagcaucaucuccaacgagaagcaggagauccugggcaccgugagcuggaaccuccgggagaugcuggcgcacgccgaggagacgcgcaagcugaugcccgucugcguggagaccaaggugaucgucuccaccauccagcggaaguacaagggcaucaagauccaggagggggugguggacuacggcgcccgcuucuacuucuacaccagcaagacgaccgucgccucccugaucaacacccucaacgaccugaacgagacccuggugacgaugccgcucggguacgugacccacggccugaaccuggaggaggccgcgcgguacaugcgcagccucaagguccccgccaccguguccgugagcucccccgacgccgucaccgccuacaacggguaccugacgagcuccagcaagacccccgaggagcacuucaucgagaccaucucccuggccggcagcuacaaggacuggagcuacuccggccagagcacccagcucgggaucgaguuccugaagcggggcgacaaguccguguacuacacgagcaacccgaccaccuuccaccuggacggggaggugaucaccuucgacaaccucaagacgcugcugucccuccgcgagguccggaccaucaagguguucaccaccguggacaacaucaaccugcacacgcaggucguggacaugagcaugaccuacggccagcaguucggccccaccuaccuggacggggcggacgugaccaagaucaagccccacaacucccacgagggcaagacguucuacguccucccgaacgacgacacccugcgcguggaggccuucgaguacuaccacaccaccgaccccagcuuccuggggcgguacauguccgcccucaaccacacgaagaaguggaaguacccccaggugaacggccugaccagcaucaagugggccgacaacaacugcuaccuggccaccgcgcuccugacccugcagcagaucgagcucaaguucaaccccccggcccugcaggacgccuacuaccgcgcccgggcgggggaggccgccaacuucugcgcccugauccucgccuacugcaacaagacggucggcgagcugggcgacgugcgcgagaccauguccuaccuguuccagcacgcgaaccucgacagcugcaagcggguccugaacguggugugcaagaccugcgggcagcagcagaccacccugaagggcgucgaggccgugauguacauggggacgcucuccuacgagcaguucaagaagggcgugcagauccccugcaccugcgggaagcaggccaccaaguaccugguccagcaggagagccccuucgugaugauguccgcccccccggcccaguacgagcugaagcacggcaccuucacgugcgcgagcgaguacaccggcaacuaccagugcgggcacuacaagcacaucaccuccaaggagacccucuacugcaucgacggcgcccugcugacgaagagcagcgaguacaaggggcccaucaccgacguguucuacaaggagaacuccuacaccaccacgaucaagcccgucaccuacaagcucgacggcguggugugcaccgagaucgaccccaagcuggacaacuacuacaagaaggacaacagcuacuucaccgagcagccgaucgaccugguccccaaccagcccuaccccaacgccuccuucgacaacuucaaguucgugugcgacaacaucaaguucgccgacgaccucaaccagcugacgggguacaagaagccggccagccgcgagcugaaggugaccuucuuccccgaccucaacggcgacgucguggcgaucgacuacaagcacuacacccccuccuucaagaagggcgccaagcugcugcacaagcccaucguguggcacgucaacaacgccaccaacaaggccacguacaagccgaacaccuggugcauccggugccucuggagcaccaagcccguggagaccuccaacagcuucgacgugcugaaguccgaggacgcgcaggggauggacaaccuggccugcgaggaccucaagcccgucagcgaggaggugguggagaaccccacgauccagaaggacguccuggagugcaacgugaagaccaccgagguggucggcgacaucauccugaagccggccaacaacucccucaagaucaccgaggagguggggcacacggaccugauggccgccuacguggacaacagcucccugaccaucaagaagcccaacgagcucagccgcguccugggccugaagacccucgcgacccacgggcuggccgccgugaacuccgugcccugggacacgaucgccaacuacgccaagccguuccugaacaaggucgugagcaccaccaccaacaucgugacgcgcugccucaaccgggucugcaccaacuacaugcccuacuucuucacccugcugcuccagcugugcaccuucacccgcuccacgaacagccggaucaaggcguccaugcccaccaccaucgccaagaacaccgugaagagcgugggcaaguucugccuggaggccagcuucaacuaccucaagucccccaacuucagcaagcugaucaacaucaucaucugguuccugcuccuguccgucugccugggcagccucaucuacuccacggccgcccugggggugcugaugagcaaccucggcaugccguccuacugcaccggguaccgcgagggcuaccugaacagcaccaacgugaccaucgcgacguacugcaccggcuccauccccugcagcgucugccuguccgggcucgacagccuggacaccuaccccucccuggagaccauccagaucacgaucagcuccuucaagugggaccucaccgccuucggccugguggccgagugguuccuggccuacauccucuucacccgguucuucuacgugcuggggcuggccgcgaucaugcagcucuucuucagcuacuucgccguccacuucaucuccaacagcuggcugauguggcugaucaucaaccuggugcagauggcccccaucuccgccauggugcgcauguacaucuucuucgcgagcuucuacuacgucuggaagagcuacgugcacguggucgacggcugcaacuccagcaccugcaugaugugcuacaagcggaaccgcgccacgcggguggagugcaccaccaucgucaacggggugcgccgguccuucuacguguacgccaacggcggcaagggguucugcaagcuccacaacuggaacugcgucaacugcgacaccuucugcgccggcagcacguucaucuccgacgagguggcccgcgaccugagccugcaguucaagcggccgaucaaccccaccgaccaguccagcuacaucguggacuccgucaccgugaagaacgggagcauccaccucuacuucgacaaggcgggccagaagaccuacgagcgccacucccugagccacuucgugaaccuggacaaccuccgggccaacaacacgaaggggucccugcccaucaacgucaucguguucgacggcaagagcaagugcgaggaguccagcgccaaguccgccagcguguacuacucccagcugaugugccagcccauccuccugcuggaccaggcccucgucagcgacgugggcgacagcgcggagguggccgucaagauguucgacgccuacgugaacaccuucuccagcaccuucaacgugccgauggagaagcugaagacccuggucgccacggccgaggcggagcucgccaagaacgugucccuggacaacgugcugagcaccuucaucuccgccgcccgccagggguucgucgacagcgacguggagaccaaggacguggucgagugccucaagcugucccaccagagcgacaucgaggugaccggcgacuccugcaacaacuacaugcugacguacaacaagguggagaacaugaccccccgggaccucggggcgugcaucgacugcagcgcccgccacaucaacgcccaggucgccaagucccacaacaucgcccugaucuggaacgugaaggacuucaugagccuguccgagcagcuccggaagcagauccgcagcgcggccaagaagaacaaccugcccuucaagcugaccugcgccaccacgcgccagguggucaacguggugaccaccaagaucgcccucaagggcgggugaggacuaguuauaagacugacuagcccgaugggccucccaacgggcccuccuccccuccuugcaccgagauuaauaaaaaaaaaaaaaaaaaaaaaaaaaaaaaaaaaaaaaaaaaaaaaaaaaaaaaaaaaaaaaaaaugcaucccccccccccccccccccccccccccccccaaaggcucuuuucagagccaccagaauu

SEQ ID NO: 21576 - RNA, 6058 nt, Artificial Sequence
  SARS-CoV-2__MT821568.1__non-structural protein 3 (NSP3) mRNA gc
aggagaaagcuuaccauggcccccaccaaggugaccuucggcgacgacacggucaucgaggugcagggguacaagagcgugaacaucaccuucgagcuggacgagcgcaucgacaagguccucaacgagaagugcuccgccuacaccguggagcugggcaccgaggugaacgaguucgcgugcgucguggccgacgccgugaucaagacgcugcagccggucagcgagcuccugaccccccuggggaucgaccucgacgagugguccauggccaccuacuaccuguucgacgagagcggcgaguucaagcuggccucccacauguacugcagcuucuacccccccgacgaggacgaggaggagggggacugcgaggaggaggaguucgagccguccacccaguacgaguacggcacggaggacgacuaccagggcaagccccucgaguucggggcgaccagcgccgcccugcagcccgaggaggagcaggaggaggacuggcuggacgacgacucccagcagaccgugggccagcaggacgggagcgaggacaaccagaccacgaccauccagaccaucguggagguccagccccagcucgagauggagcugaccccgguggugcagacgaucgaggucaacuccuucagcggcuaccugaagcucaccgacaacguguacaucaagaacgccgacaucguggaggaggcgaagaaggucaagcccaccgugguggucaacgccgccaacguguaccugaagcacgggggcggcguggccggggcccugaacaaggcgaccaacaacgccaugcaggucgaguccgacgacuacaucgccacgaacggcccccucaagguggggggcagcugcguccuguccggccacaaccuggccaagcacugccuccacgugguggggcccaacgucaacaagggcgaggacauccagcugcugaagagcgccuacgagaacuucaaccagcacgaggugcuccuggcgccgcugcucuccgccgggaucuucggcgccgaccccauccacagccugcgggugugcgucgacaccgugcgcaccaacguguaccuggccgucuucgacaagaaccucuacgacaagcugguguccagcuuccuggagaugaagagcgagaagcagguggagcagaagaucgccgagauccccaaggaggaggucaagcccuucaucaccgaguccaagccgagcguggagcagcggaagcaggacgacaagaagaucaaggcgugcguggaggaggucacgaccacccucgaggagaccaaguuccugacggagaaccugcuccuguacaucgacaucaacgggaaccugcaccccgacuccgccacccucgugagcgacaucgacaucaccuuccugaagaaggacgcccccuacaucgugggcgacgucgugcaggagggcgugcugaccgccgucgugauccccacgaagaaggccgggggcaccaccgagaugcucgcgaaggcccugcgcaaggugccgaccgacaacuacaucacgaccuaccccgggcagggccugaacggguacaccgucgaggaggccaagaccgugcucaagaagugcaaguccgccuucuacauccugcccagcaucaucuccaacgagaagcaggagauccugggcaccgugagcuggaaccuccgggagaugcuggcgcacgccgaggagacgcgcaagcugaugcccgucugcguggagaccaaggccaucguguccaccauccagcggaaguacaagggcaucaagauccaggagggggucguggacuacggcgcccgcuucuacuucuacaccagcaagacgaccguggccucccugaucaacacccucaacgaccugaacgagacccuggucacgaugccgcucggguacgugacccacggccugaaccuggaggaggcggcccgguacaugcgcagccucaaggugcccgccaccgucuccgugagcucccccgacgccgugaccgccuacaacggguaccugacgagcuccagcaagacccccgaggagcacuucaucgagaccaucucccuggcgggcagcuacaaggacuggagcuacuccggccagagcacccagcucgggaucgaguuccugaagcggggcgacaaguccgucuacuacacgagcaacccgaccaccuuccaccuggacggggaggugaucaccuucgacaaccucaagacgcugcugucccuccgcgaggugcggaccaucaaggucuucaccaccguggacaacaucaaccugcacacgcagguggucgacaugagcaugaccuacggccagcaguucggccccaccuaccuggacggggccgacgugaccaagaucaagccccacaacucccacgagggcaagacguucuacgugcucccgaacgacgacacccugcgcgucgaggccuucgaguacuaccacaccaccgaccccagcuuccuggggcgguacauguccgcccucaaccacacgaagaaguggaaguacccccaggugaacggccugaccagcaucaagugggccgacaacaacugcuaccuggcgaccgcccuccugacccugcagcagaucgagcucaaguucaaccccccggcccugcaggacgccuacuaccgcgcgcgggccggggaggccgccaacuucugcgcccugauccucgcguacugcaacaagacggugggcgagcugggcgacguccgcgagaccauguccuaccuguuccagcacgccaaccucgacagcugcaagcgggugcugaacgucgugugcaagaccugcgggcagcagcagaccacccugaagggcguggaggccgucauguacauggggacgcucuccuacgagcaguucaagaagggcgugcagauccccugcaccugcgggaagcaggccaccaaguaccuggugcagcaggagagccccuucgucaugauguccgcccccccggcgcaguacgagcugaagcacggcaccuucacgugcgccagcgaguacaccggcaacuaccagugcgggcacuacaagcacaucaccuccaaggagacccucuacugcaucgacggcgcccugcugacgaagagcagcgaguacaaggggcccaucaccgacguguucuacaaggagaacuccuacaccaccacgaucaagcccgugaccuacaagcucgacggcgucgugugcaccgagaucgaccccaagcuggacaacuacuacaagaaggacaacagcuacuucaccgagcagccgaucgaccuggugcccaaccagccccaccccaacgccuccuucgacaacuucaaguucgucugcgacaacaucaaguucgccgacgaccucaaccagcugacgggguacaagaagccggcgagccgcgagcugaaggugaccuucuuccccgaccucaacggcgacguggucgccaucgacuacaagcacuacacccccuccuucaagaagggcgccaagcugcugcacaagcccaucguguggcacgugaacaacgccaccaacaaggcgacguacaagccgaacaccuggugcauccggugccucuggagcaccaagcccgucgagaccuccaacagcuucgacgugcugaaguccgaggacgcccaggggauggacaaccuggccugcgaggaccucaagcccgugagcgaggaggucguggagaaccccacgauccagaaggacgugcuggagugcaacgucaagaccaccgagguggugggcgacaucauccugaagccggccaacaacucccucaagaucaccgaggaggucgggcacacggaccugauggccgcguacguggacaacagcucccugaccaucaagaagcccaacgagcucagccgcgugcugggccugaagacccucgccacccacgggcuggccgccgucaacuccgugcccugggacacgaucgccaacuacgcgaagccguuccugaacaagguggucagcaccaccaccaacaucgugacgcgcugccucaaccgggugugcaccaacuacaugcccuacuucuucacccugcugcuccagcugugcaccuucacccgcuccacgaacagccggaucaaggccuccaugcccaccaccaucgccaagaacaccgucaagagcgugggcaaguucugccuggaggccagcuucaacuaccucaagucccccaacuucagcaagcugaucaacaucaucaucugguuccugcuccuguccgugugccugggcagccucaucuacuccacggccgcgcuggggguccugaugagcaaccucggcaugccguccuacugcaccggguaccgcgagggcuaccugaacagcaccaacgugaccaucgccacguacugcaccggcuccauccccugcagcgugugccuguccgggcucgacagccuggacaccuaccccucccuggagaccauccagaucacgaucagcuccuucaagugggaccucaccgccuucggccuggucgccgagugguuccuggccuacauccucuucacccgguucuucuacgugcuggggcuggcggccaucaugcagcucuucuucagcuacuucgccgugcacuucaucuccaacagcuggcugauguggcugaucaucaaccugguccagauggcccccaucuccgcgauggugcgcauguacaucuucuucgccagcuucuacuacguguggaagagcuacguccacgugguggacggcugcaacuccagcaccugcaugaugugcuacaagcggaaccgcgccacgcgggucgagugcaccaccaucgugaacgggguccgccgguccuucuacguguacgccaacggcggcaagggguucugcaagcuccacaacuggaacugcgugaacugcgacaccuucugcgccggcagcacguucaucuccgacgaggucgcgcgcgaccugagccugcaguucaagcggccgaucaaccccaccgaccaguccagcuacaucguggacuccgugaccgucaagaacgggagcauccaccucuacuucgacaaggccggccagaagaccuacgagcgccacucccugagccacuucgugaaccuggacaaccuccgggccaacaacacgaaggggucccugcccaucaacgugaucgucuucgacggcaagagcaagugcgaggaguccagcgccaaguccgccagcguguacuacucccagcugaugugccagcccauccuccugcuggaccaggcgcucgugagcgacgucggcgacagcgccgagguggccgugaagauguucgacgccuacgucaacaccuucuccagcaccuucaacgugccgauggagaagcugaagacccugguggccacggcggaggccgagcucgccaagaacgucucccuggacaacgugcugagcaccuucaucuccgccgcgcgccagggguucguggacagcgacgucgagaccaaggacgugguggagugccucaagcugucccaccagagcgacaucgaggucaccggcgacuccugcaacaacuacaugcugacguacaacaagguggagaacaugaccccccgggaccucggggccugcaucgacugcagcgcccgccacaucaacgcccagguggccaagucccacaacaucgcgcugaucuggaacgucaaggacuucaugagccuguccgagcagcuccggaagcagauccgcagcgccgccaagaagaacaaccugcccuucaagcugaccugcgccaccacgcgccagguggugaacgucgugaccaccaagaucgcccucaagggcgggugaggacuaguuauaagacugacuagcccgaugggccucccaacgggcccuccuccccuccuugcaccgagauuaauaaaaaaaaaaaaaaaaaaaaaaaaaaaaaaaaaaaaaaaaaaaaaaaaaaaaaaaaaaaaaaaaugcaucccccccccccccccccccccccccccccccaaaggcucuuuucagagccaccagaauu

SEQ ID NO: 21577 - RNA, 6058 nt, Artificial Sequence
  SARS-CoV-2__MT821572.1__non-structural protein 3 (NSP3) mRNA gc
aggagaaagcuuaccauggcccccaccaaggugaccuucggcgacgacacggucaucgaggugcagggguacaagagcgugaacaucaccuucgagcuggacgagcgcaucgacaagguccucaacgagaagugcuccgccuacaccguggagcugggcaccgaggugaacgaguucgcgugcgucguggccgacgccgugaucaagacgcugcagccggucagcgagcuccugaccccccuggggaucgaccucgacgagugguccauggccaccuacuaccuguucgacgagagcggcgaguucaagcuggccucccacauguacugcagcuucuacccccccgacgaggacgaggaggagggggacugcgaggaggaggaguucgagccguccacccaguacgaguacggcacggaggacgacuaccagggcaagccccucgaguucggggcgaccagcgccgcccugcagcccgaggaggagcaggaggaggacuggcuggacgacgacucccagcagaccgugggccagcaggacgggagcgaggacaaccagaccacgaccauccagaccaucguggagguccagccccagcucgagauggagcugaccccgguggugcagacgaucgaggucaacuccuucagcggcuaccugaagcucaccgacaacguguacaucaagaacgccgacaucguggaggaggcgaagaaggucaagcccaccgugguggucaacgccgccaacguguaccugaagcacgggggcggcguggccggggcccugaacaaggcgaccaacaacgccaugcaggucgaguccgacgacuacaucgccacgaacggcccccucaagguggggggcagcugcguccuguccggccacaaccuggccaagcacugccuccacgugguggggcccaacgucaacaagggcgaggacauccagcugcugaagagcgccuacgagaacuucaaccagcacgaggugcuccuggcgccgcugcucuccgccgggaucuucggcgccgaccccauccacagccugcgggugugcgucgacaccgugcgcaccaacguguaccuggccgucuucgacaagaaccucuacgacaagcugguguccagcuuccuggagaugaagagcgagaagcagguggagcagaagaucgccgagauccccaaggaggaggucaagcccuucaucaccgaguccaagccgagcguggagcagcggaagcaggacgacaagaagaucaaggcgugcguggaggaggucacgaccacccucgaggagaccaaguuccugacggagaaccugcuccuguacaucgacaucaacgggaaccugcaccccgacuccgccacccucgugagcgacaucgacaucaccuuccugaagaaggacgcccccuacaucgugggcgacgucgugcaggagggcgugcugaccgccgucgugauccccacgaagaaggccgggggcaccaccgagaugcucgcgaaggcccugcgcaaggugccgaccgacaacuacaucacgaccuaccccgggcagggccugaacggguacaccgucgaggaggccaagaccgugcucaagaagugcaaguccgccuucuacauccugcccagcaucaucuccaacgagaagcaggagauccugggcaccgugagcuggaaccuccgggagauccuggcgcacgccgaggagacgcgcaagcugaugcccgucugcguggagaccaaggccaucguguccaccauccagcggaaguacaagggcaucaagauccaggagggggucguggacuacggcgcccgcuucuacuucuacaccagcaagacgaccguggccucccugaucaacacccucaacgaccugaacgagacccuggucacgaugccgcucggguacgugacccacggccugaaccuggaggaggcggcccgguacaugcgcagccucaaggugcccgccaccgucuccgugagcucccccgacgccgugaccgccuacaacggguaccugacgagcuccagcaagacccccgaggagcacuucaucgagaccaucucccuggcgggcagcuacaaggacuggagcuacuccggccagagcacccagcucgggaucgaguuccugaagcggggcgacaaguccgucuacuacacgagcaacccgaccaccuuccaccuggacggggaggugaucaccuucgacaaccucaagacgcugcugucccuccgcgaggugcggaccaucaaggucuucaccaccguggacaacaucaaccugcacacgcagguggucgacaugagcaugaccuacggccagcaguucggccccaccuaccuggacggggccgacgugaccaagaucaagccccacaacucccacgagggcaagacguucuacgugcucccgaacgacgacacccugcgcgucgaggccuucgaguacuaccacaccaccgaccccagcuuccuggggcgguacauguccgcccucaaccacacgaagaaguggaaguacccccaggugaacggccugaccagcaucaagugggccgacaacaacugcuaccuggcgaccgcccuccugacccugcagcagaucgagcucaaguucaaccccccggcccugcaggacgccuacuaccgcgcgcgggccggggaggccgccaacuucugcgcccugauccucgcguacugcaacaagacggugggcgagcugggcgacguccgcgagaccauguccuaccuguuccagcacgccaaccucgacagcugcaagcgggugcugaacgucgugugcaagaccugcgggcagcagcagaccacccugaagggcguggaggccgucauguacauggggacgcucuccuacgagcaguucaagaagggcgugcagauccccugcaccugcgggaagcaggccaccaaguaccuggugcagcaggagagccccuucgucaugauguccgcccccccggcgcaguacgagcugaagcacggcaccuucacgugcgccagcgaguacaccggcaacuaccagugcgggcacuacaagcacaucaccuccaaggagacccucuacugcaucgacggcgcccugcugacgaagagcagcgaguacaaggggcccaucaccgacguguucuacaaggagaacuccuacaccaccacgaucaagcccgugaccuacaagcucgacggcgucgugugcaccgagaucgaccccaagcuggacaacuacuacaagaaggacaacagcuacuucaccgagcagccgaucgaccuggugcccaaccagcccuaccccaacgccuccuucgacaacuucaaguucgucugcgacaacaucaaguucgccgacgaccucaaccagcugacgggguacaagaagccggcgagccgcgagcugaaggugaccuucuuccccgaccucaacggcgacguggucgccaucgacuacaagcacuacacccccuccuucaagaagggcgccaagcugcugcacaagcccaucguguggcacgugaacaacgccaccaacaaggcgacguacaagccgaacaccuggugcauccggugccucuggagcaccaagcccgucgagaccuccaacagcuucgacgugcugaaguccgaggacgcccaggggauggacaaccuggccugcgaggaccucaagcccgugagcgaggaggucguggagaaccccacgauccagaaggacgugcuggagugcaacgucaagaccaccgagguggugggcgacaucauccugaagccggccaacaacucccucaagaucaccgaggaggucgggcacacggaccugauggccgcguacguggacaacagcucccugaccaucaagaagcccaacgagcucagccgcgugcugggccugaagacccucgccacccacgggcuggccgccgucaacuccgugcccugggacacgaucgccaacuacgcgaagccguuccugaacaagguggucagcaccaccaccaacaucgugacgcgcugccucaaccgggugugcaccaacuacaugcccuacuucuucacccugcugcuccagcugugcaccuucacccgcuccacgaacagccggaucaaggccuccaugcccaccaccaucgccaagaacaccgucaagagcgugggcaaguucugccuggaggccagcuucaacuaccucaagucccccaacuucagcaagcugaucaacaucaucaucugguuccugcuccuguccgugugccugggcagccucaucuacuccacggccgcgcuggggguccugaugagcaaccucggcaugccguccuacugcaccggguaccgcgagggcuaccugaacagcaccaacgugaccaucgccacguacugcaccggcuccauccccugcagcgugugccuguccgggcucgacagccuggacaccuaccccucccuggagaccauccagaucacgaucagcuccuucaagugggaccucaccgccuucggccuggucgccgagugguuccuggccuacauccucuucacccgguucuucuacgugcuggggcuggcggccaucaugcagcucuucuucagcuacuucgccgugcacuucaucuccaacagcuggcugauguggcugaucaucaaccugguccagauggcccccaucuccgcgauggugcgcauguacaucuucuucgccagcuucuacuacguguggaagagcuacguccacgugguggacggcugcaacuccagcaccugcaugaugugcuacaagcggaaccgcgccacgcgggucgagugcaccaccaucgugaacgggguccgccgguccuucuacguguacgccaacggcggcaagggguucugcaagcuccacaacuggaacugcgugaacugcgacaccuucugcgccggcagcacguucaucuccgacgaggucgcgcgcgaccugagccugcaguucaagcggccgaucaaccccaccgaccaguccagcuacaucguggacuccgugaccgucaagaacgggagcauccaccucuacuucgacaaggccggccagaagaccuacgagcgccacucccugagccacuucgugaaccuggacaaccuccgggccaacaacacgaaggggucccugcccaucaacgugaucgucuucgacggcaagagcaagugcgaggaguccagcgccaaguccgccagcguguacuacucccagcugaugugccagcccauccuccugcuggaccaggcgcucgugagcgacgucggcgacagcgccgagguggccgugaagauguucgacgccuacgucaacaccuucuccagcaccuucaacgugccgauggagaagcugaagacccugguggccacggcggaggccgagcucgccaagaacgucucccuggacaacgugcugagcaccuucaucuccgccgcgcgccagggguucguggacagcgacgucgagaccaaggacgugguggagugccucaagcugucccaccagagcgacaucgaggucaccggcgacuccugcaacaacuacaugcugacguacaacaagguggagaacaugaccccccgggaccucggggccugcaucgacugcagcgcccgccacaucaacgcccagguggccaagucccacaacaucgcgcugaucuggaacgucaaggacuucaugagccuguccgagcagcuccggaagcagauccgcagcgccgccaagaagaacaaccugcccuucaagcugaccugcgccaccacgcgccagguggugaacgucgugaccaccaagaucgcccucaagggcgggugaggacuaguuauaagacugacuagcccgaugggccucccaacgggcccuccuccccuccuugcaccgagauuaauaaaaaaaaaaaaaaaaaaaaaaaaaaaaaaaaaaaaaaaaaaaaaaaaaaaaaaaaaaaaaaaaugcaucccccccccccccccccccccccccccccccaaaggcucuuuucagagccaccagaauu

SEQ ID NO: 21578 - RNA, 6058 nt, Artificial Sequence
  SARS-CoV-2__MT821610.1__non-structural protein 3 (NSP3) mRNA gc
aggagaaagcuuaccauggcccccaccaaggugaccuucggcgacgacacggucaucgaggugcagggguacaagagcgugaacaucaccuucgagcuggacgagcgcaucgacaagguccucaacgagaagugcuccgccuacaccguggagcugggcaccgaggugaacgaguucgcgugcgucguggccgacgccgugaucaagacgcugcagccggucagcgagcuccugaccccccuggggaucgaccucgacgagugguccauggccaccuacuaccuguucgacgagagcggcgaguucaagcuggccucccacauguacugcagcuucuacccccccgacgaggacgaggaggagggggacugcgaggaggaggaguucgagccguccacccaguacgaguacggcacggaggacgacuaccagggcaagccccucgaguucggggcgaccagcgccgcccugcagcccgaggaggagcaggaggaggacuggcuggacgacgacucccagcagaccgugggccagcaggacgggagcgaggacaaccagaccacgaccauccagaccaucguggagguccagccccagcucgagauggagcugaccccgguggugcacacgaucgaggucaacuccuucagcggcuaccugaagcucaccgacaacguguacaucaagaacgccgacaucguggaggaggcgaagaaggucaagcccaccgugguggucaacgccgccaacguguaccugaagcacgggggcggcguggccggggcccugaacaaggcgaccaacaacgccaugcaggucgaguccgacgacuacaucgccacgaacggcccccucaagguggggggcagcugcguccuguccggccacaaccuggccaagcacugccuccacgugguggggcccaacgucaacaagggcgaggacauccagcugcugaagagcgccuacgagaacuucaaccagcacgaggugcuccuggcgccgcugcucuccgccgggaucuucggcgccgaccccauccacagccugcgggugugcgucgacaccgugcgcaccaacguguaccuggccgucuucgacaagaaccucuacgacaagcugguguccagcuuccuggagaugaagagcgagaagcagguggagcagaagaucgccgagauccccaaggaggaggucaagcccuucaucaccgaguccaagccgagcguggagcagcggaagcaggacgacaagaagaucaaggcgugcguggaggaggucacgaccacccucgaggagaccaaguuccugacggagaaccugcuccuguacaucgacaucaacgggaaccugcaccccgacuccgccacccucgugagcgacaucgacaucaccuuccugaagaaggacgcccccuacaucgugggcgacgucgugcaggagggcgugcugaccgccgucgugauccccacgaagaaggccgggggcaccaccgagaugcucgcgaaggcccugcgcaaggugccgaccgacaacuacaucacgaccuaccccgggcagggccugaacggguacaccgucgaggaggccaagaccgugcucaagaagugcaaguccgccuucuacauccugcccagcaucaucuccaacgagaagcaggagauccugggcaccgugagcuggaaccuccgggagaugcuggcgcacgccgaggagacgcgcaagcugaugcccgucugcguggagaccaaggccaucguguccaccauccagcggaaguacaagggcaucaagauccaggagggggucguggacuacggcgcccgcuucuacuucuacaccagcaagacgaccguggccucccugaucaacacccucaacgaccugaacgagacccuggucacgaugccgcucggguacgugacccacggccugaaccuggaggaggcggcccgguacaugcgcagccucaaggugcccgccaccgucuccgugagcucccccgacgccgugaccgccuacaacggguaccugacgagcuccagcaagacccccgaggagcacuucaucgagaccaucucccuggcgggcagcuacaaggacuggagcuacuccggccagagcacccagcucgggaucgaguuccugaagcggggcgacaaguccgucuacuacacgagcaacccgaccaccuuccaccuggacggggaggugaucaccuucgacaaccucaagacgcugcugucccuccgcgaggugcggaccaucaaggucuucaccaccguggacaacaucaaccugcacacgcagguggucgacaugagcaugaccuacggccagcaguucggccccaccuaccuggacggggccgacgugaccaagaucaagccccacaacucccacgagggcaagacguucuacgugcucccgaacgacgacacccugcgcgucgaggccuucgaguacuaccacaccaccgaccccagcuuccuggggcgguacauguccgcccucaaccacacgaagaaguggaaguacccccaggugaacggccugaccagcaucaagugggccgacaacaacugcuaccuggcgaccgcccuccugacccugcagcagaucgagcucaaguucaaccccccggcccugcaggacgccuacuaccgcgcgcgggccggggaggccgccaacuucugcgcccugauccucgcguacugcaacaagacggugggcgagcugggcgacguccgcgagaccauguccuaccuguuccagcacgccaaccucgacagcugcaagcgggugcugaacgucgugugcaagaccugcgggcagcagcagaccacccugaagggcguggaggccgucauguacauggggacgcucuccuacgagcaguucaagaagggcgugcagauccccugcaccugcgggaagcaggccaccaaguaccuggugcagcaggagagccccuucgucaugauguccgcccccccggcgcaguacgagcugaagcacggcaccuucacgugcgccagcgaguacaccggcaacuaccagugcgggcacuacaagcacaucaccuccaaggagacccucuacugcaucgacggcgcccugcugacgaagagcagcgaguacaaggggcccaucaccgacguguucuacaaggagaacuccuacaccaccacgaucaagcccgugaccuacaagcucgacggcgucgugugcaccgagaucgaccccaagcuggacaacuacuacaagaaggacaacagcuacuucaccgagcagccgaucgaccuggugcccaaccagcccuaccccaacgccuccuucgacaacuucaaguucgucugcgacaacaucaaguucgccgacgaccucaaccagcugacgggguacaagaagccggcgagccgcgagcugaaggugaccuucuuccccgaccucaacggcgacguggucgccaucgacuacaagcacuacacccccuccuucaagaagggcgccaagcugcugcacaagcccaucguguggcacgugaacaacgccaccaacaaggcgacguacaagccgaacaccuggugcauccggugccucuggagcaccaagcccgucgagaccuccaacagcuucgacgugcugaaguccgaggacgcccaggggauggacaaccuggccugcgaggaccucaagcccgugagcgaggaggucguggagaaccccacgauccagaaggacgugcuggagugcaacgucaagaccaccgagguggugggcgacaucauccugaagccggccaacaacucccucaagaucaccgaggaggucgggcacacggaccugauggccgcguacguggacaacagcucccugaccaucaagaagcccaacgagcucagccgcgugcugggccugaagacccucgccacccacgggcuggccgccgucaacuccgugcccugggacacgaucgccaacuacgcgaagccguuccugaacaagguggucagcaccaccaccaacaucgugacgcgcugccucaaccgggugugcaccaacuacaugcccuacuucuucacccugcugcuccagcugugcaccuucacccgcuccacgaacagccggaucaaggccuccaugcccaccaccaucgccaagaacaccgucaagagcgugggcaaguucugccuggaggccagcuucaacuaccucaagucccccaacuucagcaagcugaucaacaucaucaucugguuccugcuccuguccgugugccugggcagccucaucuacuccacggccgcgcuggggguccugaugagcaaccucggcaugccguccuacugcaccggguaccgcgagggcuaccugaacagcaccaacgugaccaucgccacguacugcaccggcuccauccccugcagcgugugccuguccgggcucgacagccuggacaccuaccccucccuggagaccauccagaucacgaucagcuccuucaagugggaccucaccgccuucggccuggucgccgagugguuccuggccuacauccucuucacccgguucuucuacgugcuggggcuggcggccaucaugcagcucuucuucagcuacuucgccgugcacuucaucuccaacagcuggcugauguggcugaucaucaaccugguccagauggcccccaucuccgcgauggugcgcauguacaucuucuucgccagcuucuacuacguguggaagagcuacguccacgugguggacggcugcaacuccagcaccugcaugaugugcuacaagcggaaccgcgccacgcgggucgagugcaccaccaucgugaacgggguccgccgguccuucuacguguacgccaacggcggcaagggguucugcaagcuccacaacuggaacugcgugaacugcgacaccuucugcgccggcagcacguucaucuccgacgaggucgcgcgcgaccugagccugcaguucaagcggccgaucaaccccaccgaccaguccagcuacaucguggacuccgugaccgucaagaacgggagcauccaccucuacuucgacaaggccggccagaagaccuacgagcgccacucccugagccacuucgugaaccuggacaaccuccgggccaacaacacgaaggggucccugcccaucaacgugaucgucuucgacggcaagagcaagugcgaggaguccagcgccaaguccgccagcguguacuacucccagcugaugugccagcccauccuccugcuggaccaggcgcucgugagcgacgucggcgacagcgccgagguggccgugaagauguucgacgccuacgucaacaccuucuccagcaccuucaacgugccgauggagaagcugaagacccugguggccacggcggaggccgagcucgccaagaacgucucccuggacaacgugcugagcaccuucaucuccgccgcgcgccagggguucguggacagcgacgucgagaccaaggacgugguggagugccucaagcugucccaccagagcgacaucgaggucaccggcgacuccugcaacaacuacaugcugacguacaacaagguggagaacaugaccccccgggaccucggggccugcaucgacugcagcgcccgccacaucaacgcccagguggccaagucccacaacaucgcgcugaucuggaacgucaaggacuucaugagccuguccgagcagcuccggaagcagauccgcagcgccgccaagaagaacaaccugcccuucaagcugaccugcgccaccacgcgccagguggugaacgucgugaccaccaagaucgcccucaagggcgggugaggacuaguuauaagacugacuagcccgaugggccucccaacgggcccuccuccccuccuugcaccgagauuaauaaaaaaaaaaaaaaaaaaaaaaaaaaaaaaaaaaaaaaaaaaaaaaaaaaaaaaaaaaaaaaaaugcaucccccccccccccccccccccccccccccccaaaggcucuuuucagagccaccagaauu

SEQ ID NO: 21579 - RNA, 6058 nt, Artificial Sequence
  SARS-CoV-2__MT821676.1__non-structural protein 3 (NSP3) mRNA gc
aggagaaagcuuaccauggcccccaccaaggugaccuucggcgacgacacggucaucgaggugcagggguacaagagcgugaacaucaccuucgagcuggacgagcgcaucgacaagguccucaacgagaagugcuccgccuacaccguggagcugggcaccgaggugaacgaguucgcgugcgucguggccgacgccgugaucaagacgcugcagccggucagcgagcuccugaccccccuggggaucgaccucgacgagugguccauggccaccuacuaccuguucgacgagagcggcgaguucaagcuggccucccacauguacugcagcuucuacccccccgacgaggacgaggaggagggggacugcgaggaggaggaguucgagccguccacccaguacgaguacggcacggaggacgacuaccagggcaagccccucgaguucggggcgaccagcgccgcccugcagcccgaggaggagcaggaggaggacuggcuggacgacgacucccagcagaccgugggccagcaggacgggagcgaggacaaccagaccacgaccauccagaccaucguggagguccagccccagcucgagauggagcugaccccgguggugcagacgaucgaggucaacuccuucagcggcuaccugaagcucaccgacaacguguacaucaagaacgccgacaucguggaggaggcgaagaaggucaagcccaccgugguggucaacgccgccaacguguaccugaagcacgggggcggcguggccggggcccugaacaaggcgaccaacaacgccaugcaggucgaguccgacgacuacaucgccacgaacggcccccucaagguggggggcagcugcguccuguccggccacaaccuggccaagcacugccuccacgugguggggcccaacgucaacaagggcgaggacauccagcugcugaagagcgccuacgagaacuucaaccagcacgaggugcuccuggcgccgcugcucuccgccgggaucuucggcgccgaccccauccacagccugcgggugugcgucgacaccgugcgcaccaacguguaccuggccgucuucgacaagaaccucuacgacaagcugguguccagcuuccuggagaugaagagcgagaagcagguggagcagaagaucgccgagauccccaaggaggaggucaagcccuucaucaccgaguccaagccgagcguggagcagcggaagcaggacgacaagaagaucaaggcgugcguggaggaggucacgaccacccucgaggagaccaaguuccugacggagaaccugcuccuguacaucgacaucaacgggaaccugcaccccgacuccgccacccucgugagcgacaucgacaucaccuuccugaagaaggacgcccccuacaucgugggcgacgucgugcaggagggcgugcugaccgccgucgugauccccacgaagaaggccgggggcaccaccgagaugcucgcgaaggcccugcgcaaggugccgaccgacaacuacaucacgaccuaccccgggcagggccugaacggguacaccgucgaggaggccaagaccgugcucaagaagugcaaguccgccuucuacauccugcccagcaucaucuccaacgagaagcaggagauccugggcaccgugagcuggaaccuccgggagaugcuggcgcacgccgaggagacgcgcaagcugaugcccgucugcguggagaccaaggccaucguguccaccauccagcggaaguacaagggcaucaagauccaggagggggucguggacuacggcgcccgcuucuacuucuacaccagcaagacgaccguggccucccugaucaacacccucaacgaccugaacgagacccuggucacgaugccgcucggguacgugacccacggccugaaccuggaggaggcggcccgguacaugcgcagccucaaggugcccgccaccgucuccgugagcucccccgacgccgugaccgccuacaacggguaccugacgagcuccagcaagacccccgaggagcacuucaucgagaccaucucccuggcgggcagcuacaaggacuggagcuacuccggccagagcacccagcucgggaucgaguuccugaagcggggcgacaaguccgucuacuacacgagcaacccgaccaccuuccaccuggacggggaggugaucaccuucgacaaccucaagacgcugcugucccuccgcgaggugcggaccaucaaggucuucaccaccguggacaacaucaaccugcacacgcagguggucgacaugagcaugaccuacggccagcaguucggccccaccuaccuggacggggccgacgugaccaagaucaagccccacaacucccacgagggcaagacguucuacgugcucccgaacgacgacacccugcgcgucgaggccuucgaguacuaccacaccaccgaccccagcuuccuggggcgguacauguccgcccucaaccacacgaagaaguggaaguacccccaggugaacggccugaccagcaucaagugggccgacaacaacugcuaccuggcgaccgcccuccugacccugcagcagaucgagcucaaguucaaccccccggcccugcaggacgccuacuaccgcgcgcgggccggggaggccgccaacuucugcgcccugauccucgcguacugcaacaagacggugggcgagcugggcgacguccgcgagaccauguccuaccuguuccagcacgccaaccucgacagcugcaagcgggugcugaacgucgugugcaagaccugcgggcagcagcagaccacccugaagggcguggaggccgucauguacauggggacgcucuccuacgagcaguucaagaagggcgugcagauccccugcaccugcgggaagcaggccaccaaguaccuggugcagcaggagagccccuucgucaugauguccgcccccccggcgcaguacgagcugaagcacggcaccuucacgugcgccagcgaguacaccggcaacuaccagugcgggcacuacaagcacaucaccuccaaggagacccucuacugcaucgacggcgcccugcugacgaagagcagcgaguacaaggggcccaucaccgacguguucuacaaggagaacuccuacaccaccacgaucaagcccgugaccuacaagcucgacggcgucgugugcaccgagaucgaccccaagcuggacaacuacuacaagaaggacaacagcuacuucaccgagcagccgaucgaccuggugcccaaccagcccuaccccaacgccuccuucgacaacuucaaguucgucugcgacaacaucaaguucgccgacgaccucaaccagcugacgggguacaagaagccggcgagccgcaagcugaaggugaccuucuuccccgaccucaacggcgacguggucgccaucgacuacaagcacuacacccccuccuucaagaagggcgccaagcugcugcacaagcccaucguguggcacgugaacaacgccaccaacaaggcgacguacaagccgaacaccuggugcauccggugccucuggagcaccaagcccgucgagaccuccaacagcuucgacgugcugaaguccgaggacgcccaggggauggacaaccuggccugcgaggaccucaagcccgugagcgaggaggucguggagaaccccacgauccagaaggacgugcuggagugcaacgucaagaccaccgagguggugggcgacaucauccugaagccggccaacaacucccucaagaucaccgaggaggucgggcacacggaccugauggccgcguacguggacaacagcucccugaccaucaagaagcccaacgagcucagccgcgugcugggccugaagacccucgccacccacgggcuggccgccgucaacuccgugcccugggacacgaucgccaacuacgcgaagccguuccugaacaagguggucagcaccaccaccaacaucgugacgcgcugccucaaccgggugugcaccaacuacaugcccuacuucuucacccugcugcuccagcugugcaccuucacccgcuccacgaacagccggaucaaggccuccaugcccaccaccaucgccaagaacaccgucaagagcgugggcaaguucugccuggaggccagcuucaacuaccucaagucccccaacuucagcaagcugaucaacaucaucaucugguuccugcuccuguccgugugccugggcagccucaucuacuccacggccgcgcuggggguccugaugagcaaccucggcaugccguccuacugcaccggguaccgcgagggcuaccugaacagcaccaacgugaccaucgccacguacugcaccggcuccauccccugcagcgugugccuguccgggcucgacagccuggacaccuaccccucccuggagaccauccagaucacgaucagcuccuucaagugggaccucaccgccuucggccuggucgccgagugguuccuggccuacauccucuucacccgguucuucuacgugcuggggcuggcggccaucaugcagcucuucuucagcuacuucgccgugcacuucaucuccaacagcuggcugauguggcugaucaucaaccugguccagauggcccccaucuccgcgauggugcgcauguacaucuucuucgccagcuucuacuacguguggaagagcuacguccacgugguggacggcugcaacuccagcaccugcaugaugugcuacaagcggaaccgcgccacgcgggucgagugcaccaccaucgugaacgggguccgccgguccuucuacguguacgccaacggcggcaagggguucugcaagcuccacaacuggaacugcgugaacugcgacaccuucugcgccggcagcacguucaucuccgacgaggucgcgcgcgaccugagccugcaguucaagcggccgaucaaccccaccgaccaguccagcuacaucguggacuccgugaccgucaagaacgggagcauccaccucuacuucgacaaggccggccagaagaccuacgagcgccacucccugagccacuucgugaaccuggacaaccuccgggccaacaacacgaaggggucccugcccaucaacgugaucgucuucgacggcaagagcaagugcgaggaguccagcgccaaguccgccagcguguacuacucccagcugaugugccagcccauccuccugcuggaccaggcgcucgugagcgacgucggcgacagcgccgagguggccgugaagauguucgacgccuacgucaacaccuucuccagcaccuucaacgugccgauggagaagcugaagacccugguggccacggcggaggccgagcucgccaagaacgucucccuggacaacgugcugagcaccuucaucuccgccgcgcgccagggguucguggacagcgacgucgagaccaaggacgugguggagugccucaagcugucccaccagagcgacaucgaggucaccggcgacuccugcaacaacuacaugcugacguacaacaagguggagaacaugaccccccgggaccucggggccugcaucgacugcagcgcccgccacaucaacgcccagguggccaagucccacaacaucgcgcugaucuggaacgucaaggacuucaugagccuguccgagcagcuccggaagcagauccgcagcgccgccaagaagaacaaccugcccuucaagcugaccugcgccaccacgcgccagguggugaacgucgugaccaccaagaucgcccucaagggcgggugaggacuaguuauaagacugacuagcccgaugggccucccaacgggcccuccuccccuccuugcaccgagauuaauaaaaaaaaaaaaaaaaaaaaaaaaaaaaaaaaaaaaaaaaaaaaaaaaaaaaaaaaaaaaaaaaugcaucccccccccccccccccccccccccccccccaaaggcucuuuucagagccaccagaauu

SEQ ID NO: 21580 - RNA, 6058 nt, Artificial Sequence
  SARS-CoV-2__MT821773.1__non-structural protein 3 (NSP3) mRNA gc
aggagaaagcuuaccauggcccccaccaaggugaccuucggcgacgacacggucaucgaggugcagggguacaagagcgugaacaucaccuucgagcuggacgagcgcaucgacaagguccucaacgagaagugcuccgccuacaccguggagcugggcaccgaggugaacgaguucgcgugcgucguggccgacgccgugaucaagacgcugcagccggucagcgagcuccugaccccccuggggaucgaccucgacgagugguccauggccaccuacuaccuguucgacgagagcggcgaguucaagcuggccucccacauguacugcagcuucuacccccccgacgaggacgaggaggagggggacugcgaggaggaggaguucgagccguccacccaguacgaguacggcacggaggacgacuaccagggcaagccccucgaguucggggcgaccagcgccgcccugcagcccgaggaggagcaggaggaggacuggcuggacgacgacucccagcagaccgugggccagcaggacgggagcgaggacaaccagaccacgaccauccagaccaucguggagguccagccccagcucgagauggagcugaccccgguggugcagacgaucgaggucaacuccuucagcggcuaccugaagcucaccgacaacguguacaucaagaacgccgacaucguggaggaggcgaagaaggucaagcccaccgugguggucaacgccgccaacguguaccugaagcacgggggcggcguggccggggcccugaacaaggcgaccaacaacgccaugcaggucgaguccgacgacuacaucgccacgaacggcccccucaagguggggggcagcugcguccuguccggccacaaccuggccaagcacugccuccacgugguggggcccaacgucaacaagggcgaggacauccagcugcugaagagcgccuacgagaacuucaaccagcacgaggugcuccuggcgccgcugcucuccgccgggaucuucggcgccgaccccauccacagccugcgggugugcgucgacaccgugcgcaccaacguguaccuggccgucuucgacaagaaccucuacgacaagcugguguccagcuuccuggagaugaagagcgagaagcagguggagcagaagaucgccgagauccccaaggaggaggucaagcccuucaucaccgaguccaagccgagcguggagcagcggaagcaggacgacaagaagaucaaggcgugcguggaggaggucacgaccacccucgaggagaccaaguuccugacggagaaccugcuccuguacaucgacaucaacgggaaccugcaccccgacuccgccacccucgugagcgacaucgacaucaccuuccugaagaaggacgcccccuacaucgugggcgacgucgugcaggagggcgugcugaccgccgucgugauccccacgaagaaggccgggggcaccaccgagaugcucgcgaaggcccugcgcaaggugccgaccgacaacuacaucacgaccuaccccgggcagggccugaacggguacaccgucgaggaggccaagaccgugcucaagaagugcaaguccgccuucuacauccugcccagcaucaucuccaacgagaagcaggagauccugggcaccgugagcuggaaccuccgggagaugcuggcgcacgccgaggagacgcgcaagcugaugcccgucugcguggagaccaaggccaucguguccaccauccagcggaaguacaagggcaucaagauccaggagggggucguggacuacggcgcccgcuucuacuucuacaccagcaagacgaccguggccucccugaucaacacccucaacgaccugaacgagacccuggucacgaugccgcucggguacgugacccacggccugaaccuggaggaggcggcccgguacaugcgcagccucaaggugcccgccaccgucuccgugagcucccccgacgccgugaccgccuacaacggguaccugacgagcuccagcaagacccccgaggagcacuucaucgagaccaucucccuggcgggcagcuacaaggacuggagcuacuccggccagagcacccagcucgggaucgaguuccugaagcggggcgacaaguccgucuacuacacgagcaacccgaccaccuuccaccuggacggggaggugaucaccuucgacaaccucaagacgcugcugucccuccgcgaggugcggaccaucaaggucuucaccaccguggacaacaucaaccugcacacgcagguggucgacaugagcaugaccuacggccagcaguucggccccaccuaccuggacggggccgacgugaccaagaucaagccccacaacucccacgagggcaagacguucuacgugcucccgaacgacgacacccugcgcgucgaggccuucgaguacuaccacaccaccgaccccagcuuccuggggcgguacauguccgcccucaaccacacgaagaaguggaaguacccccaggugaacggccugaccagcaucaagugggccgacaacaacugcuaccuggcgaccgcccuccugacccugcagcagaucgagcucaaguucaaccccccggcccugcaggacgccuacuaccgcgcgcgggccggggaggccgccaacuucugcgcccugauccucgcguacugcaacaagacggugggcgagcugggcgacguccgcgagaccauguccuaccuguuccagcacgccaaccucgacagcugcaagcgggugcugaacgucgugugcaagaccugcgggcagcagcagaccacccugaagggcguggaggccgucauguacauggggacgcucuccuacgagcaguucaagaagggcgugcagauccccugcaccugcgggaagcaggccaccaaguaccuggugcagcaggagagccccuucgucaugauguccgcccccccggcgcaguacgagcugaagcacggcaccuucacgugcgccagcgaguacaccggcaacuaccagugcgggcacuacaagcacaucaucuccaaggagacccucuacugcaucgacggcgcccugcugaccaagagcagcgaguacaaggggcccaucacggacguguucuacaaggagaacuccuacaccaccaccaucaagcccgugacguacaagcucgacggcgucgugugcaccgagaucgaccccaagcuggacaacuacuacaagaaggacaacagcuacuucaccgagcagccgaucgaccuggugcccaaccagcccuaccccaacgccuccuucgacaacuucaaguucgucugcgacaacaucaaguucgccgacgaccucaaccagcugaccggguacaagaagccggcgagccgcgagcugaaggugacguucuuccccgaccucaacggcgacguggucgccaucgacuacaagcacuacacccccuccuucaagaagggcgccaagcugcugcacaagcccaucguguggcacgugaacaacgccaccaacaaggcgaccuacaagccgaacacguggugcauccggugccucuggagcaccaagcccgucgagaccuccaacagcuucgacgugcugaaguccgaggacgcccaggggauggacaaccuggccugcgaggaccucaagcccgugagcgaggaggucguggagaaccccaccauccagaaggacgugcuggagugcaacgucaagacgaccgagguggugggcgacaucauccugaagccggccaacaacucccucaagaucaccgaggaggucgggcacaccgaccugauggccgcguacguggacaacagcucccugacgaucaagaagcccaacgagcucagccgcgugcugggccugaagacccucgccacccacgggcuggccgccgucaacuccgugcccugggacaccaucgccaacuacgcgaagccguuccugaacaagguggucagcacgaccaccaacaucgugacccgcugccucaaccgggugugcacgaacuacaugcccuacuucuucacccugcugcuccagcugugcaccuucacccgcuccaccaacagccggaucaaggccuccaugcccacgaccaucgccaagaacaccgucaagagcgugggcaaguucugccuggaggccagcuucaacuaccucaagucccccaacuucagcaagcugaucaacaucaucaucugguuccugcuccuguccgugugccugggcagccucaucuacuccaccgccgcgcuggggguccugaugagcaaccucggcaugccguccuacugcacgggguaccgcgagggcuaccugaacagcaccaacgugaccaucgccaccuacugcacgggcuccauccccugcagcgugugccuguccgggcucgacagccuggacaccuaccccucccuggagaccauccagaucaccaucagcuccuucaagugggaccucacggccuucggccuggucgccgagugguuccuggccuacauccucuucacccgguucuucuacgugcuggggcuggcggccaucaugcagcucuucuucagcuacuucgccgugcacuucaucuccaacagcuggcugauguggcugaucaucaaccugguccagauggcccccaucuccgcgauggugcgcauguacaucuucuucgccagcuucuacuacguguggaagagcuacguccacgugguggacggcugcaacuccagcaccugcaugaugugcuacaagcggaaccgcgccacccgggucgagugcacgaccaucgugaacgggguccgccgguccuucuacguguacgccaacggcggcaagggguucugcaagcuccacaacuggaacugcgugaacugcgacaccuucugcgccggcagcaccuucaucuccgacgaggucgcgcgcgaccugagccugcaguucaagcggccgaucaaccccacggaccaguccagcuacaucguggacuccgugaccgucaagaacgggagcauccaccucuacuucgacaaggccggccagaagaccuacgagcgccacucccugagccacuucgugaaccuggacaaccuccgggccaacaacaccaaggggucccugcccaucaacgugaucgucuucgacggcaagagcaagugcgaggaguccagcgccaaguccgccagcguguacuacucccagcugaugugccagcccauccuccugcuggaccaggcgcucgugagcgacgucggcgacagcgccgagguggccgugaagauguucgacgccuacgucaacacguucuccagcaccuucaacgugccgauggagaagcugaagacccugguggccaccgcggaggccgagcucgccaagaacgucucccuggacaacgugcugagcacguucaucuccgccgcgcgccagggguucguggacagcgacgucgagaccaaggacgugguggagugccucaagcugucccaccagagcgacaucgaggucaccggcgacuccugcaacaacuacaugcugaccuacaacaagguggagaacaugacgccccgggaccucggggccugcaucgacugcagcgcccgccacaucaacgcccagguggccaagucccacaacaucgcgcugaucuggaacgucaaggacuucaugagccuguccgagcagcuccggaagcagauccgcagcgccgccaagaagaacaaccugcccuucaagcugaccugcgccaccacccgccagguggugaacgucgugacgaccaagaucgcccucaagggcgggugaggacuaguuauaagacugacuagcccgaugggccucccaacgggcccuccuccccuccuugcaccgagauuaauaaaaaaaaaaaaaaaaaaaaaaaaaaaaaaaaaaaaaaaaaaaaaaaaaaaaaaaaaaaaaaaaugcaucccccccccccccccccccccccccccccccaaaggcucuuuucagagccaccagaauu

SEQ ID NO: 21581 - RNA, 6058 nt, Artificial Sequence
  SARS-CoV-2__MT821778.1__non-structural protein 3 (NSP3) mRNA gc
aggagaaagcuuaccauggcccccaccaaggugaccuucggcgacgacacggucaucgaggugcagggguacaagagcgugaacaucaccuucgagcuggacgagcgcaucgacaagguccucaacgagaagugcuccgccuacaccguggagcugggcaccgaggugaacgaguucgcgugcgucguggccgacgccgugaucaagacgcugcagccggucagcgagcuccugaccccccuggggaucgaccucgacgagugguccauggccaccuacuaccuguucgacgagagcggcgaguucaagcuggccucccacauguacugcagcuucuacccccccgacgaggacgaggaggagggggacugcgaggaggaggaguucgagccguccacccaguacgaguacggcacggaggacgacuaccagggcaagccccucgaguucggggcgaccagcgccgcccugcagcccgaggaggagcaggaggaggacuggcuggacgacgacucccagcagaccgugggccagcaggacgggagcgaggacaaccagaccacgaccauccagaccaucguggagguccagccccagcucgagauggagcugaccccgguggugcagacgaucgaggucaacuccuucagcggcuaccugaagcucaccgacaacguguacaucaagaacgccgacaucguggaggaggcgaagaaggucaagcccaccgugguggucaacgccgccaacguguaccugaagcacgggggcggcguggccggggcccugaacaaggcgaccaacaacgccaugcaggucgaguccgacgacuacaucgccacgaacggcccccucaagguggggggcagcugcguccuguccggccacaaccuggccaagcacugccuccacgugguggggcccaacgucaacaagggcgaggacauccagcugcugaagagcgccuacgagaacuucaaccagcacgaggugcuccuggcgccgcugcucuccgccgggaucuucggcgccgaccccauccacagccugcgggugugcgucgacaccgugcgcaccaacguguaccuggccgucuucgacaagaaccucuacgacaagcugguguccagcuuccuggagaugaagagcgagaagcagguggagcagaagaucgccgagauccccaaggaggaggucaagcccuucaucaccgaguccaagccgagcguggagcagcggaagcaggacgacaagaagaucaaggcgugcguggaggaggucacgaccacccucgaggagaccaaguuccugacggagaaccugcuccuguacaucgacaucaacgggaaccugcaccccgacuccgccacccucgugagcgacaucgacaucaccuuccugaagaaggacgcccccuacaucgugggcgacgucgugcaggagggcgugcugaccgccgucgugauccccacgaagaaggccgggggcaccaccgagaugcucgcgaaggcccugcgcaaggugccgaccgacaacuacaucacgaccuaccccgggcagggccugaacggguacaccgucgaggaggccaagaccgugcucaagaagugcaaguccgccuucuacauccugcccagcaucaucuccaacgagaagcaggagauccugggcaccgugagcuggaaccuccgggagaugcuggcgcacgccgaggagacgcgcaagcugaugcccgucugcguggagaccaaggccaucguguccaccauccagcggaaguacaagggcaucaagauccaggagggggucguggacuacggcgcccgcuucuacuucuacaccagcaagacgaccguggccucccugaucaacacccucaacgaccugaacgagacccuggucacgaugccgcucggguacgugacccacggccugaaccuggaggaggcggcccgguacaugcgcagccucaaggugcccgccaccgucuccgugagcucccccgacgccgugaccgccuacaacggguaccugacgagcuccagcaagacccccgaggagcacuucaucgagaccaucucccuggcgggcagcuacaaggacuggagcuacuccggccagagcacccagcucgggaucgaguuccugaagcggggcgacaaguccgucuacuacacgagcaacccgaccaccuuccaccuggacggggaggugaucaccuucgacaaccucaagacgcugcugucccuccgcgaggugcggaccaucaaggucuucaccaccguggacaacaucaaccugcacacgcagguggucgacaugagcaugaccuacggccagcaguucggccccaccuaccuggacggggccgacgugaccaagaucaagccccacaacucccacgagggcaagacguucuacgugcucccgaacgacgacacccugcgcgucgaggccuucgaguacuaccacaccaccgaccccagcuuccuggggcgguacauguccgcccucaaccacacgaagaaguggaaguacccccaggugaacggccugaccagcaucaagugggccgacaacaacugcuaccuggcgaccgcccuccugacccugcagcagaucgagcucaaguucaaccccccggcccugcaggacgccuacuaccgcgcgcgggccggggaggccgccaacuucugcgcccugauccucgcguacugcaacaagacggugggcgagcugggcgacguccgcgagaccauguccuaccuguuccagcacgccaaccucgacagcugcaagcgggugcugaacgucgugugcaagaccugcgggcagcagcagaccacccugaagggcguggaggccgucauguacauggggacgcucuccuacgagcaguucaagaagggcgugcagauccccugcaccugcgggaagcaggccaccaaguaccuggugcagcaggagagccccuucgucaugauguccgcccccccggcgcaguacgagcugaagcacggcaccuucacgugcgccagcgaguacaccggcaacuaccagugcgggcacuacaagcacaucaccuccaaggagacccucuacugcaucgacggcgcccugcugacgaagagcagcgaguacaaggggcccaucaccgacguguucuacaaggagaacuccuacaccaccacgaucaagcccgugaccuacaagcucgacggcgucgugugcaccgagaucgaccccaagcuggacaacuacuacaagaaggacaacagcuacuucaccgagcagccgaucgaccuggugcccaaccagcccuaccccaacgccuccuucgacaacuucaaguucgucugcgacaacaucaaguucgccgacgaccucaaccagcugacgggguacaagaagccggcgagccgcgagcugaaggugaccuucuuccccgaccucaacggcgacguggucgccaucgacuacaagcacuacacccccuccuucaagaagggcgccaagcugcugcacaagcccaucguguggcacgugaacaacgccaccaacaaggcgacguacaagccgaacaccuggugcauccggugccucuggagcaccaagcccgucgagacccccaacuccuucgacgugcugaagagcgaggacgcccaggggauggacaaccuggccugcgaggaccucaagcccguguccgaggaggucguggagaacccgacgauccagaaggacgugcuggagugcaacgucaagaccaccgagguggugggcgacaucauccugaagcccgccaacaacagccucaagaucaccgaggaggucgggcacacggaccugauggccgcguacguggacaacuccagccugaccaucaagaagcccaacgagcucucccgcgugcugggccugaagacccucgccacccacgggcuggccgccgucaacagcgugccgugggacacgaucgccaacuacgcgaagcccuuccugaacaagguggucuccaccaccaccaacaucgugacgcgcugccucaaccgggugugcaccaacuacaugcccuacuucuucacccugcugcuccagcugugcaccuucacccgcagcacgaacucccggaucaaggccagcaugcccaccaccaucgccaagaacaccgucaaguccgugggcaaguucugccuggaggccagcuucaacuaccucaagagcccgaacuucuccaagcugaucaacaucaucaucugguuccugcuccugagcgugugccugggcucccucaucuacagcacggccgcgcuggggguccugauguccaaccucggcaugcccagcuacugcaccggguaccgcgagggcuaccugaacuccaccaacgugaccaucgccacguacugcaccggcagcauccccugcuccgugugccugagcgggcucgacucccuggacaccuaccccagccuggagaccauccagaucacgaucuccagcuucaagugggaccucaccgccuucggccuggucgccgagugguuccuggccuacauccucuucacccgguucuucuacgugcuggggcuggcggccaucaugcagcucuucuucuccuacuucgccgugcacuucaucagcaacuccuggcugauguggcugaucaucaaccugguccagauggccccgaucagcgcgauggugcgcauguacaucuucuucgccuccuucuacuacguguggaagagcuacguccacgugguggacggcugcaacagcuccaccugcaugaugugcuacaagcggaaccgcgccacgcgggucgagugcaccaccaucgugaacgggguccgccggagcuucuacguguacgccaacggcggcaagggguucugcaagcuccacaacuggaacugcgugaacugcgacaccuucugcgccggcuccacguucaucagcgacgaggucgcgcgcgaccugucccugcaguucaagcggcccaucaaccccaccgaccagagcuccuacaucguggacagcgugaccgucaagaacggguccauccaccucuacuucgacaaggccggccagaagaccuacgagcgccacagccugucccacuucgugaaccuggacaaccuccgggccaacaacacgaaggggagccugcccaucaacgugaucgucuucgacggcaaguccaagugcgaggagagcuccgccaagagcgccuccguguacuacagccagcugaugugccagccgauccuccugcuggaccaggcgcucguguccgacgucggcgacagcgccgagguggccgugaagauguucgacgccuacgucaacaccuucagcuccaccuucaacgugcccauggagaagcugaagacccugguggccacggcggaggccgagcucgccaagaacgucagccuggacaacgugcuguccaccuucaucagcgccgcgcgccagggguucguggacuccgacgucgagaccaaggacgugguggagugccucaagcugagccaccaguccgacaucgaggucaccggcgacagcugcaacaacuacaugcugacguacaacaagguggagaacaugaucccccgggaccucggggccugcaucgacugcuccgcccgccacaucaacgcccagguggccaagagccacaacaucgcgcugaucuggaacgucaaggacuucaugucccugagcgagcagcuccggaagcagauccgcuccgccgccaagaagaacaaccugcccuucaagcugaccugcgccaccacccgccagguggugaacgucgugacgaccaagaucgcccucaagggcgggugaggacuaguuauaagacugacuagcccgaugggccucccaacgggcccuccuccccuccuugcaccgagauuaauaaaaaaaaaaaaaaaaaaaaaaaaaaaaaaaaaaaaaaaaaaaaaaaaaaaaaaaaaaaaaaaaugcaucccccccccccccccccccccccccccccccaaaggcucuuuucagagccaccagaauu

SEQ ID NO: 21582 - RNA, 6058 nt, Artificial Sequence
  SARS-CoV-2__MT821787.1__non-structural protein 3 (NSP3) mRNA gc
aggagaaagcuuaccauggcccccaccaaggugaccuucggcgacgacacggucaucgaggugcagggguacaagagcgugaacaucaccuucgagcuggacgagcgcaucgacaagguccucaacgagaagugcuccgccuacaccguggagcugggcaccgaggugaacgaguucgcgugcgucguggccgacgccgugaucaagacgcugcagccggucagcgagcuccugaccccccuggggaucgaccucgacgagugguccauggccaccuacuaccuguucgacgagagcggcgaguucaagcuggccucccacauguacugcagcuucuacccccccgacgaggacgaggaggagggggacugcgaggaggaggaguucgagccguccacccaguacgaguacggcacggaggacgacuaccagggcaagccccucgaguucggggcgaccagcgccgcccugcagcccgaggaggagcaggaggaggacuggcuggacgacgacucccagcagaccgugggccagcaggacgggagcgaggacaaccagaccacgaccauccagaccaucguggagguccagccccagcucgagauggagcugaccccgguggugcagacgaucgaggucaacuccuucagcggcuaccugaagcucaccgacaacguguacaucaagaacgccgacaucguggaggaggcgaagaaggucaagcccaccgugguggucaacgccgccaacguguaccugaagcacgggggcggcguggccggggcccugaacaaggcgaccaacaacgccaugcaggucgaguccgacgacuacaucgccacgaacggcccccucaagguggggggcagcugcguccuguccggccacaaccuggccaagcacugccuccacgugguggggcccaacgucaacaagggcgaggacauccagcugcugaagagcgccuacgagaacuucaaccagcacgaggugcuccuggcgccgcugcucuccgccgggaucuucggcgccgaccccauccacagccugcgggugugcgucgacaccgugcgcaccaacguguaccuggccgucuucgacaagaaccucuacgacaagcugguguccagcuuccuggagaugaagagcgagaagcagguggagcagaagaucgccgagauccccaaggaggaggucaagcccuucaucaccgaguccaagccgagcguggagcagcggaagcaggacgacaagaagaucaaggcgugcguggaggaggucacgaccacccucgaggagaccaaguuccugacggagaaccugcuccuguacaucgacaucaacgggaaccugcaccccgacuccgccacccucgugagcgacaucgacaucaccuuccugaagaaggacgcccccuacaucgugggcgacgucgugcaggagggcgugcugaccgccgucgugauccccacgaagaaggccgggggcaccaccgagaugcucgcgaaggcccugcgcaaggugccgaccgacaacuacaucacgaccuaccccgggcagggccugaacggguacaccgucgaggaggccaagaccgugcucaagaagugcaaguccgccuucuacauccugcccagcaucaucuccaacgagaagcaggagauccugggcaccgugagcuggaaccuccgggagaugcuggcgcacgccgaggagacgcgcaagcugaugcccgucugcguggagaccaaggccaucguguccaccauccagcggaaguacaagggcaucaagauccaggagggggucguggacuacggcgcccgcuucuacuucuacaccagcaagacgaccguggccucccugaucaacacccucaacgaccugaacgagacccuggucacgaugccgcucggguacgugacccacggccugaaccuggaggaggcggcccgguacaugcgcagccucaaggugcccgccaccgucuccgugagcucccccgacgccgugaccgccuacaacggguaccugacgagcuccagcaagacccccgaggagcacuucaucgagaccaucucccuggcgggcagcuacaaggacuggagcuacuccggccagagcacccagcucgggaucgaguuccugaagcggggcgacaaguccgucuacuacacgagcaacccgaccaccuuccaccuggacggggaggugaucaccuucgacaaccucaagacgcugcugucccuccgcgaggugcggaccaucaaggucuucaccaccguggacaacaucaaccugcacacgcagguggucgacaugagcaugaccuacggccagcaguucggccccaccuaccuggacggggccgacgugaccaagaucaagccccacaacucccacgagggcaagacguucuacgugcucccgaacgacgacacccugcgcgucgaggccuucgaguacuaccacaccaccgaccccagcuuccuggggcgguacauguccgcccucaaccacacgaagaaguggaaguacccccaggugaacggccugaccagcaucaagugggccgacaacaacugcuaccuggcgaccgcccuccugacccugcagcagaucgagcucaaguucaaccccccggcccugcaggacgccuacuaccgcgcgcgggccggggaggccgccaacuucugcgcccugauccucgcguacugcaacaagacggugggcgagcugggcgacguccgcgagaccauguccuaccuguuccagcacgccaaccucgacagcugcaagcgggugcugaacgucgugugcaagaccugcgggcagcagcagaccacccugaagggcguggaggccgucauguacauggggacgcucuccuacgagcaguucaagaagggcgugcagauccccugcaccugcgggaagcaggccaccaaguaccuggugcagcaggagagccccuucgucaugauguccgcccccccggcgcaguacgagcugaagcacggcaccuucacgugcgccagcgaguacaccggcaacuaccagugcgggcacuacaagcacaucaccuccaaggagacccucuacugcaucgacggcgcccugcugacgaagagcagcgaguacaaggggcccaucaccgacguguucuacaaggagaacuccuacaccaccacgaucaagcccgugaccuacaagcucgacggcgucgugugcaccgagaucgaccccaagcuggacaacuacuacaagaaggacaacagcuacuucaccgagcagccgaucgaccuggugcccaaccagcccuaccccaacgccaacuucgacaacuucaaguucgucugcgacaacaucaaguucgccgacgaccucaaccagcugacgggguacaagaagccggcgucccgcgagcugaaggugaccuucuuccccgaccucaacggcgacguggucgccaucgacuacaagcacuacacccccagcuucaagaagggcgccaagcugcugcacaagcccaucguguggcacgugaacaacgccaccaacaaggcgacguacaagccgaacaccuggugcauccggugccucugguccaccaagcccgucgagaccagcaacuccuucgacgugcugaagagcgaggacgcccaggggauggacaaccuggccugcgaggaccucaagcccguguccgaggaggucguggagaaccccacgauccagaaggacgugcuggagugcaacgucaagaccaccgagguggugggcgacaucauccugaagccggccaacaacagccucaagaucaccgaggaggucgggcacacggaccugauggccgcguacguggacaacuccagccugaccaucaagaagcccaacgagcucucccgcgugcugggccugaagacccucgccacccacgggcuggccgccgucaacagcgugcccugggacacgaucgccaacuacgcgaagccguuccugaacaagguggucuccaccaccaccaacaucgugacgcgcugccucaaccgggugugcaccaacuacaugcccuacuucuucacccugcugcuccagcugugcaccuucacccgcagcacgaacucccggaucaaggccagcaugcccaccaccaucgccaagaacaccgucaaguccgugggcaaguucugccuggaggccagcuucaacuaccucaagagccccaacuucuccaagcugaucaacaucaucaucugguuccugcuccugagcgugugccugggcucccucaucuacagcacggccgcgcuggggguccugauguccaaccucggcaugccgagcuacugcaccggguaccgcgagggcuaccugaacuccaccaacgugaccaucgccacguacugcaccggcagcauccccugcuccgugugccugagcgggcucgacucccuggacaccuaccccagccuggagaccauccagaucacgaucuccagcuucaagugggaccucaccgccuucggccuggucgccgagugguuccuggccuacauccucuucacccgguucuucuacgugcuggggcuggcggccaucaugcagcucuucuucuccuacuucgccgugcacuucaucagcaacuccuggcugauguggcugaucaucaaccugguccagauggcccccaucagcgcgauggugcgcauguacaucuucuucgccuccuucuacuacguguggaagagcuacguccacgugguggacggcugcaacagcuccaccugcaugaugugcuacaagcggaaccgcgccacgcgggucgagugcaccaccaucgugaacgggguccgccggagcuucuacguguacgccaacggcggcaagggguucugcaagcuccacaacuggaacugcgugaacugcgacaccuucugcgccggcuccacguucaucagcgacgaggucgcgcgcgaccugucccugcaguucaagcggccgaucaaccccaccgaccagagcuccuacaucguggacagcgugaccgucaagaacggguccauccaccucuacuucgacaaggccggccagaagaccuacgagcgccacagccugucccacuucgugaaccuggacaaccuccgggccaacaacacgaaggggagccugcccaucaacgugaucgucuucgacggcaaguccaagugcgaggagagcuccgccaagagcgccuccguguacuacagccagcugaugugccagcccauccuccugcuggaccaggcgcucguguccgacgucggcgacagcgccgagguggccgugaagauguucgacgccuacgucaacaccuucagcuccaccuucaacgugccgauggagaagcugaagacccugguggccacggcggaggccgagcucgccaagaacgucagccuggacaacgugcuguccaccuucaucagcgccgcgcgccagggguucguggacuccgacgucgagaccaaggacgugguggagugccucaagcugagccaccaguccgacaucgaggucaccggcgacagcugcaacaacuacaugcugacguacaacaagguggagaacaugaccccccgggaccucggggccugcaucgacugcuccgcccgccacaucaacgcccagguggccaagagccacaacaucgcgcugaucuggaacgucaaggacuucaugucccugagcgagcagcuccggaagcagauccgcuccgccgccaagaagaacaaccugcccuucaagcugaccugcgccaccacgcgccagguggugaacgucgugaccaccaagaucgcccucaagggcgggugaggacuaguuauaagacugacuagcccgaugggccucccaacgggcccuccuccccuccuugcaccgagauuaauaaaaaaaaaaaaaaaaaaaaaaaaaaaaaaaaaaaaaaaaaaaaaaaaaaaaaaaaaaaaaaaaugcaucccccccccccccccccccccccccccccccaaaggcucuuuucagagccaccagaauu

SEQ ID NO: 21583 - RNA, 6058 nt, Artificial Sequence
  SARS-CoV-2__MT810483.1__non-structural protein 3 (NSP3) mRNA gc
aggagaaagcuuaccauggcccccaccaaggugaccuucggcgacgacacggucaucgaggugcagggguacaagagcgugaacaucaccuucgagcuggacgagcgcaucgacaagguccucaacgagaagugcuccgccuacaccguggagcugggcaccgaggugaacgaguucgcgugcgucguggccgacgccgugaucaagacgcugcagccggucagcgagcuccugaccccccuggggaucgaccucgacgagugguccauggccaccuacuaccuguucgacgagagcggcgaguucaagcuggccucccacauguacugcagcuucuacccccccgacgaggacgaggaggagggggacugcgaggaggaggaguucgagccguccacccaguacgaguacggcacggaggacgacuaccagggcaagccccucgaguucggggcgaccagcgccgcccugcagcccgaggaggagcaggaggaggacuggcuggacgacgacucccagcagaccgugggccagcaggacgggagcgaggacaaccagaccacgaccauccagaccaucguggagguccagccccagcucgagauggagcugaccccgguggugcagacgaucgaggucaacuccuucagcggcuaccugaagcucaccgacaacguguacaucaagaacgccgacaucguggaggaggcgaagaaggucaagcccaccgugguggucaacgccgccaacguguaccugaagcacgggggcggcguggccggggcccugaacaaggcgaccaacaacgccaugcaggucgaguccgacgacuacaucgccacgaacggcccccucaagguggggggcagcugcguccuguccggccacaaccuggccaagcacugccuccacgugguggggcccaacgucaacaagggcgaggacauccagcugcugaagagcgccuacgagaacuucaaccagcacgaggugcuccuggcgccgcugcucuccgccgggaucuucggcgccgaccccauccacagccugcgggugugcgucgacaccgugcgcaccaacguguaccuggccgucuucgacaagaaccucuacgacaagcugguguccagcuuccuggagaugaagagcgagaagcagguggagcagaagaucgccgagauccccaaggaggaggucaagcccuucaucaccgaguccaagccgagcguggagcagcggaagcaggacgacaagaagaucaaggcgugcguggaggaggucacgaccacccucgaggagaccaaguuccugacggagaaccugcuccuguacaucgacaucaacgggaaccugcaccccgacuccgccacccucgugagcgacaucgacaucaccuuccugaagaaggacgcccccuacaucgugggcgacgucgugcaggagggcgugcugaccgccgucgugauccccacgaagaaggccgggggcaccaccgagaugcucgcgaaggcccugcgcaaggugccgaccgacaacuacaucacgaccuaccccgggcagggccugaacggguacaccgucgaggaggccaagaccgugcucaagaagugcaaguccgccuucuacauccugcccagcaucaucuccaacgagaagcaggagauccugggcaccgugagcuggaaccuccgggagaugcuggcgcacgccgaggagacgcgcaagcugaugcccgucugcguggagaccaaggccaucguguccaccauccagcggaaguacaagggcaucaagauccaggagggggucguggacuacggcgcccgcuucuacuucuacaccagcaagacgaccguggccucccugaucaacacccucaacgaccugaacgagacccuggucacgaugccgcucggguacgugacccacggccugaaccuggaggaggcggcccgguacaugcgcagccucaaggugcccgccaccgucuccgugagcucccccgacgccgugaccgccuacaacggguaccugacgagcuccagcaagacccccgaggagcacuucaucgagaccaucucccuggcgggcagcuacaaggacuggagcuacuccggccagagcacccagcucgggaucgaguuccugaagcggggcgacaaguccgucuacuacacgagcaacccgaccaccuuccaccuggacggggaggugaucaccuucgacaaccucaagacgcugcugucccuccgcgaggugcggaccaucaaggucuucaccaccguggacaacaucaaccugcacacgcagguggucgacaugagcaugaccuacggccagcaguucggccccaccuaccuggacggggccgacgugaccaagaucaagccccacaacucccacgagggcaagacguucuacgugcucccgaacgacgacacccugcgcgucgaggccuucgaguacuaccacaccaccgaccccagcuuccuggggcgguacauguccgcccucaaccacacgaagaaguggaaguacccccaggugaacggccugaccagcaucaagugggccgacaacaacugcuaccuggcgaccgcccuccugacccugcagcagaucgagcucaaguucaaccccccggcccugcaggacgccuacuaccgcgcgcgggccggggaggccgccaacuucugcgcccugauccucgcguacugcaacaagacggugggcgagcugggcgacguccgcgagaccauguccuaccuguuccagcacgccaaccucgacagcugcaagcgggugcugaacgucgugugcaagaccugcgggcagcagcagaccacccugaagggcguggaggccgucauguacauggggacgcucuccuacgagcaguucaagaagggcgugcagauccccugcaccugcgggaagcaggccaccaaguaccuggugcagcaggagagccccuucgucaugauguccgcccccccggcgcaguacgagcugaagcacggcaccuucacgugcgccagcguguacaccggcaacuaccagugcgggcacuacaagcacaucaccuccaaggagacccucuacugcaucgacggcgcccugcugacgaagagcagcgaguacaaggggcccaucaccgacguguucuacaaggagaacuccuacaccaccacgaucaagcccgucaccuacaagcucgacggcguggugugcaccgagaucgaccccaagcuggacaacuacuacaagaaggacaacagcuacuucaccgagcagccgaucgaccugguccccaaccagcccuaccccaacgccuccuucgacaacuucaaguucgugugcgacaacaucaaguucgccgacgaccucaaccagcugacgggguacaagaagccggcgagccgcgagcugaaggugaccuucuuccccgaccucaacggcgacgucguggccaucgacuacaagcacuacacccccuccuucaagaagggcgccaagcugcugcacaagcccaucguguggcacgucaacaacgccaccaacaaggcgacguacaagccgaacaccuggugcauccggugccucuggagcaccaagcccguggagaccuccaacagcuucgacgugcugaaguccgaggacgcccaggggauggacaaccuggccugcgaggaccucaagcccgucagcgaggaggugguggagaaccccacgauccagaaggacguccuggagugcaacgugaagaccaccgagguggucggcgacaucauccugaagccggccaacaacucccucaagaucaccgaggagguggggcacacggaccugauggccgcguacguggacaacagcucccugaccaucaagaagcccaacgagcucagccgcguccugggccugaagacccucgccacccacgggcuggccgccgugaacuccgugcccugggacacgaucgccaacuacgcgaagccguuccugaacaaggucgugagcaccaccaccaacaucgugacgcgcugccucaaccgggucugcaccaacuacaugcccuacuucuucacccugcugcuccagcugugcaccuucacccgcuccacgaacagccggaucaaggccuccaugcccaccaccaucgccaagaacaccgugaagagcgugggcaaguucugccuggaggccagcuucaacuaccucaagucccccaacuucagcaagcugaucaacaucaucaucugguuccugcuccuguccgucugccugggcagccucaucuacuccacggccgcgcugggggugcugaugagcaaccucggcaugccguccuacugcaccggguaccgcgagggcuaccugaacagcaccaacgugaccaucgccacguacugcaccggcuccauccccugcagcgucugccuguccgggcucgacagccuggacaccuaccccucccuggagaccauccagaucacgaucagcuccuucaagugggaccucaccgccuucggccugguggccgagugguuccuggccuacauccucuucacccgguucuucuacgugcuggggcuggcggccaucaugcagcucuucuucagcuacuucgccguccacuucaucuccaacagcuggcugauguggcugaucaucaaccuggugcagauggcccccaucuccgcgauggugcgcauguacaucuucuucgccagcuucuacuacgucuggaagagcuacgugcacguggucgacggcugcaacuccagcaccugcaugaugugcuacaagcggaaccgcgccacgcggguggagugcaccaccaucgucaacggggugcgccgguccuucuacguguacgccaacggcggcaagggguucugcaagcuccacaacuggaacugcgucaacugcgacaccuucugcgccggcagcacguucaucuccgacgagguggcgcgcgaccugagccugcaguucaagcggccgaucaaccccaccgaccaguccagcuacaucguggacuccgucaccgugaagaacgggagcauccaccucuacuucgacaaggccggccagaagaccuacgagcgccacucccugagccacuucgugaaccuggacaaccuccgggccaacaacacgaaggggucccugcccaucaacgucaucguguucgacggcaagagcaagugcgaggaguccagcgccaaguccgccagcguguacuacucccagcugaugugccagcccauccuccugcuggaccaggcgcucgucagcgacgugggcgacagcgccgagguggccgucaagauguucgacgccuacgugaacaccuucuccagcaccuucaacgugccgauggagaagcugaagacccuggucgccacggcggaggccgagcucgccaagaacgugucccuggacaacgugcugagcaccuucaucuccgccgcgcgccagggguucgucgacagcgacguggagaccaaggacguggucgagugccucaagcugucccaccagagcgacaucgaggugaccggcgacuccugcaacaacuacaugcugacguacaacaagguggagaacaugaccccccgggaccucggggccugcaucgacugcagcgcccgccacaucaacgcccaggucgccaagucccacaacaucgcgcugaucuggaacgugaaggacuucaugagccuguccgagcagcuccggaagcagauccgcagcgccgccaagaagaacaaccugcccuucaagcugaccugcgccaccacgcgccagguggucaacguggugaccaccaagaucgcccucaagggcgggugaggacuaguuauaagacugacuagcccgaugggccucccaacgggcccuccuccccuccuugcaccgagauuaauaaaaaaaaaaaaaaaaaaaaaaaaaaaaaaaaaaaaaaaaaaaaaaaaaaaaaaaaaaaaaaaaugcaucccccccccccccccccccccccccccccccaaaggcucuuuucagagccaccagaauu

SEQ ID NO: 21584 - RNA, 6058 nt, Artificial Sequence
  SARS-CoV-2__MT810493.1__non-structural protein 3 (NSP3) mRNA gc
aggagaaagcuuaccauggcccccaccaaggugaccuucggcgacgacacggucaucgaggugcagggguacaagagcgugaacaucaccuucgagcuggacgagcgcaucgacaagguccucaacgagaagugcuccgccuacaccguggagcugggcaccgaggugaacgaguucgcgugcgucguggccgacgccgugaucaagacgcugcagccggucagcgagcuccugaccccccuggggaucgaccucgacgagugguccauggccaccuacuaccuguucgacgagagcggcgaguucaagcuggccucccacauguacugcagcuucuacccccccgacgaggacgaggaggagggggacugcgaggaggaggaguucgagccguccacccaguacgaguacggcacggaggacgacuaccagggcaagccccucgaguucggggcgaccagcgccgcccugcagcccgaggaggagcaggaggaggacuggcuggacgacgacucccagcagaccgugggccagcaggacgggagcgaggacaaccagaccacgaccauccagaccaucguggagguccagccccagcucgagauggagcugaccccgguggugcagacgaucgaggucaacuccuucagcggcuaccugaagcucaccgacaacguguacaucaagaacgccgacaucguggaggaggcgaagaaggucaagcccaccgugguggucaacgccgccaacguguaccugaagcacgggggcggcguggccgggacccugaacaaggccacgaacaacgcgaugcaggucgaguccgacgacuacaucgccaccaacggcccccucaagguggggggcagcugcguccuguccggccacaaccuggccaagcacugccuccacgugguggggcccaacgucaacaagggcgaggacauccagcugcugaagagcgccuacgagaacuucaaccagcacgaggugcuccuggccccgcugcucuccgcggggaucuucggcgccgaccccauccacagccugcgggugugcgucgacaccgugcgcaccaacguguaccuggccgucuucgacaagaaccucuacgacaagcugguguccagcuuccuggagaugaagagcgagaagcagguggagcagaagaucgccgagauccccaaggaggaggucaagcccuucaucacggaguccaagccgagcguggagcagcggaagcaggacgacaagaagaucaaggccugcguggaggaggucaccaccacccucgaggagacgaaguuccugaccgagaaccugcuccuguacaucgacaucaacgggaaccugcaccccgacuccgcgacccucgugagcgacaucgacaucaccuuccugaagaaggacgcccccuacaucgugggcgacgucgugcaggagggcgugcugacggccgucgugauccccaccaagaaggccgggggcaccaccgagaugcucgccaaggcgcugcgcaaggugccgacggacaacuacaucaccaccuaccccgggcagggccugaacggguacaccgucgaggaggccaagaccgugcucaagaagugcaaguccgccuucuacauccugcccagcaucaucuccaacgagaagcaggagauccugggcacggugagcuggaaccuccgggagaugcuggcccacgcggaggagacccgcaagcugaugcccgucugcguggagaccaaggccaucguguccaccauccagcggaaguacaagggcaucaagauccaggagggggucguggacuacggcgcccgcuucuacuucuacacgagcaagaccaccguggccucccugaucaacacccucaacgaccugaacgagacgcuggucaccaugccgcucggguacgugacccacggccugaaccuggaggaggccgcgcgguacaugcgcagccucaaggugcccgccaccgucuccgugagcucccccgacgccgugacggccuacaacggguaccugaccagcuccagcaagacccccgaggagcacuucaucgagaccaucucccuggccggcagcuacaaggacuggagcuacuccggccagagcacgcagcucgggaucgaguuccugaagcggggcgacaaguccgucuacuacaccagcaacccgaccaccuuccaccuggacggggaggugaucacguucgacaaccucaagacccugcugucccuccgcgaggugcggaccaucaaggucuucaccacgguggacaacaucaaccugcacacccagguggucgacaugagcaugaccuacggccagcaguucggccccaccuaccuggacggggcggacgugacgaagaucaagccccacaacucccacgagggcaagaccuucuacgugcucccgaacgacgacacccugcgcgucgaggccuucgaguacuaccacaccacggaccccagcuuccuggggcgguacauguccgcccucaaccacaccaagaaguggaaguacccccaggugaacggccugaccagcaucaagugggccgacaacaacugcuaccuggccaccgcgcuccugacgcugcagcagaucgagcucaaguucaaccccccggcccugcaggacgccuacuaccgcgcccgggcgggggaggccgccaacuucugcgcccugauccucgccuacugcaacaagaccgugggcgagcugggcgacguccgcgagaccauguccuaccuguuccagcacgcgaaccucgacagcugcaagcgggugcugaacgucgugugcaagaccugcgggcagcagcagaccacgcugaagggcguggaggccgucauguacauggggacccucuccuacgagcaguucaagaagggcgugcagauccccugcaccugcgggaagcaggccaccaaguaccuggugcagcaggagagccccuucgucaugauguccgcccccccggcccaguacgagcugaagcacggcacguucaccugcgcgagcgaguacaccggcaacuaccagugcgggcacuacaagcacaucaccuccaaggagacgcucuacugcaucgacggcgcccugcugaccaagagcagcgaguacaaggggcccaucaccgacguguucuacaaggagaacuccuacaccacgaccaucaagcccgugaccuacaagcucgacggcgucgugugcaccgagaucgaccccaagcuggacaacuacuacaagaaggacaacagcuacuucacggagcagccgaucgaccuggugcccaaccagcccuaccccaacgccuccuucgacaacuucaaguucgucugcgacaacaucaaguucgccgacgaccucaaccagcugaccggguacaagaagccggccagccgcgagcugaaggugaccuucuuccccgaccucaacggcgacguggucgcgaucgacuacaagcacuacacccccuccuucaagaagggcgccaagcugcugcacaagcccaucguguggcacgugaacaacgccacgaacaaggccaccuacaagccgaacaccuggugcauccggugccucuggagcaccaagcccgucgagacguccaacagcuucggggugcugaaguccgaggacgcgcagggcauggacaaccuggccugcgaggaccucaagcccgugagcgaggaggucguggagaaccccaccauccagaaggacgugcuggagugcaacgucaagaccaccgagguggugggggacaucauccugaagccggccaacaacucccucaagaucacggaggaggucggccacaccgaccugauggccgccuacguggacaacagcucccugaccaucaagaagcccaacgagcucagccgcgugcuggggcugaagacccucgcgacgcacggccuggccgccgucaacuccgugcccugggacaccaucgccaacuacgccaagccguuccugaacaagguggucagcaccaccacgaacaucgugacccgcugccucaaccgggugugcaccaacuacaugcccuacuucuucacccugcugcuccagcugugcaccuucacgcgcuccaccaacagccggaucaaggcguccaugcccaccaccaucgccaagaacacggucaagagcgugggcaaguucugccuggaggccagcuucaacuaccucaagucccccaacuucagcaagcugaucaacaucaucaucugguuccugcuccuguccgugugccuggggagccucaucuacuccaccgccgcccugggcguccugaugagcaaccucgggaugccguccuacugcaccggcuaccgcgagggcuaccugaacagcaccaacgugacgaucgcgaccuacugcaccggguccauccccugcagcgugugccuguccggccucgacagccuggacaccuaccccucccuggagacgauccagaucaccaucagcuccuucaagugggaccucaccgccuucgggcuggucgccgagugguuccuggccuacauccucuucacccgguucuucuacgugcugggccuggccgcgaucaugcagcucuucuucagcuacuucgccgugcacuucaucuccaacagcuggcugauguggcugaucaucaaccugguccagauggcccccaucuccgccauggugcgcauguacaucuucuucgcgagcuucuacuacguguggaagagcuacguccacgugguggacgggugcaacuccagcacgugcaugaugugcuacaagcggaaccgcgccacccgggucgagugcaccaccaucgugaacggcguccgccgguccuucuacguguacgccaacggcgggaagggcuucugcaagcuccacaacuggaacugcgugaacugcgacacguucugcgccgggagcaccuucaucuccgacgaggucgcccgcgaccugagccugcaguucaagcggccgaucaaccccaccgaccaguccagcuacaucguggacuccgugaccgucaagaacggcagcauccaccucuacuucgacaaggcggggcagaagacguacgagcgccacucccugagccacuucgugaaccuggacaaccuccgggccaacaacaccaagggcucccugcccaucaacgugaucgucuucgacggcaagagcaagugcgaggaguccagcgccaaguccgccagcguguacuacucccagcugaugugccagcccauccuccugcuggaccaggcccucgugagcgacgucggggacagcgcggagguggccgugaagauguucgacgccuacgucaacaccuucuccagcaccuucaacgugccgauggagaagcugaagacgcugguggccaccgccgaggcggagcucgccaagaacgucucccuggacaacgugcugagcaccuucaucuccgccgcccgccagggcuucguggacagcgacgucgagaccaaggacgugguggagugccucaagcugucccaccagagcgacaucgaggucacgggggacuccugcaacaacuacaugcugaccuacaacaagguggagaacaugaccccccgggaccucggcgcgugcaucgacugcagcgcccgccacaucaacgcccagguggccaagucccacaacaucgcccugaucuggaacgucaaggacuucaugagccuguccgagcagcuccggaagcagauccgcagcgcggccaagaagaacaaccugcccuucaagcugaccugcgccacgacccgccagguggugaacgucgugaccaccaagaucgcccucaaggggggcugaggacuaguuauaagacugacuagcccgaugggccucccaacgggcccuccuccccuccuugcaccgagauuaauaaaaaaaaaaaaaaaaaaaaaaaaaaaaaaaaaaaaaaaaaaaaaaaaaaaaaaaaaaaaaaaaugcaucccccccccccccccccccccccccccccccaaaggcucuuuucagagccaccagaauu

SEQ ID NO: 21585 - RNA, 6058 nt, Artificial Sequence
  SARS-CoV-2__MT810511.1__non-structural protein 3 (NSP3) mRNA gc
aggagaaagcuuaccauggcccccaccaaggugaccuucggcgacgacacggucaucgaggugcagggguacaagagcgugaacaucaccuucgagcuggacgagcgcaucgacaagguccucaacgagaagugcuccgccuacaccguggagcugggcaccgaggugaacgaguucgcgugcgucguggccgacgccgugaucaagacgcugcagccggucagcgagcuccugaccccccuggggaucgaccucgacgagugguccauggccaccuacuaccuguucgacgagagcggcgaguucaagcuggccucccacauguacugcagcuucuacccccccgacgaggacgaggaggagggggacugcgaggaggaggaguucgagccguccacccaguacgaguacggcacggaggacgacuaccagggcaagccccucgaguucggggcgaccagcgccgcccugcagcccgaggaggagcaggaggaggacuggcuggacgacgacucccagcagaccgugggccagcaggacgggagcgaggacaaccagaccacgaccauccagaccaucguggagguccagccccagcucgagauggagcugaccccgguggugcagacgaucgaggucaacuccuucagcggcuaccugaagcucaccgacaacguguacaucaagaacgccgacaucguggaggaggcgaagaaggucaagcccaccgugguggucaacgccgccaacguguaccugaagcacgggggcggcguggccggggcccugaacaaggcgaccaacaacgccaugcaggucgaguccgacgacuacaucgccacgaacggcccccucaagguggggggcagcugcguccuguccggccacaaccuggccaagcacugccuccacgugguggggcccaacgucaacaagggcgaggacauccagcugcugaagagcgccuacgagaacuucaaccagcacgaggugcuccuggcgccgcugcucuccgccgggaucuucggcgccgaccccauccacagccugcgggugugcgucgacaccgugcgcaccaacguguaccuggccgucuucgacaagaaccucuacgacaagcugguguccagcuuccuggagaugaagagcgagaagcagguggagcagaagaucgccgagauccccaaggaggaggucaagcccuucaucaccgaguccaagccgagcguggagcagcggaagcaggacgacaagaagaucaaggcgugcguggaggaggucacgaccacccucgaggagaccaaguuccugacggagaaccugcuccuguacaucgacaucaacgggaaccugcaccccgacuccgccacccucgugagcgacaucgacaucaccuuccugaagaaggacgcccccuacaucgugggcgacgucgugcaggagggcgugcugaccgccgucgugauccccacgaagaaggccgggggcaccaccgagaugcucgcgaaggcccugcgcaaggugccgaccgacaacuacaucacgaccuaccccgggcagggccugaacggguacaccgucgaggaggccaagaccgugcucaagaagugcaaguccgccuucuacauccugcccagcaucaucuccaacgagaagcaggagauccugggcaccgugagcuggaaccuccgggagaugcuggcgcacgccgaggagacgcgcaagcugaugcccgucugcguggagaccaaggccaucguguccaccauccagcggaaguacaagggcaucaagauccaggagggggucguggacuacggcgcccgcuucuacuucuacaccagcaagacgaccguggccucccugaucaacacccucaacgaccugaacgagacccuggucacgaugccgcucggguacgugacccacggccugaaccuggaggaggcggcccgguacaugcgcagccucaaggugcccgccaccgucuccgugagcucccccgacgccgugaccgccuacaacggguaccugacgagcuccagcaagacccccgaggagcacuucaucgagaccaucucccuggcgggcagcuacaaggacuggagcuacuccggccagagcacccagcucgggaucgaguuccugaagcggggcgacaaguccgucuacuacacgagcaacccgaccaccuuccaccuguacggggaggugaucaccuucgacaaccucaagacgcugcugucccuccgcgaggugcggaccaucaaggucuucaccaccguggacaacaucaaccugcacacgcagguggucgacaugagcaugaccuacggccagcaguucggccccaccuaccuggacggggccgacgugaccaagaucaagccccacaacucccacgagggcaagacguucuacgugcucccgaacgacgacacccugcgcgucgaggccuucgaguacuaccacaccaccgaccccagcuuccuggggcgguacaucuccgcccucaaccacacgaagaaguggaaguacccccaggugaacggccugaccagcaucaagugggccgacaacaacugcuaccuggcgaccgcccuccugacccugcagcagaucgagcucaaguucaaccccccggcccugcaggacgccuacuaccgcgcgcgggccggggaggccgccaacuucugcgcccugauccucgcguacugcaacaagacggugggcgagcugggcgacguccgcgagaccauguccuaccuguuccagcacgccaaccucgacagcugcaagcgggugcugaacgucgugugcaagaccugcgggcagcagcagaccacccugaagggcguggaggccgucauguacauggggacgcucuccuacgagcaguucaagaagggcgugcagauccccugcaccugcgggaagcaggccaccaaguaccuggugcagcaggagagccccuucgucaugauguccgcccccccggcgcaguacgagcugaagcacggcaccuucacgugcgccagcgaguacaccggcaacuaccagugcgggcacuacaagcacaucaccuccaaggagacccucuacugcaucgacggcgcccugcugacgaagagcagcgaguacaaggggcccaucaccgacguguucuacaaggagaacuccuacaccaccacgaucaagcccgugaccuacaagcucgacggcgucgugugcaccgagaucgaccccaagcuggacaacuacuacaagaaggacaacagcuacuucaccgagcagccgaucgaccuggugcccaaccagcccuaccccaacgccuccuucgacaacuucaaguucgucugcgacaacaucaaguucgccgacgaccucaaccagcugacgggguacaagaagccggcgagccgcgagcugaaggugaccuucuuccccgaccucaacggcgacguggucgccaucgacuacaagcacuacacccccuccuucaagaagggcgccaagcugcugcacaagcccaucguguggcacgugaacaacgccaccaacaaggcgacguacaagccgaacaccuggugcauccggugccucuggagcaccaagcccgucgagaccuccaacagcuucgacgugcugaaguccgaggacgcccaggggauggacaaccuggccugcgaggaccucaagcccgugagcgaggaggucguggagaaccccacgauccagaaggacgugcuggagugcaacgucaagaccaccgagguggugggcgacaucauccugaagccggccaacaacucccucaagaucaccgaggaggucgggcacacggaccugauggccgcguacguggacaacagcucccugaccaucaagaagcccaacgagcucagccgcgugcugggccugaagacccucgccacccacgggcuggccgccgucaacuccgugcccugggacacgaucgccaacuacgcgaagccguuccugaacaagguggucagcaccaccaccaacaucgugacgcgcugccucaaccgggugugcaccaacuacaugcccuacuucuucacccugcugcuccagcugugcaccuucacccgcuccacgaacagccggaucaaggccuccaugcccaccaccaucgccaagaacaccgucaagagcgugggcaaguucugccuggaggccagcuucaacuaccucaagucccccaacuucagcaagcugaucaacaucaucaucugguuccugcuccuguccgugugccugggcagccucaucuacuccacggccgcgcuggggguccugaugagcaaccucggcaugccguccuacugcaccggguaccgcgagggcuaccugaacagcaccaacgugaccaucgccacguacugcaccggcuccauccccugcagcgugugccuguccgggcucgacagccuggacaccuaccccucccuggagaccauccagaucacgaucagcuccuucaagugggaccucaccgccuucggccuggucgccgagugguuccuggccuacauccucuucacccgguucuucuacgugcuggggcuggcggccaucaugcagcucuucuucagcuacuucgccgugcacuucaucuccaacagcuggcugauguggcugaucaucaaccugguccagauggcccccaucuccgcgauggugcgcauguacaucuucuucgccagcuucuacuacguguggaagagcuacguccacgugguggacggcugcaacuccagcaccugcaugaugugcuacaagcggaaccgcgccacgcgggucgagugcaccaccaucgugaacgggguccgccgguccuucuacguguacgccaacggcggcaagggguucugcaagcuccacaacuggaacugcgugaacugcgacaccuucugcgccggcagcacguucaucuccgacgaggucgcgcgcgaccugagccugcaguucaagcggccgaucaaccccaccgaccaguccagcuacaucguggacuccgugaccgucaagaacgggagcauccaccucuacuucgacaaggccggccagaagaccuacgagcgccacucccugagccacuucgugaaccuggacaaccuccgggccaacaacacgaaggggucccugcccaucaacgugaucgucuucgacggcaagagcaagugcgaggaguccagcgccaaguccgccagcguguacuacucccagcugaugugccagcccauccuccugcuggaccaggcgcucgugagcgacgucggcgacagcgccgagguggccgugaagauguucgacgccuacgucaacaccuucuccagcaccuucaacgugccgauggagaagcugaagacccugguggccacggcggaggccgagcucgccaagaacgucucccuggacaacgugcugagcaccuucaucuccgccgcgcgccagggguucguggacagcgacgucgagaccaaggacgugguggagugccucaagcugucccaccagagcgacaucgaggucaccggcgacuccugcaacaacuacaugcugacguacaacaagguggagaacaugaccccccgggaccucggggccugcaucgacugcagcgcccgccacaucaacgcccagguggccaagucccacaacaucgcgcugaucuggaacgucaaggacuucaugagccuguccgagcagcuccggaagcagauccgcagcgccgccaagaagaacaaccugcccuucaagcugaccugcgccaccacgcgccagguggugaacgucgugaccaccaagaucgcccucaagggcgggugaggacuaguuauaagacugacuagcccgaugggccucccaacgggcccuccuccccuccuugcaccgagauuaauaaaaaaaaaaaaaaaaaaaaaaaaaaaaaaaaaaaaaaaaaaaaaaaaaaaaaaaaaaaaaaaaugcaucccccccccccccccccccccccccccccccaaaggcucuuuucagagccaccagaauu

SEQ ID NO: 21586 - RNA, 6058 nt, Artificial Sequence
  SARS-CoV-2__MT810529.1__non-structural protein 3 (NSP3) mRNA gc
aggagaaagcuuaccauggcccccaccaaggugaccuucggcgacgacacggucaucgaggugcagggguacaagagcgugaacaucaccuucgagcuggacgagcgcaucgacaagguccucaacgagaagugcuccgccuacaccguggagcugggcaccgaggugaacgaguucgcgugcgucguggccgacgccgugaucaagacgcugcagccggucagcgagcuccugaccccccuggggaucgaccucgacgagugguccauggccaccuacuaccuguucgacgagagcggcgaguucaagcuggccucccacauguacugcagcuucuacccccccgacgaggacgaggaggagggggacugcgaggaggaggaguucgagccguccacccaguacgaguacggcacggaggacgacuaccagggcaagccccucgaguucggggcgaccagcgccgcccugcagcccgaggaggagcaggaggaggacuggcuggacgacgacucccagcagaccgugggccagcaggacgggagcgaggacaaccagaccacgaccauccagaccaucguggagguccagccccagcucgagauggagcugaccccgguggugcagacgaucgaggucaacuccuucagcggcuaccugaagcucaccgacaacguguacaucaagaacgccgacaucguggaggaggcgaagaaggucaagcccaccgugguggucaacgccgccaacguguaccugaagcacgggggcggcguggccggggcccugaacaaggcgaccaacaacgccaugcaggucgaguccgacgacuacaucgccacgaacggcccccucaagguggggggcagcugcguccuguccggccacaaccuggccaagcacugccuccacgugguggggcccaacgucaacaagggcgaggacauccagcugcugaagagcgccuacgagaacuucaaccagcacgaggugcuccuggcgccgcugcucuccgccgggaucuucggcgccgaccccauccacagccugcgggugugcgucgacaccgugcgcaccaacguguaccuggccgucuucgacaagaaccucuacgacaagcugguguccagcuuccuggagaugaagagcgagaagcagguggagcagaagaucgccgagauccccaaggaggaggucaagcccuucaucaccgaguccaagccgagcguggagcagcggaagcaggacgacaagaagaucaaggcgugcguggaggaggucacgaccacccucgaggagaccaaguuccugacggagaaccugcuccuguacaucgacaucaacgggaaccugcaccccgacuccgccacccucgugagcgacaucgacaucaccuuccugaagaaggacgcccccuacaucgugggcgacgucgugcaggagggcgugcugaccgccgucgugauccccacgaagaaggccgggggcaccaccgagaugcucgcgaaggcccugcgcaaggugccgaccgacaacuacaucacgaccuaccccgggcagggccugaacggguacaccgucgaggaggccaagaccgugcucaagaagugcaaguccgccuucuacauccugcccagcaucaucuccaacgagaagcaggagauccugggcaccgugagcuggaaccuccgggagaugcuggcgcacgccgaggagacgcgcaagcugaugcccgucugcguggagaccaaggccaucguguccaccauccagcggaaguacaagggcaucaagauccaggagggggucguggacuacggcgcccgcuucuacuucuacaccagcaagacgaccguggccucccugaucaacacccucaacgaccugaacgagacccuggucacgaugccgcucggguacgugacccacggccugaaccuggaggaggcggcccgguacaugcgcagccucaaggugcccgccaccgucuccgugagcucccccgacgccgugaccgccuacaacggguaccugacgagcuccagcaagacccccgaggagcacuucaucgagaccaucucccuggcgggcagcuacaaggacuggagcuacuccggccagagcacccagcucgggaucgaguuccugaagcggggcgacaaguccgucuacuacacgagcaacccgaccaccuuccaccuggacggggaggugaucaccuucgacaaccucaagacgcugcugucccuccgcgaggugcggaccaucaaggucuucaccaccguggacaacaucaaccugcacacgcagguggucgacaugagcaugaccuacggccagcaguucggccccaccuaccuggacggggccgacgugaccaagaucaagccccacaacucccacgagggcaagacguucuacgugcucccgaacgacgacacccugcgcgucgaggccuucgaguacuaccacaccaccgaccccagcuuccuggggcgguacauguccgcccucaaccacacgaagaaguggaaguacccccaggugaacggccugaccagcaucaagugggccgacaacaacugcuaccuggcgaccgcccuccugacccugcagcagaucgagcucaaguucaaccccccggcccugcaggacgccuacuaccgcgcgcgggccggggaggccgccaacuucugcgcccugauccucgcguacugcaacaagacggugggcgagcugggcgacguccgcgagaccauguccuaccuguuccagcacgccaaccucgacagcugcaagcgggugcugaacgucgugugcaagaccugcgggcagcagcagaccacccugaagggcguggaggccgucauguacauggggacgcucuccuacgagcaguucaagaagggcgugcagauccccugcaccugcgggaagcaggccaccaaguaccuggugcagcaggagagccccuucgucaugauguccgcccccccggcgcaguacgagcugaagcacggcaccuucacgugcgccagcgaguacaccggcaacuaccagugcgggcacuacaagcacaucaccuccaaggagacccucuacugcaucgacggcgcccugcugacgaagagcagcgaguacaaggggcccaucaccgacguguucuacaaggagaacuccuacaccaccacgaucaagcccgugaccuacaagcucgacggcgucgugugcaccgagaucgaccccaagcuggacaacuacuacaagaaggacaacagcuacuucaccgagcagccgaucgaccuggugcccaaccagcccuaccccaacgccuccuucgacaacuucaaguucgucugcgacaacaucaaguucgccgacgaccucaaccagcugacgggguacaagaagccggcgagccgcgagcugaaggugaccuucuuccccgaccucaacggcgacguggucgccaucgacuacaagcacuacacccccuccuucaagaagggcgccaagcugcugcacaagcccaucguguggcacgugaacaacgccaccaacaaggcgacguacaagccgaacaccuggugcauccggugccucuggagcaccaagcccgucgagaccuccaacagcuucgacgugcugaaguccgaggacgcccaggggauggacaaccuggccugcgaggaccucaagcccgugagcgaggaggucguggagaaccccacgauccagaaggacgugcuggagugcaacgucaagaccaccgagguggugggcgacaucauccugaagccggccaacaacucccucaagaucaccgaggaggucgggcacacggaccugauggccgcguacguggacaacagcucccugaccaucaagaagcccaacgagcucagccgcgugcugggccugaagacccucgccacccacgggcuggccgccgucaacuccgugcccugggacacgaucgccaacuacgcgaagccguuccugaacaagguggucagcaccaccaccaacaucgugacgcgcugccucaaccgggugugcaccaacuacaugcccuacuucuucacccugcugcuccagcugugcaccuucacccgcuccacgaacagccggaucaaggccuccaugcccaccaccaucgccaagaacaccgucaagagcgugggcaaguucugccuggaggccagcuucaacuaccucaagucccccaacuucagcaagcugaucaacaucaucaucugguuccugcuccuguccgugugccugggcagccucaucuacuccacggccgcgcuggggguccugaugagcaaccucggcaugccguccuacugcaccggguaccgcgagggcuaccugaacagcaccaacgugaccaucgccacguacugcaccggcuccauccccugcagcgugugccuguccgggcucgacagccuggacaccuaccccucccuggagaccauccagaucacgaucagcuccuucaagugggaccucaccgccuucggccuggucgccgagugguuccuggccuacauccucuucacccgguucuucuacgugcuggggcuggcggccaucaugcagcucuucuucagcuacuucgccgugcacuucaucuccaacagcuggcugauguggcugaucaucaaccugguccagauggcccccaucuccgcgauggugcgcauguacaucuucuucgccagcuucuacuacguguggaagagcuacguccacgugguggacggcugcaacuccagcaccugcaugaugugcuacaagcggaaccgcgccacgcgggucgagugcaccaccaucgugaacgggguccgccgguccuucuacguguacgccaacggcggcaagggguucugcaagcuccacaacuggaacugcgugaacugcgacaccuucugcgccggcagcacguucaucuccgacgaggucgcgcgcgaccugagccugcaguucaagcggccgaucaaccccaccgaccaguccagcuacaucguggacuccgugaccgucaagaacgggagcauccaccucuacuucgacaaggccggccagaagaccuacgagcgccacucccugagccacuucgugaaccuggacaaccuccgggccaacaacacgaaggggucccugcccaucaacgugaucgucuucgacggcaagagcaagugcgaggaguccagcgccaagcuggccuccguguacuacagccagcucaugugccagcccauccugcugcucgaccaggcgcugguguccgacgucggcgacagcgccgagguggccgugaagauguucgacgccuacgucaacaccuucagcuccaccuucaacgugccgauggagaagcugaagacccucguggccacggcggaggccgagcuggccaagaacgucagccuggacaacgugcucuccaccuucaucagcgccgcgcgccagggguucguggacuccgacgucgagaccaaggacgugguggagugccugaagcugagccaccaguccgacaucgaggucaccggcgacagcugcaacaacuacaugcucacguacaacaagguggagaacaugaccccccgggaccugggggccugcaucgacugcuccgcccgccacaucaacgcccagguggccaagagccacaacaucgcgcugaucuggaacgucaaggacuucaugucccucagcgagcagcugcggaagcagauccgcuccgccgccaagaagaacaaccugcccuucaagcucaccugcgccaccacgcgccagguggugaacgucgugaccaccaagaucgcccugaagggcgggugaggacuaguuauaagacugacuagcccgaugggccucccaacgggcccuccuccccuccuugcaccgagauuaauaaaaaaaaaaaaaaaaaaaaaaaaaaaaaaaaaaaaaaaaaaaaaaaaaaaaaaaaaaaaaaaaugcaucccccccccccccccccccccccccccccccaaaggcucuuuucagagccaccagaauu

SEQ ID NO: 21587 - RNA, 6058 nt, Artificial Sequence
  SARS-CoV-2__MT810532.1__non-structural protein 3 (NSP3) mRNA gc
aggagaaagcuuaccauggcccccaccaaggugaccuucggcgacgacacggucaucgaggugcagggguacaagagcgugaacaucaccuucgagcuggacgagcgcaucgacaagguccucaacgagaagugcuccgccuacaccguggagcugggcaccgaggugaacgaguucgcgugcgucguggccgacgccgugaucaagacgcugcagccggucagcgagcuccugaccccccuggggaucgaccucgacgagugguccauggccaccuacuaccuguucgacgagagcggcgaguucaagcuggccucccacauguacugcagcuucuacccccccgacgaggacgaggaggagggggacugcgaggaggaggaguucgagccguccacccaguacgaguacggcacggaggacgacuaccagggcaagccccucgaguucggggcgaccagcgccgcccugcagcccgaggaggagcaggaggaggacuggcuggacgacgacucccagcagaccgugggccagcaggacgggagcgaggacaaccagaccacgaccauccagaccaucguggagguccagccccagcucgagauggagcugaccccgguggugcagacgaucgaggucaacuccuucagcggcuaccugaagcucaccgacaacguguacaucaagaacgccgacaucguggaggaggcgaagaaggucaagcccaccgugguggucaacgccgccaacguguaccugaagcacgggggcggcguggccggggcccugaacaaggcgaccaacaacgccaugcaggucgaguccgacgacuacaucgccacgaacggcccccucaagguggggggcagcugcguccuguccggccacaaccuggccaagcacugccuccacgugguggggcccaacgucaacaagggcgaggacauccagcugcugaagagcgccuacgagaacuucaaccagcacgaggugcuccuggcgccgcugcucuccgccgggaucuucggcgccgaccccauccacagccugcgggugugcgucgacaccgugcgcaccaacguguaccuggccgucuucgacaagaaccucuacgacaagcugguguccagcuuccuggagaugaagagcgagaagcagguggagcagaagaucgccgagauccccaaggaggaggucaagcccuucaucaccgaguccaagccgagcguggagcagcggaagcaggacgacaagaagaucaaggcgugcguggaggaggucacgaccacccucgaggagaccaaguuccugacggagaaccugcuccuguacaucgacaucaacgggaaccugcaccccgacuccgccacccucgugagcgacaucgacaucaccuuccugaagaaggacgcccccuacaucgugggcgacgucgugcaggagggcgugcugaccgccgucgugauccccacgaagaaggccgggggcaccaccgagaugcucgcgaaggcccugcgcaaggugccgaccgacaacuacaucacgaccuaccccgggcagggccugaacggguacaccgucgaggaggccaagaccgugcucaagaagugcaaguccgccuucuacauccugcccagcaucaucuccaacgagaagcaggagauccugggcaccgugagcuggaaccuccgggagaugcuggcgcacgccgaggagacgcgcaagcugaugcccgucugcguggagaccaaggccaucguguccaccauccagcggaaguacaagggcaucaagauccaggagggggucguggacuacggcgcccgcuucuacuucuacaccagcaagacgaccguggccucccugaucaacacccucaacgaccugaacgagacccuggucacgaugccgcucggguacgugacccacggccugaaccuggaggaggcggcccgguacaugcgcagccucaaggugcccgccaccgucuccgugagcucccccgacgccgugaccgccuacaacggguaccugacgagcuccagcaagacccccgaggagcacuucaucgagaccaucucccuggcgggcagcuacaaggacuggagcuacuccggccagagcacccagcucgggaucgaguuccugaagcggggcgacaaguccgucuacuacacgagcaacccgaccaccuuccaccuggacggggaggugaucaccuucgacaaccucaagacgcugcugucccuccgcgaggugcggaccaucaaggucuucaccaccguggacaacaucaaccugcacacgcagguggucgacaugagcaugaccuacggccagcaguucggccccaccuaccuggacggggccgacgugaccaagaucaagccccacaacucccacgagggcaagacguucuacgugcucccgaacgacgacacccugcgcgucgaggccuucgaguacuaccacaccaccgaccccagcuuccuggggcgguacauguccgcccucaaccacacgaagaaguggaaguacccccaggugaacggccugaccagcaucaagugggccgacaacaacugcuaccuggcgaccgcccuccugacccugcagcagaucgagcucaaguucaaccccccggcccugcaggacgccuacuaccgcgcgcgggccggggaggccgccaacuucugcgcccugauccucgcguacugcaacaagacggugggcgagcugggcgacguccgcgagaccauguccuaccuguuccagcacgccaaccucgacagcugcaagcgggugcugaacgucgugugcaagaccugcgggcagcagcagaccacccugaagggcguggaggccgucauguacauggggacgcucuccuacgagcaguucaagaagggcgugcagauccccugcaccugcgggaagcaggccaccaaguaccuggugcagcaggagagccccuucgucaugauguccgcccccccggcgcaguacgagcugaagcacggcaccuucacgugcgccagcgaguacaccggcaacuaccagugcgggcacuacaagcacaucaccuccaaggagacccucuacugcaucgacggcgcccugcugacgaagagcagcgaguacaaggggcccaucaccgacguguucuacaaggagaacuccuacaccaccacgaucaagcccgugaccuacaagcucgacggcgucgugugcaccgagaucgaccccaagcuggacaacuacuacaagaaggacaacagcuacuucaccgagcagccgaucgaccuggugcccaaccagcccuaccccaacgccuccuucgacaacuucaaguucgucugcgacaacaucaaguucgccgacgaccucaaccagcugacgggguacaagaagccggcgagccgcgagcugaaggugaccuucuuccccgaccucaacggcgacguggucgccaucgacuacaagcacuacacccccuccuucaagaagggcgccaagcugcugcacaagcccaucguguggcacgugaacaacgccaccaacaaggcgacguacaagccgaacaccuggugcauccggugccucuggagcaccaagcccgucgagaccuccaacagcuucgacgugcugaaguccgaggacgcccaggggauggacaaccuggccugcgaggaccucaagcccgugagcgaggaggucguggagaaccccacgauccagaaggacgugcuggagugcaacgucaagaccaccgagguggugggcgacaucauccugaagccggccaacaacucccucaagaucaccgaggaggucgggcacacggaccugauggccgcguacguggacaacagcucccugaccaucaagaagcccaacgagcucagccgcgugcugggccugaagacccucgccacccacgggcuggccgccgucaacuccgugcccugggacacgaucgccaacuacgcgaagccguuccugaacaagguggucagcaccaccaccaacaucgugacgcgcugccucaaccgggugugcaccaacuacaugcccuacuucuucacccugcugcuccagcugugcaccuucacccgcuccacgaacagccggaucaaggccuccaugcccaccaccaucgccaagaacaccgucaagagcgugggcaaguucugccuggaggccagcuucaacuaccucaagucccccaacuucagcaagcugaucaacaucaucaucugguuccugcuccuguccgugugccugggcagccucaucuacuccacggccgcgcuggggguccugaugagcaaccucggcaugccguccuacugcaccggguaccgcgagggcuaccugaacagcaccaacgugaccaucgccacguacugcaccggcuccauccccugcagcgugugccuguccgggcucgacagccuggacaccuaccccucccuggagaccauccagaucacgaucagcuccuucaagugggaccucaccgccuucggccuggucgccgagugguuccuggccuacauccucuucacccgguucuucuacgugcuggggcuggcggccaucaugcagcucuucuucagcuacuucgccgugcacuucaucuccaacagcuggcugauguggcugaucaucaaccugguccagauggcccccaucuccgcgauggugcgcauguacaucuucuucgccagcuucuacuacguguggaagagcuacguccacgugguggacggcugcaacuccagcaccugcaugaugugcuacaagcggaaccgcgccacgcgggucgagugcaccaccaucgugaacgggguccgccgguccuucuacguguacgccaacggcggcaagggguucugcaagcuccacaacuggaacugcgugaacugcgacaccuucugcgccggcagcacguucaucuccgacgaggucgcgcgcgaccugagccugcaguucaagcggccgaucaaccccaccgaccaguccagcuacaucguggacuccgugaccgucaagaacgggagcauccaccucuacuucgacaaggccggccagaagaccuacgagcgccacucccugagccacuucgugaaccuggacaaccuccgggccaacaacacgaaggggucccugcccaucaacgugaucgucuucgacggcaagagcaagugcgaggaguccagcgccaaguccgccagcguguacuacucccagcugaugugccagcccauccuccugcuggaccaggcgcucgugagcgacgucggcgacagcgccgagguggccgugaagauguucgacgccuacgucaacaccuucuccagcaccuucaacgugccgauggagaagcugaagacccugguggccacggcggaggccgagcucgccaagaacgucucccuggacaacgugcugagcaccuucaucuccgccgcgcgccagggguucguggacagcgacgucgagaccaaggacgugguggagugccucaagcugucccaccagagcgacgucgaggugaccggcgacuccugcaacaacuacaugcugacguacaacaagguggagaacaugaccccccgggaccucggggccugcaucgacugcagcgcccgccacaucaacgcccaggucgccaagucccacaacaucgcgcugaucuggaacgugaaggacuucaugagccuguccgagcagcuccggaagcagauccgcagcgccgccaagaagaacaaccugcccuucaagcugaccugcgccaccacgcgccagguggucaacguggugaccaccaagaucgcccucaagggcgggugaggacuaguuauaagacugacuagcccgaugggccucccaacgggcccuccuccccuccuugcaccgagauuaauaaaaaaaaaaaaaaaaaaaaaaaaaaaaaaaaaaaaaaaaaaaaaaaaaaaaaaaaaaaaaaaaugcaucccccccccccccccccccccccccccccccaaaggcucuuuucagagccaccagaauu

SEQ ID NO: 21588 - RNA, 6058 nt, Artificial Sequence
  SARS-CoV-2__MT810534.1__non-structural protein 3 (NSP3) mRNA gc
aggagaaagcuuaccauggcccccaccaaggugaccuucggcgacgacacggucaucgaggugcagggguacaagagcgugaacaucaccuucgagcuggacgagcgcaucgacaagguccucaacgagaagugcuccgccuacaccguggagcugggcaccgaggugaacgaguucgcgugcgucguggccgacgccgugaucaagacgcugcagccggucagcgagcuccugaccccccuggggaucgaccucgacgagugguccauggccaccuacuaccuguucgacgagagcggcgaguucaagcuggccucccacauguacugcagcuucuacccccccgacgaggacgaggaggagggggacugcgaggaggaggaguucgagccguccacccaguacgaguacggcacggaggacgacuaccagggcaagccccucgaguucggggcgaccagcgccgcccugcagcccgaggaggagcaggaggaggacuggcuggacgacgacucccagcagaccgugggccagcaggacgggagcgaggacaaccagaccacgaccauccagaccaucguggagguccagccccagcucgagauggagcugaccccgguggugcagacgaucgaggucaacuccuucagcggcuaccugaagcucaccgacaacguguacaucaagaacgccgacaucguggaggaggcgaagaaggucaagcccaccgugguggucaacgccgccaacguguaccugaagcacgggggcggcguggccggggcccugaacaaggcgaccaacaacgccaugcaggucgaguccgacgacuacaucgccacgaacggcccccucaagguggggggcagcugcguccuguccggccacaaccuggccaagcacugccuccacgugguggggcccaacgucaacaagggcgaggacauccagcugcugaagagcgccuacgagaacuucaaccagcacgaggugcuccuggcgccgcugcucuccgccgggaucuucggcgccgaccccauccacagccugcgggugugcgucgacaccgugcgcaccaacguguaccuggccgucuucgacaagaaccucuacgacaagcugguguccagcuuccuggagaugaagagcgagaagcagguggagcagaagaucgccgagauccccaaggaggaggucaagcccuucaucaccgaguccaagccgagcguggagcagcggaagcaggacgacaagaagaucaaggcgugcguggaggaggucacgaccacccucgaggagaccaaguuccugacggagaaccugcuccuguacaucgacaucaacgggaaccugcaccccgacuccgccacccucgugagcgacaucgacaucaccuuccugaagaaggacgcccccuacaucgugggcgacgucgugcaggagggcgugcugaccgccgucgugauccccacgaagaaggccgggggcaccaccgagaugcucgcgaaggcccugcgcaaggugccgaccgacaacuacaucacgaccuaccccgggcagggccugaacggguacaccgucgaggaggccaagaccgugcucaagaagugcaaguccgccuucuacauccugcccagcaucaucuccaacgagaagcaggagauccugggcaccgugagcuggaaccuccgggagaugcuggcgcacgccgaggagacgcgcaagcugaugcccgucugcguggagaccaaggccaucguguccaccauccagcggaaguacaagggcaucaagauccaggagggggucguggacuacggcgcccgcuucuacuucuacaccagcaagacgaccguggccucccugaucaacacccucaacgaccugaacgagacccuggucacgaugccgcucggguacgugacccacggccugaaccuggaggaggcggcccgguacaugcgcagccucaaggugcccgccaccgucuccgugagcucccccgacgccgugaccgccuacaacggguaccugacgagcuccagcaagacccccgaggagcacuucaucgagaccaucucccuggcgggcagcuacaaggacuggagcuacuccggccagagcacccagcucgggaucgaguuccugaagcggggcgacaaguccgucuacuacacgagcaacccgaccaccuuccaccuggacggggaggugaucaccuucgacaaccucaagacgcugcugucccuccgcgaggugcggaccaucaaggucuucaccaccguggacaacaucaaccugcacacgcagguggucgacaugagcaugaccuacggccagcaguucggccccaccuaccuggacggggccgacgugaccaagaucaagccccacaacucccacgagggcaagacguucuacgugcucccgaacgacgacacccugcgcgucgaggccuucgaguacuaccacaccaccgaccccagcuuccuggggcgguacauguccgcccucaaccacacgaagaaguggaaguacccccaggugaacggccugaccagcaucaagugggccgacaacaacugcuaccuggcgaccgcccuccugacccugcagcagaucgagcucaaguucaaccccccggcccugcaggacgccuacuaccgcgcgcgggccggggaggccgccaacuucugcgcccugauccucgcguacugcaacaagacggugggcgagcugggcgacguccgcgagaccauguccuaccuguuccagcacgccaaccucgacagcugcaagcgggugcugaacgucgugugcaagaccugcgggcagcagcagaccacccugaagggcguggaggccgucauguacauggggacgcucuccuacgagcaguucaagaagggcgugcagauccccugcaccugcgggaagcaggccaccaaguaccuggugcagcaggagagccccuucgucaugauguccgcccccccggcgcaguacgagcugaagcacggcaccuucacgugcgccagcgaguacaccggcaacuaccagugcgggcacuacaagcacaucaccuccaaggagacccucuacugcaucgacggcgcccugcugacgaagagcagcgaguacaaggggcccaucaccgacguguucuacaaggagaacuccuacaccaccacgaucaagcccgugaccuacaagcucgacggcgucgugugcaccgagaucgaccccaagcuggacaacuacuacaagaaggacaacagcuacuucaccgagcagccgaucgaccuggugcccaaccagcccuaccccaacgccuccuucgacaacuucaaguucgucugcgacaacaucaaguucgccgacgaccucaaccagcugacgggguacaagaagccggcgagccgcgagcugaaggugaccuucuuccccgaccucaacggcgacgugguccccaucgacuacaagcacuacacccccuccuucaagaagggcgccaagcugcugcacaagccgaucguguggcacgugaacaacgccaccaacaaggccacguacaagcccaacaccuggugcauccggugccucuggagcaccaagcccgucgagaccuccaacagcuucgacgugcugaaguccgaggacgcgcaggggauggacaaccuggccugcgaggaccucaagcccgugagcgaggaggucguggagaacccgacgauccagaaggacgugcuggagugcaacgucaagaccaccgagguggugggcgacaucauccugaagcccgccaacaacucccucaagaucaccgaggaggucgggcacacggaccugauggccgccuacguggacaacagcucccugaccaucaagaagcccaacgagcucagccgcgugcugggccugaagacccucgcgacccacgggcuggccgccgucaacuccgugccgugggacacgaucgccaacuacgccaagcccuuccugaacaagguggucagcaccaccaccaacaucgugacgcgcugccucaaccgggugugcaccaacuacaugcccuacuucuucacccugcugcuccagcugugcaccuucacccgcuccacgaacagccggaucaaggcguccaugcccaccaccaucgccaagaacaccgucaagagcgugggcaaguucugccuggaggccagcuucaacuaccucaaguccccgaacuucagcaagcugaucaacaucaucaucugguuccugcuccuguccgugugccugggcagccucaucuacuccacggccgcccuggggguccugaugagcaaccucggcaugcccuccuacugcaccggguaccgcgagggcuaccugaacagcaccaacgugaccaucgcgacguacugcaccggcuccauccccugcagcgugugccuguccgggcucgacagccuggacaccuaccccucccuggagaccauccagaucacgaucagcuccuucaagugggaccucaccgccuucggccuggucgccgagugguuccuggccuacauccucuucacccgguucuucuacgugcuggggcuggccgcgaucaugcagcucuucuucagcuacuucgccgugcacuucaucuccaacagcuggcugauguggcugaucaucaaccugguccagauggccccgaucuccgccauggugcgcauguacaucuucuucgcgagcuucuacuacguguggaagagcuacguccacgugguggacggcugcaacuccagcaccugcaugaugugcuacaagcggaaccgcgccacgcgggucgagugcaccaccaucgugaacgggguccgccgguccuucuacguguacgccaacggcggcaagggguucugcaagcuccacaacuggaacugcgugaacugcgacaccuucugcgccggcagcacguucaucuccgacgaggucgcccgcgaccugagccugcaguucaagcggcccaucaaccccaccgaccaguccagcuacaucguggacuccgugaccgucaagaacgggagcauccaccucuacuucgacaaggcgggccagaagaccuacgagcgccacucccugagccacuucgugaaccuggacaaccuccgggccaacaacacgaaggggucccugcccaucaacgugaucgucuucgacggcaagagcaagugcgaggaguccagcgccaaguccgccagcguguacuacucccagcugaugugccagccgauccuccugcuggaccaggcccucgugagcgacgucggcgacagcgcggagguggccgugaagauguucgacgccuacgucaacaccuucuccagcaccuucaacgugcccauggagaagcugaagacccugguggccacggccgaggcggagcucgccaagaacgucucccuggacaacgugcugagcaccuucaucuccgccgcccgccagggguucguggacagcgacgucgagaccaaggacgugguggagugccucaagcugucccaccagagcgacaucgaggucaccggcgacuccugcaacaacuacaugcugacguacaacaagguggagaacaugaccccccgggaccucggggcgugcaucgacugcagcgcccgccacaucaacgcccagguggccaagucccacaacaucgcccugaucuggaacgucaaggacuucaugagccuguccgagcagcuccggaagcagauccgcagcgcggccaagaagaacaaccugcccuucaagcugaccugcgccaccacgcgccagguggugaacgucgugaccaccaagaucgcccucaagggcgggugaggacuaguuauaagacugacuagcccgaugggccucccaacgggcccuccuccccuccuugcaccgagauuaauaaaaaaaaaaaaaaaaaaaaaaaaaaaaaaaaaaaaaaaaaaaaaaaaaaaaaaaaaaaaaaaaugcaucccccccccccccccccccccccccccccccaaaggcucuuuucagagccaccagaauu

SEQ ID NO: 21589 - RNA, 6058 nt, Artificial Sequence
  SARS-CoV-2__MT810570.1__non-structural protein 3 (NSP3) mRNA gc
aggagaaagcuuaccauggcccccaccaaggugaccuucggcgacgacacggucaucgaggugcagggguacaagagcgugaacaucaccuucgagcuggacgagcgcaucgacaagguccucaacgagaagugcuccgccuacaccguggagcugggcaccgaggugaacgaguucgcgugcgucguggccgacgccgugaucaagacgcugcagccggucagcgagcuccugaccccccuggggaucgaccucgacgagugguccauggccaccuacuaccuguucgacgagagcggcgaguucaagcuggccucccacauguacugcagcuucuacccccccgacgaggacgaggaggagggggacugcgaggaggaggaguucgagccguccacccaguacgaguacggcacggaggacgacuaccagggcaagccccucgaguucggggcgaccagcgccgcccugcagcccgaggaggagcaggaggaggacuggcuggacgacgacucccagcagaccgugggccagcaggacgggagcgaggacaaccagaccacgaccauccagaccaucguggagguccagccccagcucgagauggagcugaccccgguggugcagacgaucgaggucaacuccuucagcggcuaccugaagcucaccgacaacguguacaucaagaacgccgacaucguggaggaggcgaagaaggucaagcccaccgugguggucaacgccgccaacguguaccugaagcacgggggcggcguggccggggcccugaacaaggcgaccaacaacgccaugcaggucgaguccgacgacuacaucgccacgaacggcccccucaagguggggggcagcugcguccuguccggccacaaccuggccaagcacugccuccacgugguggggcccaacgucaacaagggcgaggacauccagcugcugaagagcgccuacgagaacuucaaccagcacgaggugcuccuggcgccgcugcucuccgccgggaucuucggcgccgaccccauccacagccugcgggugugcgucgacaccgugcgcaccaacguguaccuggccgucuucgacaagaaccucuacgacaagcugguguccagcuuccuggagaugaagagcgagaagcagguggagcagaagaucgccgagauccccaaggaggaggucaagcccuucaucaccgaguccaagccgagcguggagcagcggaagcaggacgacaagaagaucaaggcgugcguggaggaggucacgaccacccucgaggagaccaaguuccugacggagaaccugcuccuguacaucgacaucaacgggaaccugcaccccgacuccgccacccucgugagcgacaucgacaucaccuuccugaagaaggacgcccccuacaucgugggcgacgucgugcaggagggcgugcugaccgccgucgugauccccacgaagaaggccgggggcaccaccgagaugcucgcgaaggcccugcgcaaggugccgaccgacaacuacaucacgaccuaccccgggcagggccugaacggguacaccgucgaggaggccaagaccgugcucaagaagugcaaguccgccuucuacauccugcccagcaucaucuccaacgagaagcaggagauccugggcaccgugagcuggaaccuccgggagaugcuggcgcacgccgaggagacgcgcaagcugaugcccgucugcguggagaccaaggccaucguguccaccauccagcggaaguacaagggcaucaagauccaggagggggucguggacuacggcgcccgcuucuacuucuacaccagcaagacgaccguggccucccugaucaacacccucaacgaccugaacgagacccuggucacgaugccgcucggguacgugacccacggccugaaccuggaggaggcggcccgguacaugcgcagccucaaggugcccgccaccgucuccgugagcucccccgacgccgugaccgccuacaacggguaccugacgagcuccagcaagacccccgaggagcacuucaucgagaccaucucccuggcgggcagcuacaaggacuggagcuacuccggccagagcacccagcucgggaucgaguuccugaagcggggcgacaaguccgucuacuacacgagcaacccgaccaccuuccaccuggacggggaggugaucaccuucgacaaccucaagacgcugcugucccuccgcgaggugcggaccaucaaggucuucaccaccguggacaacaucaaccugcacacgcagguggucgacaugagcaugaccuacggccagcaguucggccccaccuaccuggacggggccgacgugaccaagaucaagccccacaacucccacgagggcaagacguucuacgugcucccgaacgacgacacccugcgcgucgaggccuucgaguacuaccacaccaccgaccccagcuuccuggggcgguacauguccgcccucaaccacacgaagaaguggaaguacccccaggugaacggccugaccagcaucaagugggccgacaacaacugcuaccuggcgaccgcccuccugacccugcagcagaucgagcucaaguucaaccccccggcccugcaggacgccuacuaccgcgcgcgggccggggaggccgccaacuucugcgcccugauccucgcguacugcaacaagacggugggcgagcugggcgacguccgcgagaccauguccuaccuguuccagcacgccaaccucgacagcugcaagcgggugcugaacgucgugugcaagaccugcgggcagcagcagaccacccugaagggcguggaggccgucauguacauggggacgcucuccuacgagcaguucaagaagggcgugcagauccccugcaccugcgggaagcaggccaccaaguaccuggugcagcaggagagccccuucgucaugauguccgcccccccggcgcaguacgagcugaagcacggcaccuucacgugcgccagcgaguacaccggcaacuaccagugcgggcacuacaagcacaucaccuccaaggagacccucuacugcaucgacggcgcccugcugacgaagagcagcgaguacaaggggcccaucaccgacguguucuacaaggagaacuccuacaccaccacgaucaagcccgugaccuacaagcucgacggcgucgugugcaccgagaucgaccccaagcuggacaacuacuacaagaaggacaacagcuacuucaccgagcagccgaucgaccuggugcccaaccagcccuaccccaacgccuccuucgacaacuucaaguucgucugcgacaacaucaaguucgccgacgaccucaaccagcugacgggguacaagaagccggcgagccgcgagcugaaggugaccuucuuccccgaccucaacggcgacguggucgccaucgacuacaagcacuacacccccuccuucaagaagggcgccaagcugcugcacaagcccaucguguggcacgugaacaacgccaccaacaaggcgacguacaagccgaacaccuggugcauccggugccucuggagcaccaagcccgucgagaccuccaacagcuucgacgugcugaaguccgaggacgcccaggggauggacaaccuggccugcgaggaccucaagcuggugagcgaggaggucguggagaaccccacgauccagaaggacgugcuggagugcaacgucaagaccaccgagguggugggcgacaucauccucaagcccgccaacaacucccugaagaucaccgaggaggucgggcacacggaccugauggccgcguacguggacaacagcucccucaccaucaagaagccgaacgagcugagccgcgugcugggccucaagacccuggccacccacgggcuggccgccgucaacuccgugcccugggacacgaucgccaacuacgcgaagcccuuccucaacaagguggucagcaccaccaccaacaucgugacgcgcugccugaaccgggugugcaccaacuacaugccguacuucuucacccugcuccugcagcugugcaccuucacccgcuccacgaacagccggaucaaggccuccaugcccaccaccaucgccaagaacaccgucaagagcgugggcaaguucugccucgaggccagcuucaacuaccugaagucccccaacuucagcaagcugaucaacaucaucaucugguuccuccugcuguccgugugccucggcagccugaucuacuccacggccgcgcuggggguccucaugagcaaccugggcaugcccuccuacugcaccggguaccgcgagggcuaccugaacagcaccaacgugaccaucgccacguacugcaccggcuccaucccgugcagcgugugccucuccgggcuggacagccuggacaccuaccccucccucgagaccauccagaucacgaucagcuccuucaagugggaccugaccgccuucggccuggucgccgagugguuccucgccuacauccuguucacccgguucuucuacgugcuggggcucgcggccaucaugcagcuguucuucagcuacuucgccgugcacuucaucuccaacagcuggcugauguggcugaucaucaaccucguccagauggcccccaucuccgcgauggugcgcauguacaucuucuucgccagcuucuacuacguguggaagagcuacguccacgugguggacggcugcaacuccagcaccugcaugaugugcuacaagcggaaccgcgccacgcgggucgagugcaccaccaucgugaacgggguccgccgguccuucuacguguacgccaacggcggcaagggguucugcaagcugcacaacuggaacugcgugaacugcgacaccuucugcgccggcagcacguucaucuccgacgaggucgcgcgcgaccugagccuccaguucaagcggcccaucaacccgaccgaccaguccagcuacaucguggacuccgugaccgucaagaacgggagcauccaccuguacuucgacaaggccggccagaagaccuacgagcgccacucccugagccacuucgugaaccucgacaaccugcgggccaacaacacgaaggggucccugcccaucaacgugaucgucuucgacggcaagagcaagugcgaggaguccagcgccaaguccgccagcguguacuacucccagcucaugugccagcccauccugcugcucgaccaggcgcuggugagcgacgucggcgacagcgccgagguggccgugaagauguucgacgccuacgucaacaccuucuccagcaccuucaacgugcccauggagaagcugaagacccucguggccacggcggaggccgagcuggccaagaacgucucccuggacaacgugcucagcaccuucaucuccgccgcgcgccagggguucguggacagcgacgucgagaccaaggacgugguggagugccugaagcugucccaccagagcgacaucgaggucaccggcgacuccugcaacaacuacaugcucacguacaacaagguggagaacaugaccccgcgggaccugggggccugcaucgacugcagcgcccgccacaucaacgcccagguggccaagucccacaacaucgcgcugaucuggaacgucaaggacuucaugagccucuccgagcagcugcggaagcagauccgcagcgccgccaagaagaacaaccugcccuucaagcucaccugcgccaccacgcgccagguggugaacgucgugaccaccaagaucgcccugaagggcgggugaggacuaguuauaagacugacuagcccgaugggccucccaacgggcccuccuccccuccuugcaccgagauuaauaaaaaaaaaaaaaaaaaaaaaaaaaaaaaaaaaaaaaaaaaaaaaaaaaaaaaaaaaaaaaaaaugcaucccccccccccccccccccccccccccccccaaaggcucuuuucagagccaccagaauu

SEQ ID NO: 21590 - RNA, 6058 nt, Artificial Sequence
  SARS-CoV-2__MT810589.1__non-structural protein 3 (NSP3) mRNA gc
aggagaaagcuuaccauggcccccaccaaggugaccuucggcgacgacacggucaucgaggugcagggguacaagagcgugaacaucaccuucgagcuggacgagcgcaucgacaagguccucaacgagaagugcuccgccuacaccguggagcugggcaccgaggugaacgaguucgcgugcgucguggccgacgccgugaucaagacgcugcagccggucagcgagcuccugaccccccuggggaucgaccucgacgagugguccauggccaccuacuaccuguucgacgagagcggcgaguucaagcuggccucccacauguacugcagcuucuacccccccgacgaggacgaggaggagggggacugcgaggaggaggaguucgagccguccacccaguacgaguacggcacggaggacgacuaccagggcaagccccucgaguucggggcgaccagcgccgcccugcagcccgaggaggagcaggaggaggacuggcuggacgacgacucccagcagaccgugggccagcaggacgggagcgaggacaaccagaccacgaccauccagaccaucguggagguccagccccagcucgagauggagcugaccccgguggugcagacgaucgaggucaacuccuucagcggcuaccugaagcucaccgacaacguguacaucaagaacgccgacaucguggaggaggcgaagaaggucaagcccaccgugguggucaacgccgccaacguguaccugaagcacgggggcggcguggccggggcccugaacaaggcgaccaacaacgccaugcaggucgaguccgacgacuacaucgccacgaacggcccccucaagguggggggcagcugcguccuguccggccacaaccuggccaagcacugccuccacgugguggggcccaacgucaacaagggcgaggacauccagcugcugaagagcgccuacgagaacuucaaccagcacgaggugcuccuggcgccgcugcucuccgccgggaucuucggcgccgaccccauccacagccugcgggugugcgucgacaccgugcgcaccaacguguaccuggccgucuucgacaagaaccucuacgacaagcugguguccagcuuccuggagaugaagagcgagaagcagguggagcagaagaucgccgagauccccaaggaggaggucaagcccuucaucaccgaguccaagccgagcguggagcagcggaagcaggacgacaagaagaucaaggcgugcguggaggaggucacgaccacccucgaggagaccaaguuccugacggagaaccugcuccuguacaucgacaucaacgggaaccugcaccccgacuccgccacccucgugagcgacaucgacaucaccuuccugaagaaggacgcccccuacaucgugggcgacgucgugcaggagggcgugcugaccgccgucgugauccccacgaagaaggccgggggcaccaccgagaugcucgcgaaggcccugcgcaaggugccgaccgacaacuacaucacgaccuaccccgggcagggccugaacggguacaccgucgaggaggccaagaccgugcucaagaagugcaaguccgccuucuacauccugcccagcaucaucuccaacgagaagcaggagauccugggcaccgugagcuggaaccuccgggagaugcuggcgcacgccgaggagacgcgcaagcugaugcccgucugcguggagaccaaggccaucguguccaccauccagcggaaguacaagggcaucaagauccaggagggggucguggacuacggcgcccgcuucuacuucuacaccagcaagacgaccguggccucccugaucaacacccucaacgaccugaacgagacccuggucacgaugccgcucggguacgugacccacggccugaaccuggaggaggcggcccgguacaugcgcagccucaaggugcccgccaccgucuccgugagcucccccgacgccgugaccgccuacaacggguaccugacgagcuccagcaagacccccgaggagcacuucaucgagaccaucucccuggcgggcagcuacaaggacuggagcuacuccggccagagcacccagcucgggaucgaguuccugaagcggggcgacaaguccgucuacuacacgagcaacccgaccaccuuccaccuggacggggaggugaucaccuucgacaaccucaagacgcugcugucccuccgcgaggugcggaccaucaaggucuucaccaccguggacaacaucaaccugcacacgcagguggucgacaugagcaugaccuacggccagcaguucggccccaccuaccuggacggggccgacgugaccaagaucaagccccacaacucccacgagggcaagacguucuacgugcucccgaacgacgacacccugcgcgucgaggccuucgaguacuaccacaccaccgaccccagcuuccuggggcgguacauguccgcccucaaccacacgaagaaguggaaguacccccaggugaacggccugaccagcaucaagugggccgacaacaacugcuaccuggcgaccgcccuccugacccugcagcagaucgagcucaaguucaaccccccggcccugcaggacgccuacuaccgcgcgcgggccggggaggccgccaacuucugcgcccugauccucgcguacugcaacaagacggugggcgagcugggcgacguccgcgagaccauguccuaccuguuccagcacgccaaccucgacagcugcaagcgggugcugaacgucgugugcaagaccugcgggcagcagcagaccacccugaagggcguggaggccgucauguacauggggacgcucuccuacgagcaguucaagaagggcgugcagauccccugcaccugcgggaagcaggccaccaaguaccuggugcagcaggagagccccuucgucaugauguccgcccccccggcgcaguacgagcugaagcacggcaccuucacgugcgccagcgaguacaccggcaacuaccagugcgggcacuacaagcacaucaccuccaaggagacccucuacugcaucgacggcgcccugcugacgaagagcagcgaguacaaggggcccaucaccgacguguucuacaaggagaacuccuacaccaccacgaucaagcccgugaccuacaagcucgacggcgucgugugcaccgagaucgaccccaagcuggacaacuacuacaagaaggacaacagcuacuucaccgagcagccgaucgaccuggugcccaaccagcccuaccccaacgccuccuucgacaacuucaaguucgucugcgacaacaucaaguucgccgacgaccucaaccagcugacgggguacaagaagccggcgagccgcgagcugaaggugaccuucuuccccgaccucaacggcgacguggucgccaucgacuacaagcacuacacccccuccuucaagaagggcgccaagcugcugcacaagcccaucguguggcacgugaacaacgccaccaacaaggcgacguacaagccgaacaccuggugcauccggugccucuggagcaccaagcccgucgagaccuccaacagcuucgacgugcugaaguccgaggacgcccaggggauggacaaccuggccugcgaggaccucaagcccgugagcgaggaggucguggagaaccccacgauccagaaggacgugcuggagugcaacgucaagaccaccgagguggugggcgacaucauccugaagccggccaacaacucccucaagaucaccgaggaggucgggcacacggaccugauggccgcguacguggacaacagcucccugaccaucaagaagcccaacgagcucagccgcgugcugggccugaagacccucgccauccacgggcuggccgccgucaacuccgugcccugggacaccaucgccaacuacgcgaagccguuccugaacaagguggucagcacgaccaccaacaucgugacccgcugccucaaccgggugugcacgaacuacaugcccuacuucuucacccugcugcuccagcugugcaccuucacccgcuccaccaacagccggaucaaggccuccaugcccacgaccaucgccaagaacaccgucaagagcgugggcaaguucugccuggaggccagcuucaacuaccucaagucccccaacuucagcaagcugaucaacaucaucaucugguuccugcuccuguccgugugccugggcagccucaucuacuccaccgccgcgcuggggguccugaugagcaaccucggcaugccguccuacugcacgggguaccgcgagggcuaccugaacagcaccaacgugaccaucgccaccuacugcacgggcuccauccccugcagcgugugccuguccgggcucgacagccuggacaccuaccccucccuggagaccauccagaucaccaucagcuccuucaagugggaccucacggccuucggccuggucgccgagugguuccuggccuacauccucuucacccgguucuucuacgugcuggggcuggcggccaucaugcagcucuucuucagcuacuucgccgugcacuucaucuccaacagcuggcugauguggcugaucaucaaccugguccagauggcccccaucuccgcgauggugcgcauguacaucuucuucgccagcuucuacuacguguggaagagcuacguccacgugguggacggcugcaacuccagcaccugcaugaugugcuacaagcggaaccgcgccacccgggucgagugcacgaccaucgugaacgggguccgccgguccuucuacguguacgccaacggcggcaagggguucugcaagcuccacaacuggaacugcgugaacugcgacaccuucugcgccggcagcaccuucaucuccgacgaggucgcgcgcgaccugagccugcaguucaagcggccgaucaaccccacggaccaguccagcuacaucguggacuccgugaccgucaagaacgggagcauccaccucuacuucgacaaggccggccagaagaccuacgagcgccacucccugagccacuucgugaaccuggacaaccuccgggccaacaacaccaaggggucccugcccaucaacgugaucgucuucgacggcaagagcaagugcgaggaguccagcgccaaguccgccagcguguacuacucccagcugaugugccagcccauccuccugcuggaccaggcgcucgugagcgacgucggcgacagcgccgagguggccgugaagauguucgacgccuacgucaacacguucuccagcaccuucaacgugccgauggagaagcugaagacccugguggccaccgcggaggccgagcucgccaagaacgucucccuggacaacgugcugagcacguucaucuccgccgcgcgccagggguucguggacagcgacgucgagaccaaggacgugguggagugccucaagcugucccaccagagcgacaucgaggucaccggcgacuccugcaacaacuacaugcugaccuacaacaagguggagaacaugacgccccgggaccucggggccugcaucgacugcagcgcccgccacaucaacgcccagguggccaagucccacaacaucgcgcugaucuggaacgucaaggacuucaugagccuguccgagcagcuccggaagcagauccgcagcgccgccaagaagaacaaccugcccuucaagcugaccugcgccaccacccgccagguggugaacgucgugacgaccaagaucgcccucaagggcgggugaggacuaguuauaagacugacuagcccgaugggccucccaacgggcccuccuccccuccuugcaccgagauuaauaaaaaaaaaaaaaaaaaaaaaaaaaaaaaaaaaaaaaaaaaaaaaaaaaaaaaaaaaaaaaaaaugcaucccccccccccccccccccccccccccccccaaaggcucuuuucagagccaccagaauu

SEQ ID NO: 21591 - RNA, 6058 nt, Artificial Sequence
  SARS-CoV-2__MT810599.1__non-structural protein 3 (NSP3) mRNA gc
aggagaaagcuuaccauggcccccaccaaggugaccuucggcgacgacacggucaucgaggugcagggguacaagagcgugaacaucaccuucgagcuggacgagcgcaucgacaagguccucaacgagaagugcuccgccuacaccguggagcugggcaccgaggugaacgaguucgcgugcgucguggccgacgccgugaucaagacgcugcagccggucagcgagcuccugaccccccuggggaucgaccucgacgagugguccauggccaccuacuaccuguucgacgagagcggcgaguucaagcuggccucccacauguacugcagcuucuacccccccgacgaggacgaggaggagggggacugcgaggaggaggaguucgagccguccacccaguacgaguacggcacggaggacgacuaccagggcaagccccucgaguucggggcgaccagcgccgcccugcagcccgaggaggagcaggaggaggacuggcuggacgacgacucccagcagaccgugggccagcaggacgggagcgaggacaaccagaccacgaccauccagaccaucguggagguccagccccagcucgagauggagcugaccccgguggugcagacgaucgaggucaacuccuucagcggcuaccugaagcucaccgacaacguguacaucaagaacgccgacaucguggaggaggcgaagaaggucaagcccaccgugguggucaacgccgccaacguguaccugaagcacgggggcggcguggccggggcccugaacaaggcgaccaacaacgccaugcaggucgaguccgacgacuacaucgccacgaacggcccccucaagguggggggcagcugcguccuguccggccacaaccuggccaagcacugccuccacgugguggggcccaacgucaacaagggcgaggacauccagcugcugaagagcgccuacgagaacuucaaccagcacgaggugcuccuggcgccgcugcucuccgccgggaucuucggcgccgaccccauccacagccugcgggugugcgucgacaccgugcgcaccaacguguaccuggccgucuucgacaagaaccucuacgacaagcugguguccagcuuccuggagaugaagagcgagaagcagguggagcagaagaucgccgagauccccaaggaggaggucaagcccuucaucaccgaguccaagccgagcguggagcagcggaagcaggacgacaagaagaucaaggcgugcguggaggaggucacgaccacccucgaggagaccaaguuccugacggagaaccugcuccuguacaucgacaucaacgggaaccugcaccccgacuccgccacccucgugagcgacaucgacaucaccuuccugaagaaggacgcccccuacaucgugggcgacgucgugcaggagggcgugcugaccgccgucgugauccccacgaagaaggccgggggcaccaccgagaugcucgcgaaggcccugcgcaaggugccgaccgacaacuacaucacgaccuaccccgggcagggccugaacggguacaccgucgaggaggccaagaccgugcucaagaagugcaaguccgccuucuacauccugcccagcaucaucuccaacgagaagcaggagauccugggcaccgugagcuggaaccuccgggagaugcuggcgcacgccgaggagacgcgcaagcugaugcccgucugcguggagaccaaggccaucguguccaccauccagcggaaguacaagggcaucaagauccaggagggggucguggacuacggcgcccgcuucuacuucuacaccagcaagacgaccguggccucccugaucaacacccucaacgaccugaacgagacccuggucacgaugccgcucggguacgugacccacggccugaaccuggaggaggcggcccgguacaugcgcagccucaaggugcccgccaccgucuccgugagcucccccgacgccgugaccgccuacaacggguaccugacgagcuccagcaagacccccgaggagcacuucaucgagaccaucucccuggcgggcagcuacaaggacuggagcuacuccggccagagcacccagcucgggaucgaguuccugaagcggggcgacaaguccgucuacuacacgagcaacccgaccaccuuccaccuggacggggaggugaucaccuucgacaaccucaagacgcugcugucccuccgcgaggugcggaccaucaaggucuucaccaccguggacaacaucaaccugcacacgcagguggucgacaugagcaugaccuacggccagcaguucggccccaccuaccuggacggggccgacgugaccaagaucaagccccacaacucccacgagggcaagacguucuacgugcucccgaacgacgacacccugcgcgucgaggccuucgaguacuaccacaccaccgaccccagcuuccuggggcgguacauguccgcccucaaccacacgaagaaguggaaguaccugcaggugaacggccugaccagcaucaagugggccgacaacaacugcuaccucgcgaccgcccugcugacccuccagcagaucgagcugaaguucaacccccccgcccugcaggacgccuacuaccgcgcgcgggccggggaggccgccaacuucugcgcccucauccuggcguacugcaacaagacggugggcgagcugggcgacguccgcgagaccauguccuaccucuuccagcacgccaaccuggacagcugcaagcgggugcugaacgucgugugcaagaccugcgggcagcagcagaccacccucaagggcguggaggccgucauguacauggggacgcuguccuacgagcaguucaagaagggcgugcagaucccgugcaccugcgggaagcaggccaccaaguaccuggugcagcaggagagccccuucgucaugauguccgccccccccgcgcaguacgagcucaagcacggcaccuucacgugcgccagcgaguacaccggcaacuaccagugcgggcacuacaagcacaucaccuccaaggagacccuguacugcaucgacggcgcccugcucacgaagagcagcgaguacaaggggccgaucaccgacguguucuacaaggagaacuccuacaccaccacgaucaagcccgugaccuacaagcuggacggcgucgugugcaccgagaucgaccccaagcuggacaacuacuacaagaaggacaacagcuacuucaccgagcagcccaucgaccucgugccgaaccagcccuaccccaacgccuccuucgacaacuucaaguucgucugcgacaacaucaaguucgccgacgaccugaaccagcugacgggguacaagaagcccgcgagccgcgagcucaaggugaccuucuucccggaccugaacggcgacguggucgccaucgacuacaagcacuacacccccuccuucaagaagggcgccaagcugcuccacaagcccaucguguggcacgugaacaacgccaccaacaaggcgacguacaagcccaacaccuggugcauccggugccuguggagcaccaagccggucgagaccuccaacagcuucgacgugcugaaguccgaggacgcccaggggauggacaaccucgccugcgaggaccugaagcccgugagcgaggaggucguggagaaccccacgauccagaaggacgugcuggagugcaacgucaagaccaccgagguggugggcgacaucauccucaagcccgccaacaacucccugaagaucaccgaggaggucgggcacacggaccugauggccgcguacguggacaacagcucccucaccaucaagaagccgaacgagcugagccgcgugcugggccucaagacccuggccacccacgggcuggccgccgucaacuccgugcccugggacacgaucgccaacuacgcgaagcccuuccucaacaagguggucagcaccaccaccaacaucgugacgcgcugccugaaccgggugugcaccaacuacaugccguacuucuucacccugcuccugcagcugugcaccuucacccgcuccacgaacagccggaucaaggccuccaugcccaccaccaucgccaagaacaccgucaagagcgugggcaaguucugccucgaggccagcuucaacuaccugaagucccccaacuucagcaagcugaucaacaucaucaucugguuccuccugcuguccgugugccucggcagccugaucuacuccacggccgcgcuggggguccucaugagcaaccugggcaugcccuccuacugcaccggguaccgcgagggcuaccugaacagcaccaacgugaccaucgccacguacugcaccggcuccaucccgugcagcgugugccucuccgggcuggacagccuggacaccuaccccucccucgagaccauccagaucacgaucagcuccuucaagugggaccugaccgccuucggccuggucgccgagugguuccucgccuacauccuguucacccgguucuucuacgugcuggggcucgcggccaucaugcagcuguucuucagcuacuucgccgugcacuucaucuccaacagcuggcugauguggcugaucaucaaccucguccagauggcccccaucuccgcgauggugcgcauguacaucuucuucgccagcuucuacuacguguggaagagcuacguccacgugguggacggcugcaacuccagcaccugcaugaugugcuacaagcggaaccgcgccacgcgggucgagugcaccaccaucgugaacgggguccgccgguccuucuacguguacgccaacggcggcaagggguucugcaagcugcacaacuggaacugcgugaacugcgacaccuucugcgccggcagcacguucaucuccgacgaggucgcgcgcgaccugagccuccaguucaagcggcccaucaacccgaccgaccaguccagcuacaucguggacuccgugaccgucaagaacgggagcauccaccuguacuucgacaaggccggccagaagaccuacgagcgccacucccugagccacuucgugaaccucgacaaccugcgggccaacaacacgaaggggucccugcccaucaacgugaucgucuucgacggcaagagcaagugcgaggaguccagcgccaaguccgccagcguguacuacucccagcucaugugccagcccauccugcugcucgaccaggcgcuggugagcgacgucggcgacagcgccgagguggccgugaagauguucgacgccuacgucaacaccuucuccagcaccuucaacgugcccauggagaagcugaagacccucguggccacggcggaggccgagcuggccaagaacgucucccuggacaacgugcucagcaccuucaucuccgccgcgcgccagggguucguggacagcgacgucgagaccaaggacgugguggagugccugaagcugucccaccagagcgacaucgaggucaccggcgacuccugcaacaacuacaugcucacguacaacaagguggagaacaugaccccgcgggaccugggggccugcaucgacugcagcgcccgccacaucaacgcccagguggccaagucccacaacaucgcgcugaucuggaacgucaaggacuucaugagccucuccgagcagcugcggaagcagauccgcagcgccgccaagaagaacaaccugcccuucaagcucaccugcgccaccacgcgccagguggugaacgucgugaccaccaagaucgcccugaagggcgggugaggacuaguuauaagacugacuagcccgaugggccucccaacgggcccuccuccccuccuugcaccgagauuaauaaaaaaaaaaaaaaaaaaaaaaaaaaaaaaaaaaaaaaaaaaaaaaaaaaaaaaaaaaaaaaaaugcaucccccccccccccccccccccccccccccccaaaggcucuuuucagagccaccagaauu

SEQ ID NO: 21592 - RNA, 6058 nt, Artificial Sequence
  SARS-CoV-2__MT810624.1__non-structural protein 3 (NSP3) mRNA gc
aggagaaagcuuaccauggcccccaccaaggugaccuucggcgacgacacggucaucgaggugcagggguacaagagcgugaacaucaccuucgagcuggacgagcgcaucgacaagguccucaacgagaagugcuccgccuacaccguggagcugggcaccgaggugaacgaguucgcgugcgucguggccgacgccgugaucaagacgcugcagccggucagcgagcuccugaccccccuggggaucgaccucgacgagugguccauggccaccuacuaccuguucgacgagagcggcgaguucaagcuggccucccacauguacugcagcuucuacccccccgacgaggacgaggaggagggggacugcgaggaggaggaguucgagccguccacccaguacgaguacggcacggaggacgacuaccagggcaagccccucgaguucggggcgaccagcgccgcccugcagcccgaggaggagcaggaggaggacuggcuggacgacgacucccagcagaccgugggccagcaggacgggagcgaggacaaccagaccacgaccauccagaccaucguggagguccagccccagcucgagauggagcugaccccgguggugcagacgaucgaggucaacuccuucagcggcuaccugaagcucaccgacaacguguacaucaagaacgccgacaucguggaggaggcgaagaaggucaagcccaccgugguggucaacgccgccaacguguaccugaagcacgggggcggcguggccggggcccugaacaaggcgaccaacaacgccaugcaggucgaguccgacgacuacaucgccacgaacggcccccucaagguggggggcagcugcguccuguccggccacaaccuggccaagcacugccuccacgugguggggcccaacgucaacaagggcgaggacauccagcugcugaagagcgccuacgagaacuucaaccagcacgaggugcuccuggcgccgcugcucuccgccgggaucuucggcgccgaccccauccacagccugcgggugugcgucgacaccgugcgcaccaacguguaccuggccgucuucgacaagaaccucuacgacaagcugguguccagcuuccuggagaugaagagcgagaagcagguggagcagaagaucgccgagauccccaaggaggaggucaagcccuucaucaccgaguccaagccgagcguggagcagcggaagcaggacgacaagaagaucaaggcgugcguggaggaggucacgaccacccucgaggagaccaaguuccugacggagaaccugcuccuguacaucgacaucaacgggaaccugcaccccgacuccgccacccucgugagcgacaucgacaucaccuuccugaagaaggacgcccccuacaucgugggcgacgucgugcaggagggcgugcugaccgccgucgugauccccacgaagaaggccgggggcaccaccgagaugcucgcgaaggcccugcgcaaggugccgaccgacaacuacaucacgaccuaccccgggcagggccugaacggguacaccgucgaggaggccaagaccgugcucaagaagugcaaguccgccuucuacauccugcccagcaucaucuccaacgagaagcaggagauccugggcaccgugagcuggaaccuccgggagaugcuggcgcacgccgaggagacgcgcaagcugaugcccgucugcguggagaccaaggccaucguguccaccauccagcggaaguacaagggcaucaagauccaggagggggucguggacuacggcgcccgcuucuacuucuacaccagcaagacgaccguggccucccugaucaacacccucaacgaccugaacgagacccuggucacgaugccgcucggguacgugacccacggccugaaccuggaggaggcggcccgguacaugcgcagccucaaggugcccgccaccgucuccgugagcucccccgacgccgugaccgccuacaacggguaccugacgagcuccagcaagacccccgaggagcacuucaucgagaccaucucccuggcgggcagcuacaaggacuggagcuacuccggccagagcacccagcucgggaucgaguuccugaagcggggcgacaaguccgucuacuacacgagcaacccgaccaccuuccaccuggacggggaggugaucaccuucgacaaccucaagacgcugcugucccuccgcgaggugcggaccaucaaggucuucaccaccguggacaacaucaaccugcacacgcagguggucgacaugagcaugaccuacggccagcaguucggccccaccuaccuggacggggccgacgugaccaagaucaagccccacaacucccacgagggcaagacguucuacgugcucccgaacgacgacacccugcgcgucgaggccuucgaguacuacuacaccaccgaccccagcuuccuggggcgguacauguccgcccucaaccacacgaagaaguggaaguacccccaggugaacggccugaccagcaucaagugggccgacaacaacugcuaccuggcgaccgcccuccugacccugcagcagaucgagcucaaguucaaccccccggcccugcaggacgccuacuaccgcgcgcgggccggggaggccgccaacuucugcgcccugauccucgcguacugcaacaagacggugggcgagcugggcgacguccgcgagaccauguccuaccuguuccagcacgccaaccucgacagcugcaagcgggugcugaacgucgugugcaagaccugcgggcagcagcagaccacccugaagggcguggaggccgucauguacauggggacgcucuccuacgagcaguucaagaagggcgugcagauccccugcaccugcgggaagcaggccaccaaguaccuggugcagcaggagagccccuucgucaugauguccgcccccccggcgcaguacgagcugaagcacggcaccuucacgugcgccagcgaguacaccggcaacuaccagugcgggcacuacaagcacaucaccuccaaggagacccucuacugcaucgacggcgcccugcugacgaagagcagcgaguacaaggggcccaucaccgacguguucuacaaggagaacuccuacaccaccacgaucaagcccgugaccuacaagcucgacggcgucgugugcaccgagaucgaccccaagcuggacaacuacuacaagaaggacaacagcuacuucaccgagcagccgaucgaccuggugcccaaccagcccuaccccaacgccuccuucgacaacuucaaguucgucugcgacaacaucaaguucgccgacgaccucaaccagcugacgggguacaagaagccggcgagccgcgagcugaaggugaccuucuuccccgaccucaacggcgacguggucgccaucgacuacaagcacuacacccccuccuucaagaagggcgccaagcugcugcacaagcccaucguguggcacgugaacaacgccaccaacaaggcgacguacaagccgaacaccuggugcauccggugccucuggagcaccaagcccgucgagaccuccaacagcuucgacgugcugaaguccgaggacgcccaggggauggacaaccuggccugcgaggaccucaagcccgugagcgaggaggucguggagaaccccacgauccagaaggacgugcuggagugcaacgucaagaccaccgagguggugggcgacaucauccugaagccggccaacaacucccucaagaucaccgaggaggucgggcacacggaccugauggccgcguacguggacaacagcucccugaccaucaagaagcccaacgagcucagccgcgugcugggccugaagacccucgccacccacgggcuggccgccgucaacuccgugcccugggacacgaucgccaacuacgcgaagccguuccugaacaagguggucagcaccaccaccaacaucgugacgcgcugccucaaccgggugugcaccaacuacaugcccuacuucuucacccugcugcuccagcugugcaccuucacccgcuccacgaacagccggaucaaggccuccaugcccaccaccaucgccaagaacaccgucaagagcgugggcaaguucugccuggaggccagcuucaacuaccucaagucccccaacuucagcaagcugaucaacaucaucaucugguuccugcuccuguccgugugccugggcagccucaucuacuccacggccgcgcuggggguccugaugagcaaccucggcaugccguccuacugcaccggguaccgcgagggcuaccugaacagcaccaacgugaccaucgccacguacugcaccggcuccauccccugcagcgugugccuguccgggcucgacagccuggacaccuaccccucccuggagaccauccagaucacgaucagcuccuucaagugggaccucaccgccuucggccuggucgccgagugguuccuggccuacauccucuucacccgguucuucuacgugcuggggcuggcggccaucaugcagcucuucuucagcuacuucgccgugcacuucaucuccaacagcuggcugauguggcugaucaucaaccugguccagauggcccccaucuccgcgauggugcgcauguacaucuucuucgccagcuucuacuacguguggaagagcuacguccacgugguggacggcugcaacuccagcaccugcaugaugugcuacaagcggaaccgcgccacgcgggucgagugcaccaccaucgugaacgggguccgccgguccuucuacguguacgccaacggcggcaagggguucugcaagcuccacaacuggaacugcgugaacugcgacaccuucugcgccggcagcacguucaucuccgacgaggucgcgcgcgaccugagccugcaguucaagcggccgaucaaccccaccgaccaguccagcuacaucguggacuccgugaccgucaagaacgggagcauccaccucuacuucgacaaggccggccagaagaccuacgagcgccacucccugagccacuucgugaaccuggacaaccuccgggccaacaacacgaaggggucccugcccaucaacgugaucgucuucgacggcaagagcaagugcgaggaguccagcgccaaguccgccagcguguacuacucccagcugaugugccagcccauccuccugcuggaccaggcgcucgugagcgacgucggcgacagcgccgagguggccgugaagauguucgacgccuacgucaacaccuucuccagcaccuucaacgugccgauggagaagcugaagacccugguggccacggcggaggccgagcucgccaagaacgucucccuggacaacgugcugagcaccuucaucuccgccgcgcgccagggguucguggacagcgacgucgagaccaaggacgugguggagugccucaagcugucccaccagagcgacaucgaggucaccggcgacuccugcaacaacuacaugcugacguacaacaagguggagaacaugaccccccgggaccucggggccugcaucgacugcagcgcccgccacaucaacgcccagguggccaagucccacaacaucgcgcugaucuggaacgucaaggacuucaugagccuguccgagcagcuccggaagcagauccgcagcgccgccaagaagaacaaccugcccuucaagcugaccugcgccaccacgcgccagguggugaacgucgugaccaccaagaucgcccucaagggcgggugaggacuaguuauaagacugacuagcccgaugggccucccaacgggcccuccuccccuccuugcaccgagauuaauaaaaaaaaaaaaaaaaaaaaaaaaaaaaaaaaaaaaaaaaaaaaaaaaaaaaaaaaaaaaaaaaugcaucccccccccccccccccccccccccccccccaaaggcucuuuucagagccaccagaauu

SEQ ID NO: 21593 - RNA, 6058 nt, Artificial Sequence
  SARS-CoV-2__MT810634.1__non-structural protein 3 (NSP3) mRNA gc
aggagaaagcuuaccauggcccccaccaaggugaccuucggcgacgacacggucaucgaggugcagggguacaagagcgugaacaucaccuucgagcuggacgagcgcaucgacaagguccucaacgagaagugcuccgccuacaccguggagcugggcaccgaggugaacgaguucgcgugcgucguggccgacgccgugaucaagacgcugcagccggucagcgagcuccugaccccccuggggaucgaccucgacgagugguccauggccaccuacuaccuguucgacgagagcggcgaguucaagcuggccucccacauguacugcagcuucuacccccccgacgaggacgaggaggagggggacugcgaggaggaggaguucgagccguccacccaguacgaguacggcacggaggacgacuaccagggcaagccccucgaguucggggcgaccagcgccgcccugcagcccgaggaggagcaggaggaggacuggcuggacgacgacucccagcagaccgugggccagcaggacgggagcgaggacaaccagaccacgaccauccagaccaucguggagguccagccccagcucgagauggagcugaccccgguggugcagacgaucgaggucaacuccuucagcggcuaccugaagcucaccgacaacguguacaucaagaacgccgacaucguggaggaggcgaagaaggucaagcccaccgugguggucaacgccgccaacguguaccugaagcacgggggcggcguggccggggcccugaacaaggcgaccaacaacgccaugcaggucgaguccgacgacuacaucgccacgaacggcccccucaagguggggggcagcugcguccuguccggccacaaccuggccaagcacugccuccacgugguggggcccaacgucaacaagggcgaggacauccagcugcugaagagcgccuacgagaacuucaaccagcacgaggugcuccuggcgccgcugcucuccgccgggaucuucggcgccgaccccauccacagccugcgggugugcgucgacaccgugcgcaccaacguguaccuggccgucuucgacaagaaccucuacgacaagcugguguccagcuuccuggagaugaagagcgagaagcagguggagcagaagaucgccgagauccccaaggaggaggucaagcccuucaucaccgaguccaagccgagcguggagcagcggaagcaggacgacaagaagaucaaggcgugcguggaggaggucacgaccacccucgaggagaccaaguuccugacggagaaccugcuccuguacaucgacaucaacgggaaccugcaccccgacuccgccacccucgugagcgacaucgacaucaccuuccugaagaaggacgcccccuacaucgugggcgacgucgugcaggagggcgugcugaccgccgucgugauccccacgaagaaggccgggggcaccaccgagaugcucgcgaaggcccugcgcaaggugccgaccgacaacuacaucacgaccuaccccgggcagggccugaacggguacaccgucgaggaggccaagaccgugcucaagaagugcaaguccgccuucuacauccugcccagcaucaucuccaacgagaagcaggagauccugggcaccgugagcuggaaccuccgggagaugcuggcgcacgccgaggagacgcgcaagcugaugcccgucugcguggagaccaaggccaucguguccaccauccagcggaaguacaagggcaucaagauccaggagggggucguggacuacggcgcccgcuucuacuucuacaccagcaagacgaccguggccucccugaucaacacccucaacgaccugaacgagacccuggucacgaugccgcucggguacgugacccacggccugaaccuggaggaggcggcccgguacaugcgcagccucaaggugcccgccaccgucuccgugagcucccccgacgccgugaccgccuacaacggguaccugacgagcuccagcaagacccccgaggagcacuucaucgagaccaucucccuggcgggcagcuacaaggacuggagcuacuccggccagagcacccagcucgggaucgaguuccugaagcggggcgacaaguccgucuacuacacgagcaacccgaccaccuuccaccuguacggggaggugaucaccuucgacaaccucaagacgcugcugucccuccgcgaggugcggaccaucaaggucuucaccaccguggacaacaucaaccugcacacgcagguggucgacaugagcaugaccuacggccagcaguucggccccaccuaccuggacggggccgacgugaccaagaucaagccccacaacucccacgagggcaagacguucuacgugcucccgaacgacgacacccugcgcgucgaggccuucgaguacuaccacaccaccgaccccagcuuccuggggcgguacaucuccgcccucaaccacacgaagaaguggaaguacccccaggugaacggccugaccagcaucaagugggccgacaacaacugcuaccuggcgaccgcccuccugacccugcagcagaucgagcucaaguucaaccccccggcccugcaggacgccuacuaccgcgcgcgggccggggaggccgccaacuucugcgcccugauccucgcguacugcaacaagacggugggcgagcugggcgacguccgcgagaccauguccuaccuguuccagcacgccaaccucgacagcugcaagcgggugcugaacgucgugugcaagaccugcgggcagcagcagaccacccugaagggcguggaggccgucauguacauggggacgcucuccuacgagcaguucaagaagggcgugcagauccccugcaccugcgggaagcaggccaccaaguaccuggugcagcaggagagccccuucgucaugauguccgcccccccggcgcaguacgagcugaagcacggcaccuucacgugcgccagcgaguacaccggcaacuaccagugcgggcacuacaagcacaucaccuccaaggagacccucuacugcaucgacggcgcccugcugacgaagagcagcgaguacaaggggcccaucaccgacguguucuacaaggagaacuccuacaccaccacgaucaagcccgugaccuacaagcucgacggcgucgugugcaccgagaucgaccccaagcuggacaacuacuacaagaaggacaacagcuacuucaccgagcagccgaucgaccuggugcccaaccagcccuaccccaacgccuccuucgacaacuucaaguucgucugcgacaacaucaaguucgccgacgaccucaaccagcugacgggguacaagaagccggcgagccgcgagcugaaggugaccuucuuccccgaccucaacggcgacguggucgccaucgacuacaagcacuacacccccuccuucaagaagggcgccaagcugcugcacaagcccaucguguggcacgugaacaacgccaccaacaaggcgacguacaagccgaacaccuggugcauccggugccucuggagcaccaagcccgucgagaccuccaacagcuucgacgugcugaaguccgaggacgcccaggggauggacaaccuggccugcgaggaccucaagcccgugagcgaggaggucguggagaaccccacgauccagaaggacgugcuggagugcaacgucaagaccaccgagguggugggcgacaucauccugaagccggccaacaacucccucaagaucaccgaggaggucgggcacacggaccugauggccgcguacguggacaacagcucccugaccaucaagaagcccaacgagcucagccgcgugcugggccugaagacccucgccacccacgggcuggccgccgucaacggcgugcccugggacacgaucgccaacuacgcgaagccguuccugaacaagguggucuccaccaccaccaacaucgugacgcgcugccucaaccgggugugcaccaacuacaugcccuacuucuucacccugcugcuccagcugugcaccuucacccgcagcacgaacucccggaucaaggccagcaugcccaccaccaucgccaagaacaccgucaaguccgugggcaaguucugccuggaggccagcuucaacuaccucaagagccccaacuucuccaagcugaucaacaucaucaucugguuccugcuccugagcgugugccuggggucccucaucuacagcacggccgcgcugggcguccugauguccaaccucgggaugccgagcuacugcaccggcuaccgcgagggcuaccugaacuccaccaacgugaccaucgccacguacugcaccgggagcauccccugcuccgugugccugagcggccucgacucccuggacaccuaccccagccuggagaccauccagaucacgaucuccagcuucaagugggaccucaccgccuucgggcuggucgccgagugguuccuggccuacauccucuucacccgguucuucuacgugcugggccuggcggccaucaugcagcucuucuucuccuacuucgccgugcacuucaucagcaacuccuggcugauguggcugaucaucaaccugguccagauggcccccaucagcgcgauggugcgcauguacaucuucuucgccuccuucuacuacguguggaagagcuacguccacgugguggacgggugcaacagcuccaccugcaugaugugcuacaagcggaaccgcgccacgcgggucgagugcaccaccaucgugaacggcguccgccggagcuucuacguguacgccaacggcgggaagggcuucugcaagcuccacaacuggaacugcgugaacugcgacaccuucugcgccggguccacguucaucagcgacgaggucgcgcgcgaccugucccugcaguucaagcggccgaucaaccccaccgaccagagcuccuacaucguggacagcgugaccgucaagaacggcuccauccaccucuacuucgacaaggccgggcagaagaccuacgagcgccacagccugucccacuucgugaaccuggacaaccuccgggccaacaacacgaagggcagccugcccaucaacgugaucgucuucgacggcaaguccaagugcgaggagagcuccgccaagagcgccuccguguacuacagccagcugaugugccagcccauccuccugcuggaccaggcgcucguguccgacgucggggacagcgccgagguggccgugaagauguucgacgccuacgucaacaccuucagcuccaccuucaacgugccgauggagaagcugaagacccugguggccacggcggaggccgagcucgccaagaacgucagccuggacaacgugcuguccaccuucaucagcgccgcgcgccagggcuucguggacuccgacgucgagaccaaggacgugguggagugccucaagcugagccaccaguccgacaucgaggucaccggggacagcugcaacaacuacaugcugacguacaacaagguggagaacaugaccccccgggaccucggcgccugcaucgacugcuccgcccgccacaucaacgcccagguggccaagagccacaacaucgcgcugaucuggaacgucaaggacuucaugucccugagcgagcagcuccggaagcagauccgcuccgccgccaagaagaacaaccugcccuucaagcugaccugcgccaccacgcgccagguggugaacgucgugaccaccaagaucgcccucaaggggggcugaggacuaguuauaagacugacuagcccgaugggccucccaacgggcccuccuccccuccuugcaccgagauuaauaaaaaaaaaaaaaaaaaaaaaaaaaaaaaaaaaaaaaaaaaaaaaaaaaaaaaaaaaaaaaaaaugcaucccccccccccccccccccccccccccccccaaaggcucuuuucagagccaccagaauu

SEQ ID NO: 21594 - RNA, 6058 nt, Artificial Sequence
  SARS-CoV-2__MT810640.1__non-structural protein 3 (NSP3) mRNA gc
aggagaaagcuuaccauggcccccaccaaggugaccuucggcgacgacacggucaucgaggugcagggguacaagagcgugaacaucaccuucgagcuggacgagcgcaucgacaagguccucaacgagaagugcuccgccuacaccguggagcugggcaccgaggugaacgaguucgcgugcgucguggccgacgccgugaucaagacgcugcagccggucagcgagcuccugaccccccuggggaucgaccucgacgagugguccauggccaccuacuaccuguucgacgagagcggcgaguucaagcuggccucccacauguacugcagcuucuacccccccgacgaggacgaggaggagggggacugcgaggaggaggaguucgagccguccacccaguacgaguacggcacggaggacgacuaccagggcaagccccucgaguucggggcgaccagcgccgcccugcagcccgaggaggagcaggaggaggacuggcuggacgacgacucccagcagaccgugggccagcaggacgggagcgaggacaaccagaccacgaccauccagaccaucguggagguccagccccagcucgagauggagcugaccccgguggugcagacgaucgaggucaacuccuucagcggcuaccugaagcucaccgacaacguguacaucaagaacgccgacaucguggaggaggcgaagaaggucaagcccaccgugguggucaacgccgccaacguguaccugaagcacgggggcggcguggccggggcccugaacaaggcgaccaacaacgccaugcaggucgaguccgacgacuacaucgccacgaacggcccccucaagguggggggcagcugcguccuguccggccacaaccuggccaagcacugccuccacgugguggggcccaacgucaacaagggcgaggacauccagcugcugaagagcgccuacgagaacuucaaccagcacgaggugcuccuggcgccgcugcucuccgccgggaucuucggcgccgaccccauccacagccugcgggugugcgucgacaccgugcgcaccaacguguaccuggccgucuucgacaagaaccucuacgacaagcugguguccagcuuccuggagaugaagagcgagaagcagguggagcagaagaucgccgagauccccaaggaggaggucaagcccuucaucaccgaguccaagccgagcguggagcagcggaagcaggacgacaagaagaucaaggcgugcguggaggaggucacgaccacccucgaggagaccaaguuccugacggagaaccugcuccuguacaucgacaucaacgggaaccugcaccccgacuccgccacccucgugagcgacaucgacaucaccuuccugaagaaggacgcccccuacaucgugggcgacgucgugcaggagggcgugcugaccgccgucgugauccccacgaagaaggccgggggcaccaccgagaugcucgcgaaggcccugcgcaaggugccgaccgacaacuacaucacgaccuaccccgggcagggccugaacggguacaccgucgaggaggccaagaccgugcucaagaagugcaaguccgccuucuacauccugcccagcaucaucuccaacgagaagcaggagauccugggcaccgugagcuggaaccuccgggagaugcuggcgcacgccgaggagacgcgcaagcugaugcccgucugcguggagaccaaggccaucguguccaccauccagcggaaguacaagggcaucaagauccaggagggggucguggacuacggcgcccgcuucuacuucuacaccagcaagacgaccguggccucccugaucaacacccucaacgaccugaacgagacccuggucacgaugccgcucggguacgugacccacggccugaaccuggaggaggcggcccgguacaugcgcagccucaaggugcccgccaccgucuccgugagcucccccgacgccgugaccgccuacaacggguaccugacgagcuccagcaagacccccgaggagcacuucaucgagaccaucucccuggcgggcagcuacaaggacuggagcuacuccggccagagcacccagcucgggaucgaguuccugaagcggggcgacaaguccgucuacuacacgagcaacccgaccaccuuccaccuguacggggaggugaucaccuucgacaaccucaagacgcugcugucccuccgcgaggugcggaccaucaaggucuucaccaccguggacaacaucaaccugcacacgcagguggucgacaugagcaugaccuacggccagcaguucggccccaccuaccuggacggggccgacgugaccaagaucaagccccacaacucccacgagggcaagacguucuacgugcucccgaacgacgacacccugcgcgucgaggccuucgaguacuaccacaccaccgaccccagcuuccuggggcgguacaucuccgcccucaaccacacgaagaaguggaaguacccccaggugaacggccugaccagcaucaagugggccgacaacaacugcuaccuggcgaccgcccuccugacccugcagcagaucgagcucaaguucaaccccccggcccugcaggacgccuacuaccgcgcgcgggccggggaggccgccaacuucugcgcccugauccucgcguacugcaacaagacggugggcgagcugggcgacguccgcgagaccauguccuaccuguuccagcacgccaaccucgacagcugcaagcgggugcugaacgucgugugcaagaccugcgggcagcagcagaccacccugaagggcguggaggccgucauguacauggggacgcucuccuacgagcaguucaagaagggcgugcagauccccugcaccugcgggaagcaggccaccaaguaccuggugcagcaggagagccccuucgucaugauguccgcccccccggcgcaguacgagcugaagcacggcaccuucacgugcgccagcgaguacaccggcaacuaccagugcgggcacuacaagcacaucaucuccaaggagacccucuacugcaucgacggcgcccugcugaccaagagcagcgaguacaaggggcccaucacggacguguucuacaaggagaacuccuacaccaccaccaucaagcccgugacguacaagcucgacggcgucgugugcaccgagaucgaccccaagcuggacaacuacuacaagaaggacaacagcuacuucaccgagcagccgaucgaccuggugcccaaccagcccuaccccaacgccuccuucgacaacuucaaguucgucugcgacaacaucaaguucgccgacgaccucaaccagcugaccggguacaagaagccggcgagccgcgagcugaaggugacguucuuccccgaccucaacggcgacguggucgccaucgacuacaagcacuacacccccuccuucaagaagggcgccaagcugcugcacaagcccaucguguggcacgugaacaacgccaccaacaaggcgaccuacaagccgaacacguggugcauccggugccucuggagcaccaagcccgucgagaccuccaacagcuucgacgugcugaaguccgaggacgcccaggggauggacaaccuggccugcgaggaccucaagcccgugagcgaggaggucguggagaaccccaccauccagaaggacgugcuggagugcaacgucaagacgaccgagguggugggcgacaucauccugaagccggccaacaacucccucaagaucaccgaggaggucgggcacaccgaccugauggccgcguacguggacaacagcucccugacgaucaagaagcccaacgagcucagccgcgugcugggccugaagacccucgccacccacgggcuggccgccgucaacuccgugcccugggacaccaucgccaacuacgcgaagccguuccugaacaagguggucagcacgaccaccaacaucgugacccgcugccucaaccgggugugcacgaacuacaugcccuacuucuucacccugcugcuccagcugugcaccuucacccgcuccaccaacagccggaucaaggccuccaugcccacgaccaucgccaagaacaccgucaagagcgugggcaaguucugccuggaggccagcuucaacuaccucaagucccccaacuucagcaagcugaucaacaucaucaucugguuccugcuccuguccgugugccugggcagccucaucuacuccaccgccgcgcuggggguccugaugagcaaccucggcaugccguccuacugcacgggguaccgcgagggcuaccugaacagcaccaacgugaccaucgccaccuacugcacgggcuccauccccugcagcgugugccuguccgggcucgacagccuggacaccuaccccucccuggagaccauccagaucaccaucagcuccuucaagugggaccucacggccuucggccuggucgccgagugguuccuggccuacauccucuucacccgguucuucuacgugcuggggcuggcggccaucaugcagcucuucuucagcuacuucgccgugcacuucaucuccaacagcuggcugauguggcugaucaucaaccugguccagauggcccccaucuccgcgauggugcgcauguacaucuucuucgccagcuucuacuacguguggaagagcuacguccacgugguggacggcugcaacuccagcaccugcaugaugugcuacaagcggaaccgcgccacccgggucgagugcacgaccaucgugaacgggguccgccgguccuucuacguguacgccaacggcggcaagggguucugcaagcuccacaacuggaacugcgugaacugcgacaccuucugcgccggcagcaccuucaucuccgacgaggucgcgcgcgaccugagccugcaguucaagcggccgaucaaccccacggaccaguccagcuacaucguggacuccgugaccgucaagaacgggagcauccaccucuacuucgacaaggccggccagaagaccuacgagcgccacucccugagccacuucgugaaccuggacaaccuccgggccaacaacaccaaggggucccugcccaucaacgugaucgucuucgacggcaagagcaagugcgaggaguccagcgccaaguccgccagcguguacuacucccagcugaugugccagcccauccuccugcuggaccaggcgcucgugagcgacgucggcgacagcgccgagguggccgugaagauguucgacgccuacgucaacacguucuccagcaccuucaacgugccgauggagaagcugaagacccugguggccaccgcggaggccgagcucgccaagaacgucucccuggacaacgugcugagcacguucaucuccgccgcgcgccagggguucguggacagcgacgucgagaccaaggacgugguggagugccucaagcugucccaccagagcgacaucgaggucaccggcgacuccugcaacaacuacaugcugaccuacaacaagguggagaacaugacgccccgggaccucggggccugcaucgacugcagcgcccgccacaucaacgcccagguggccaagucccacaacaucgcgcugaucuggaacgucaaggacuucaugagccuguccgagcagcuccggaagcagauccgcagcgccgccaagaagaacaaccugcccuucaagcugaccugcgccaccacccgccagguggugaacgucgugacgaccaagaucgcccucaagggcgggugaggacuaguuauaagacugacuagcccgaugggccucccaacgggcccuccuccccuccuugcaccgagauuaauaaaaaaaaaaaaaaaaaaaaaaaaaaaaaaaaaaaaaaaaaaaaaaaaaaaaaaaaaaaaaaaaugcaucccccccccccccccccccccccccccccccaaaggcucuuuucagagccaccagaauu

SEQ ID NO: 21595 - RNA, 6058 nt, Artificial Sequence
  SARS-CoV-2__MT810661.1__non-structural protein 3 (NSP3) mRNA gc
aggagaaagcuuaccauggcccccaccaaggugaccuucggcgacgacacggucaucgaggugcagggguacaagagcgugaacaucaccuucgagcuggacgagcgcaucgacaagguccucaacgagaagugcuccgccuacaccguggagcugggcaccgaggugaacgaguucgcgugcgucguggccgacgccgugaucaagacgcugcagccggucagcgagcuccugaccccccuggggaucgaccucgacgagugguccauggccaccuacuaccuguucgacgagagcggcgaguucaagcuggccucccacauguacugcagcuucuacccccccgacgaggacgaggaggagggggacugcgaggaggaggaguucgagccguccacccaguacgaguacggcacggaggacgacuaccagggcaagccccucgaguucggggcgaccagcgccgcccugcagcccgaggaggagcaggaggaggacuggcuggacgacgacucccagcagaccgugggccagcaggacgggagcgaggacaaccagaccacgaccauccagaccaucguggagguccagccccagcucgagauggagcugaccccgguggugcagacgaucgaggucaacuccuucagcggcuaccugaagcucaccgacaacguguacaucaagaacgccgacaucguggaggaggcgaagaaggucaagcccaccgugguggucaacgccgccaacguguaccugaagcacgggggcggcguggccggggcccugaacaaggcgaccaacaacgccaugcaggucgaguccgacgacuacaucgccacgaacggcccccucaagguggggggcagcugcguccuguccggccacaaccuggccaagcacugccuccacgugguggggcccaacgucaacaagggcgaggacauccagcugcugaagagcgccuacgagaacuucaaccagcacgaggugcuccuggcgccgcugcucuccgccgggaucuucggcgccgaccccauccacagccugcgggugugcgucgacaccgugcgcaccaacguguaccuggccgucuucgacaagaaccucuacgacaagcugguguccagcuuccuggagaugaagagcgagaagcagguggagcagaagaucgccgagauccccaaggaggaggucaagcccuucaucaccgaguccaagccgagcguggagcagcggaagcaggacgacaagaagaucaaggcgugcguggaggaggucacgaccacccucgaggagaccaaguuccugacggagaaccugcuccuguacaucgacaucaacgggaaccugcaccccgacuccgccacccucgugagcgacaucgacaucaccuuccugaagaaggacgcccccuacaucgugggcgacgucgugcaggagggcgugcugaccgccgucgugauccccacgaagaaggccgggggcaccaccgagaugcucgcgaaggcccugcgcaaggugccgaccgacaacuacaucacgaccuaccccgggcagggccugaacggguacaccgucgaggaggccaagaccgugcucaagaagugcaaguccgccuucuacauccugcccagcaucaucuccaacgagaagcaggagauccugggcaccgugagcuggaaccuccgggagaugcuggcgcacgccgaggagacgcgcaagcugaugcccgucugcguggagaccaaggccaucguguccaccauccagcggaaguacaagggcaucaagauccaggagggggucguggacuacggcgcccgcuucuacuucuacaccagcaagacgaccguggccucccugaucaacacccucaacgaccugaacgagacccuggucacgaugccgcucggguacgugacccacggccugaaccuggaggaggcggcccgguacaugcgcagccucaaggugcccgccaccgucuccgugagcucccccgacgccgugaccgccuacaacggguaccugacgagcuccagcaagacccccgaggagcacuucaucgagaccaucucccuggcgggcagcuacaaggacuggagcuacuccggccagagcacccagcucgggaucgaguuccugaagcggggcgacaaguccgucuacuacacgagcaacccgaccaccuuccaccuggacggggaggugaucaccuucgacaaccucaagacgcugcugucccuccgcgaggugcggaccaucaaggucuucaccaccguggacaacaucaaccugcacacgcagguggucgacaugagcaugaccuacggccagcaguucggccccaccuaccuggacggggccgacgugaccaagaucaagccccacaacucccacgagggcaagacguucuacgugcucccgaacgacgacacccugcgcgucgaggccuucgaguacuaccacaccaccgaccccagcuuccuggggcgguacauguccgcccucaaccacacgaagaaguggaaguacccccaggugaacggccugaccagcaucaagugggccgacaacaacugcuaccuggcgaccgcccuccugacccugcagcagaucgagcucaaguucaaccccccggcccugcaggacgccuacuaccgcgcgcgggccggggaggccgccaacuucugcgcccugauccucgcguacugcaacaagacggugggcgagcugggcgacguccgcgagaccauguccuaccuguuccagcacgccaaccucgacagcugcaagcgggugcugaacgucgugugcaagaccugcgggcagcagcagaccacccugaagggcguggaggccgucauguacauggggacgcucuccuacgagcaguucaagaagggcgugcagauccccugcaccugcgggaagcaggccaccaaguaccuggugcagcaggagagccccuucgucaugauguccgcccccccggcgcaguacgagcugaagcacggcaccuucacgugcgccagcgaguacaccggcaacuaccagugcgggcacuacaagcacaucaccuccaaggagacccucuacugcaucgacggcgcccugcugacgaagagcagcgaguacaaggggcccaucaccgacguguucuacaaggagaacuccuacaccaccacgaucaagcccgugaccuacaagcucgacggcgucgugugcaccgagaucgaccccaagcuggacaacuacuacaagaaggacaacagcuacuucaccgagcagccgaucgaccugcuccccaaccagcccuaccccaacgccuccuucgacaacuucaaguucgugugcgacaacaucaaguucgccgacgaccugaaccagcugacgggguacaagaagccggcgagccgcgagcucaaggucaccuucuuccccgaccugaacggcgacgugguggccaucgacuacaagcacuacacccccuccuucaagaagggcgccaagcugcuccacaagcccaucgucuggcacgugaacaacgccaccaacaaggcgacguacaagccgaacaccuggugcauccggugccuguggagcaccaagcccguggagaccuccaacagcuucgacguccugaaguccgaggacgcccaggggauggacaaccucgccugcgaggaccugaagcccgugagcgaggagguggucgagaaccccacgauccagaaggacauccuggagugcaacgugaagaccaccgagguggucggcgacaucauccucaagccggccaacaacucccugaagaucaccgaggagguggggcacacggaccugauggccgcguacguggacaacagcucccucaccaucaagaagcccaacgagcugagccgcguccugggccucaagacccuggccacccacgggcuggccgccgugaacuccgugcccugggacacgaucgccaacuacgcgaagccguuccucaacaaggucgugagcaccaccaccaacaucgugacgcgcugccugaaccgggucugcaccaacuacaugcccuacuucuucacccugcuccugcagcugugcaccuucacccgcuccacgaacagccggaucaaggccuccaugcccaccaccaucgccaagaacaccgugaagagcgugggcaaguucugccucgaggccagcuucaacuaccugaagucccccaacuucagcaagcugaucaacaucaucaucugguuccuccugcuguccgucugccucggcagccugaucuacuccacggccgcgcugggggugcucaugagcaaccugggcaugccguccuacugcaccggguaccgcgagggcuaccugaacagcaccaacgugaccaucgccacguacugcaccggcuccauccccugcagcgucugccucuccgggcuggacagccuggacaccuaccccucccucgagaccauccagaucacgaucagcuccuucaagugggaccugaccgccuucggccugguggccgagugguuccucgccuacauccuguucacccgguucuucuacgugcuggggcucgcggccaucaugcagcuguucuucagcuacuucgccguccacuucaucuccaacagcuggcugauguggcugaucaucaaccucgugcagauggcccccaucuccgcgauggugcgcauguacaucuucuucgccagcuucuacuacgucuggaagagcuacgugcacguggucgacggcugcaacuccagcaccugcaugaugugcuacaagcggaaccgcgccacgcggguggagugcaccaccaucgugaacgggguccgccgguccuucuacguguacgccaacggcggcaagggguucugcaagcugcacaacuggaacugcgucaacugcgacaccuucugcgccggcagcacguucaucuccgacgagguggcgcgcgaccugagccuccaguucaagcggccgaucaaccccaccgaccaguccagcuacaucguggacuccgucaccgugaagaacgggagcauccaccuguacuucgacaaggccggccagaagaccuacgagcgccacucccugagccacuucgugaaccucgacaaccugcgggccaacaacacgaaggggucccugcccaucaacgucaucguguucgacggcaagagcaagugcgaggaguccagcgccaaguccgccagcguguacuacucccagcucaugugccagcccauccugcugcucgaccaggcgcuggucagcgacgugggcgacagcgccgagguggccgucaagauguucgacgccuacgugaacaccuucuccagcaccuucaacgugccgauggagaagcugaagacccucgucgccacggcggaggccgagcuggccaagaacgugucccuggacaacgugcucagcaccuucaucuccgccgcgcgccagggguucgucgacagcgacguggagaccaaggacguggucgagugccugaagcugucccaccagagcgacaucgaggugaccggcgacuccugcaacaacuacaugcucacguacaacaagguggagaacaugaccccccgggaccugggggccugcaucgacugcagcgcccgccacaucaacgcccaggucgccaagucccacaacaucgcgcugaucuggaacgugaaggacuucaugagccucuccgagcagcugcggaagcagauccgcagcgccgccaagaagaacaaccugcccuucaagcucaccugcgccaccacgcgccagguggucaacguggugaccaccaagaucgcccugaagggcgggugaggacuaguuauaagacugacuagcccgaugggccucccaacgggcccuccuccccuccuugcaccgagauuaauaaaaaaaaaaaaaaaaaaaaaaaaaaaaaaaaaaaaaaaaaaaaaaaaaaaaaaaaaaaaaaaaugcaucccccccccccccccccccccccccccccccaaaggcucuuuucagagccaccagaauu

SEQ ID NO: 21596 - RNA, 6058 nt, Artificial Sequence
  SARS-CoV-2__MT810690.1__non-structural protein 3 (NSP3) mRNA gc
aggagaaagcuuaccauggcccccaccaaggugaccuucggcgacgacacggucaucgaggugcagggguacaagagcgugaacaucaccuucgagcuggacgagcgcaucgacaagguccucaacgagaagugcuccgccuacaccguggagcugggcaccgaggugaacgaguucgcgugcgucguggccgacgccgugaucaagacgcugcagccggucagcgagcuccugaccccccuggggaucgaccucgacgagugguccauggccaccuacuaccuguucgacgagagcggcgaguucaagcuggccucccacauguacugcagcuucuacccccccgacgaggacgaggaggagggggacugcgaggaggaggaguucgagccguccacccaguacgaguacggcacggaggacgacuaccagggcaagccccucgaguucggggcgaccagcgccgcccugcagcccgaggaggagcaggaggaggacuggcuggacgacgacucccagcagaccgugggccagcaggacgggagcgaggacaaccagaccacgaccauccagaccaucguggagguccagccccagcucgagauggagcugaccccgguggugcagacgaucgaggucaacuccuucagcggcuaccugaagcucaccgacaacguguacaucaagaacgccgacaucguggaggaggcgaagaaggucaagcccaccgugguggucaacgccgccaacguguaccugaagcacgggggcggcguggccggggcccugaacaaggcgaccaacaacgccaugcaggucgaguccgacgacuacaucgccacgaacggcccccucaagguggggggcagcugcguccuguccggccacaaccuggccaagcacugccuccacgugguggggcccaacgucaacaagggcgaggacauccagcugcugaagagcgccuacgagaacuucaaccagcacgaggugcuccuggcgccgcugcucuccgccgggaucuucggcgccgaccccauccacagccugcgggugugcgucgacaccgugcgcaccaacguguaccuggccgucuucgacaagaaccucuacgacaagcugguguccagcuuccuggagaugaagagcgagaagcagguggagcagaagaucgccgagauccccaaggaggaggucaagcccuucaucaccgaguccaagccgagcguggagcagcggaagcaggacgacaagaagaucaaggcgugcguggaggaggucacgaccacccucgaggagaccaaguuccugacggagaaccugcuccuguacaucgacaucaacgggaaccugcaccccgacuccgccacccucgugagcgacaucgacaucaccuuccugaagaaggacgcccccuacaucgugggcgacgucgugcaggagggcgugcugaccgccgucgugauccccacgaagaaggccgggggcaccaccgagaugcucgcgaaggcccugcgcaaggugccgaccgacaacuacaucacgaccuaccccgggcagggccugaacggguacaccgucgaggaggccaagaccgugcucaagaagugcaaguccgccuucuacauccugcccagcaucaucuccaacgagaagcaggagauccugggcaccgugagcuggaaccuccgggagaugcuggcgcacgccgaggagacgcgcaagcugaugcccgucugcguggagaccaaggccaucguguccaccauccagcggaaguacaagggcaucaagauccaggagggggucguggacuacggcgcccgcuucuacuucuacaccagcaagacgaccguggccucccugaucaacacccucaacgaccugaacgagacccuggucacgaugccgcucggguacgugacccacggccugaaccuggaggaggcggcccgguacaugcgcagccucaaggugcccgccaccgucuccgugagcucccccgacgccgugaccgccuacaacggguaccugacgagcuccagcaagacccccgaggagcacuucaucgagaccaucucccuggcgggcagcuacaaggacuggagcuacuccggccagagcacccagcucgggaucgaguuccugaagcggggcgacaaguccgucuacuacacgagcaacccgaccaccuuccaccuggacggggaggugaucaccuucgacaaccucaagacgcugcugucccuccgcgaggugcggaccaucaaggucuucaccaccguggacaacaucaaccugcacacgcagguggucgacaugagcaugaccuacggccagcaguucggccccaccuaccuggacggggccgacgugaccaagaucaagccccacaacucccacgagggcaagacguucuacgugcucccgaacgacgacacccugcgcgucgaggccuucgaguacuaccacaccaccgaccccagcuuccuggggcgguacauguccgcccucaaccacacgaagaaguggaaguacccccaggugaacggccugaccagcaucaagugggccgacaacaacugcuaccuggcgaccgcccuccugacccugcagcagaucgagcucaaguucaaccccccggcccugcaggacgccuacuaccgcgcgcgggccggggaggccgccaacuucugcgcccugauccucgcguacugcaacaagacggugggcgagcugggcgacguccgcgagaccauguccuaccuguuccagcacgccaaccucgacagcugcaagcgggugcugaacgucgugugcaagaccugcgggcagcagcagaccacccugaagggcguggaggccgucauguacauggggacgcucuccuacgagcaguucaagaagggcgugcagauccccugcaccugcgggaagcaggccaccaaguaccuggugcagcaggagagccccuucgucaugauguccgcccccccggcgcaguacgagcugaagcacggcaccuucacgugcgccagcgaguacaccggcaacuaccagugcgggcacuacaagcacaucaccuccaaggagacccucuacugcaucgacggcgcccugcugacgaagagcagcgaguacaaggggcccaucaccgacguguucuacaaggagaacuccuacaccaccacgaucaagcccgugaccuacaagcucgacggcgucgugugcaccgagaucgaccccaagcuggacaacuacuacaagaaggacaacagcuacuucaccgagcagccgaucgaccuggugcccaaccagcccuaccccaacgccuccuucgacaacuucaaguucgucugcgacaacaucaaguucgccgacgaccucaaccagcugacgggguacaagaagccggcgagccgcgagcugaaggugaccuucuuccccgaccucaacggcgacguggucgccaucgacuacaagcacuacacccccuccuucaagaagggcgccaagcugcugcacaagcccaucguguggcacgugaacaacgccaccaacaaggcgacguacaagccgaacaccuggugcauccggugccucuggagcaccaagcccgucgagaccuccaacagcuucgacgugcugaaguccgaggacgcccaggggauggacaaccuggccugcgaggaccucaagcccgugagcgaggaggucguggagaaccccacgauccagaaggacgugcuggagugcaacgucaagaccaccgagguggugggcgacaucauccugaagccggccaacaacucccucaagaucaccgaggaggucgggcacacggaccugauggccgcguacguggacaacagcucccugaccaucaagaagcccaacgagcucagccgcgugcugggccugaagacccucgccacccacgggcuggccgccgucaacuccgugcccugggacacgaucgccaacuacgcgaagccguuccugaacaagguggucagcaccaccaccaacaucgugacgcgcugccucaaccgggugugcaccaacuacaugcccuacuucuucacccugcugcuccagcugugcaccuucacccgcuccacgaacagccggaucaaggccuccaugagcaccaccaucgccaagaacaccgucaagagcgugggcaaguucugccuggaggccuccuucaacuaccucaagagccccaacuucuccaagcugaucaacaucaucaucugguuccugcuccugagcgugugccugggcucccucaucuacagcacggccgcgcuggggguccugauguccaaccucggcaugcccagcuacugcaccggguaccgcgagggcuaccugaacuccaccaacgugaccaucgccacguacugcaccggcagcaucccgugcuccgugugccugagcgggcucgacucccuggacaccuaccccagccuggagaccauccagaucacgaucuccagcuucaagugggaccucaccgccuucggccuggucgccgagugguuccuggccuacauccucuucacccgguucuucuacgugcuggggcuggcggccaucaugcagcucuucuucuccuacuucgccgugcacuucaucagcaacuccuggcugauguggcugaucaucaaccugguccagauggcccccaucagcgcgauggugcgcauguacaucuucuucgccagcuucuacuacguguggaaguccuacguccacgugguggacggcugcaacagcuccaccugcaugaugugcuacaagcggaaccgcgccacgcgggucgagugcaccaccaucgugaacgggguccgccggagcuucuacguguacgccaacggcggcaagggguucugcaagcuccacaacuggaacugcgugaacugcgacaccuucugcgccggcuccacguucaucagcgacgaggucgcgcgcgaccugucccugcaguucaagcggcccaucaacccgaccgaccagagcuccuacaucguggacagcgugaccgucaagaacggguccauccaccucuacuucgacaaggccggccagaagaccuacgagcgccacagccugucccacuucgugaaccuggacaaccuccgggccaacaacacgaaggggagccugcccaucaacgugaucgucuucgacggcaaguccaagugcgaggagagcuccgccaagagcgccuccguguacuacagccagcugaugugccagcccauccuccugcuggaccaggcgcucgugagcgacgucggcgacuccgccgagguggccgugaagauguucgacgccuacgucaacaccuucagcuccaccuucaacgugcccauggagaagcugaagacccugguggccacggcggaggccgagcucgccaagaacgucagccuggacaacgugcuguccaccuucaucagcgccgcgcgccagggguucguggacuccgacgucgagaccaaggacgugguggagugccucaagcugagccaccaguccgacaucgaggucaccggcgacagcugcaacaacuacaugcugacguacaacaagguggagaacaugaccccgcgggaccucggggccugcaucgacugcuccgcccgccacaucaacgcccagguggccaagagccacaacaucgcgcugaucuggaacgucaaggacuucaugucccugagcgagcagcuccggaagcagauccgcuccgccgccaagaagaacaaccugcccuucaagcugaccugcgccaccacgcgccagguggugaacgucgugaccaccaagaucgcccucaagggcgggugaggacuaguuauaagacugacuagcccgaugggccucccaacgggcccuccuccccuccuugcaccgagauuaauaaaaaaaaaaaaaaaaaaaaaaaaaaaaaaaaaaaaaaaaaaaaaaaaaaaaaaaaaaaaaaaaugcaucccccccccccccccccccccccccccccccaaaggcucuuuucagagccaccagaauu

SEQ ID NO: 21597 - RNA, 6058 nt, Artificial Sequence
  SARS-CoV-2__MT810701.1__non-structural protein 3 (NSP3) mRNA gc
aggagaaagcuuaccauggcccccaccaaggugaccuucggcgacgacacggucaucgaggugcagggguacaagagcgugaacaucaccuucgagcuggacgagcgcaucgacaagguccucaacgagaagugcuccgccuacaccguggagcugggcaccgaggugaacgaguucgcgugcgucguggccgacgccgugaucaagacgcugcagccggucagcgagcuccugaccccccuggggaucgaccucgacgagugguccauggccaccuacuaccuguucgacgagagcggcgaguucaagcuggccucccacauguacugcagcuucuacccccccgacgaggacgaggaggagggggacugcgaggaggaggaggaguucgagccguccacccaguacgaguacggcacggaggacgacuaccagggcaagccccucgaguucggggcgaccagcgccgcccugcagcccgaggaggagcaggaggaggacuggcuggacgacgacucccagcagaccgugggccagcaggacgggagcgaggacaaccagaccacgaccauccagaccaucguggagguccagccccagcucgagauggagcugaccccgguggugcagacgaucgaggucaacuccuucagcggcuaccugaagcucaccgacaacguguacaucaagaacgccgacaucguggaggaggcgaagaaggucaagcccaccgugguggucaacgccgccaacguguaccugaagcacgggggcggcguggccggggcccugaacaaggcgaccaacaacgccaugcaggucgaguccgacgacuacaucgccacgaacggcccccucaagguggggggcagcugcguccuguccggccacaaccuggccaagcacugccuccacgugguggggcccaacgucaacaagggcgaggacauccagcugcugaagagcgccuacgagaacuucaaccagcacgaggugcuccuggcgccgcugcucuccgccgggaucuucggcgccgaccccauccacagccugcgggugugcgucgacaccgugcgcaccaacguguaccuggccgucuucgacaagaaccucuacgacaagcugguguccagcuuccuggagaugaagagcgagaagcagguggagcagaagaucgccgagauccccaaggaggaggucaagcccuucaucaccgaguccaagccgagcguggagcagcggaagcaggacgacaagaagaucaaggcgugcguggaggaggucacgaccacccucgaggagaccaaguuccugacggagaaccugcuccuguacaucgacaucaacgggaaccugcaccccgacuccgccacccucgugagcgacaucgacaucaccuuccugaagaaggacgcccccuacaucgugggcgacgucgugcaggagggcgugcugaccgccgucgugauccccacgaagaaggccgggggcaccaccgagaugcucgcgaaggcccugcgcaaggugccgaccgacaacuacaucacgaccuaccccgggcagggccugaacggguacaccgucgaggaggccaagaccgugcucaagaagugcaaguccgccuucuacauccugcccagcaucaucuccaacgagaagcaggagauccugggcaccgugagcuggaaccuccgggagaugcuggcgcacgccgaggagacgcgcaagcugaugcccgucugcguggagaccaaggccaucguguccaccauccagcggaaguacaagggcaucaagauccaggagggggucguggacuacggcgcccgcuucuacuucuacaccagcaagacgaccguggccucccugaucaacacccucaacgaccugaacgagacccuggucacgaugccgcucggguacgugacccacggccugaaccuggaggaggcggcccgguacaugcgcagccucaaggugcccgccaccgucuccgugagcucccccgacgccgugaccgccuacaacggguaccugacgagcuccagcaagacccccgaggagcacuucaucgagaccaucucccuggcgggcagcuacaaggacuggagcuacuccggccagagcacccagcucgggaucgaguuccugaagcggggcgacaaguccgucuacuacacgagcaacccgaccaccuuccaccuggacggggaggugaucaccuucgacaaccucaagacgcugcugucccuccgcgaggugcggaccaucaaggucuucaccaccguggacaacaucaaccugcacacgcagguggucgacaugagcaugaccuacggccagcaguucggccccaccuaccuggacggggccgacgugaccaagaucaagccccacaacucccacgagggcaagacguucuacgugcucccgaacgacgacacccugcgcgucgaggccuucgaguacuaccacaccaccgaccccagcuuccuggggcgguacauguccgcccucaaccacacgaagaaguggaaguacccccaggugaacggccugaccagcaucaagugggccgacaacaacugcuaccuggcgaccgcccuccugacccugcagcagaucgagcucaaguucaaccccccggcccugcaggacgccuacuaccgcgcgcgggccggggaggccgccaacuucugcgcccugauccucgcguacugcaacaagacggugggcgagcugggcgacguccgcgagaccauguccuaccuguuccagcacgccaaccucgacagcugcaagcgggugcugaacgucgugugcaagaccugcgggcagcagcagaccacccugaagggcguggaggccgucauguacauggggacgcucuccuacgagcaguucaagaagggcgugcagauccccugcaccugcgggaagcaggccaccaaguaccuggugcagcaggagagccccuucgucaugauguccgcccccccggcgcaguacgagcugaagcacggcaccuucacgugcgccagcgaguacaccggcaacuaccagugcgggcacuacaagcacaucaccuccaaggagacccucuacugcaucgacggcgcccugcugacgaagagcagcgaguacaaggggcccaucaccgacguguucuacaaggagaacuccuacaccaccacgaucaagcccgugaccuacaagcucgacggcgucgugugcaccgagaucgaccccaagcuggacaacuacuacaagaaggacaacagcuacuucaccgagcagccgaucgaccuggugcccaaccagcccuaccccaacgccuccuucgacaacuucaaguucgucugcgacaacaucaaguucgccgacgaccucaaccagcugacgggguacaagaagccggcgagccgcgagcugaaggugaccuucuuccccgaccucaacggcgacguggucgccaucgacuacaagcacuacacccccuccuucaagaagggcgccaagcugcugcacaagcccaucguguggcacgugaacaacgccaccaacaaggcgacguacaagccgaacaccuggugcauccggugccucuggagcaccaagcccgucgagaccuccaacagcuucgacgugcugaaguccgaggacgcccaggggauggacaaccuggccugcgaggaccucaagcccgugagcgaggaggucguggagaaccccacgauccagaaggacgugcuggagugcaacgucaagaccaccgagguggugggcgacaucauccugaagccggccaacaacucccucaagaucaccgaggaggucgggcacacggaccugauggccgcguacguggacaacagcucccugaccaucaagaagcccaacgagcucagccgcgugcugggccugaagacccucgccacccacgggcuggccgccgucaacuccgugcccugggacacgaucgccaacuacgcgaagccguuccugaacaagguggucagcaccaccaccaacaucgugacgcgcugccucaaccgggugugcaccaacuacaugcccuacuucuucacccugcugcuccagcugugcaccuucacccgcuccacgaacagccggaucaaggccuccaugcccaccaccaucgccaagaacaccgucaagagcgugggcaaguucugccuggaggccagcuucaacuaccucaagucccccaacuucagcaagcugaucaacaucaucaucugguuccugcuccuguccgugugccugggcagccucaucuacuccacggccgcgcuggggguccugaugagcaaccucggcaugccguccuacugcaccggguaccgcgagggcuaccugaacagcaccaacgugaccaucgccacguacugcaccggcuccauccccugcagcgugugccuguccgggcucgacagccuggacaccuaccccucccuggagaccauccagaucacgaucagcuccuucaagugggaccucaccgccuucggccuggucgccgagugguuccuggccuacauccucuucacccgguucuucuacgugcuggggcuggcggccaucaugcagcucuucuucagcuacuucgccgugcacuucaucuccaacagcuggcugauguggcugaucaucaaccugguccagauggcccccaucuccgcgauggugcgcauguacaucuucuucgccagcuucuacuacguguggaagagcuacguccacgugguggacggcugcaacuccagcaccugcaugaugugcuacaagcggaaccgcgccacgcgggucgagugcaccaccaucgugaacgggguccgccgguccuucuacguguacgccaacggcggcaagggguucugcaagcuccacaacuggaacugcgugaacugcgacaccuucugcgccggcagcacguucaucuccgacgaggucgcgcgcgaccugagccugcaguucaagcggccgaucaaccccaccgaccaguccagcuacaucguggacuccgugaccgucaagaacgggagcauccaccucuacuucgacaaggccggccagaagaccuacgagcgccacucccugagccacuucgugaaccuggacaaccuccgggccaacaacacgaaggggucccugcccaucaacgugaucgucuucgacggcaagagcaagugcgaggaguccagcgccaaguccgccagcguguacuacucccagcugaugugccagcccauccuccugcuggaccaggcgcucgugagcgacgucggcgacagcgccgagguggccgugaagauguucgacgccuacgucaacaccuucuccagcaccuucaacgugccgauggagaagcugaagacccugguggccacggcggaggccgagcucgccaagaacgucucccuggacaacgugcugagcaccuucaucuccgccgcgcgccagggguucguggacagcgacgucgagaccaaggacgugguggagugccucaagcugucccaccagagcgacaucgaggucaccggcgacuccugcaacaacuacaugcugacguacaacaagguggagaacaugaccccccgggaccucggggccugcaucgacugcagcgcccgccacaucaacgcccagguggccaagucccacaacaucgcgcugaucuggaacgucaaggacuucaugagccuguccgagcagcuccggaagcagauccgcagcgccgccaagaagaacaaccugcccuucaagcugaccugcgccaccacgcgccagguggugaacgucgugaccaccaagaucgcccucaagggcugaggacuaguuauaagacugacuagcccgaugggccucccaacgggcccuccuccccuccuugcaccgagauuaauaaaaaaaaaaaaaaaaaaaaaaaaaaaaaaaaaaaaaaaaaaaaaaaaaaaaaaaaaaaaaaaaugcaucccccccccccccccccccccccccccccccaaaggcucuuuucagagccaccagaauu

SEQ ID NO: 21598 - RNA, 6058 nt, Artificial Sequence
  SARS-CoV-2__MT810727.1__non-structural protein 3 (NSP3) mRNA gc
aggagaaagcuuaccauggcccccaccaaggugaccuucggcgacgacacggucaucgaggugcagggguacaagagcgugaacaucaccuucgagcuggacgagcgcaucgacaagguccucaacgagaagugcuccgccuacaccguggagcugggcaccgaggugaacgaguucgcgugcgucguggccgacgccgugaucaagacgcugcagccggucagcgagcuccugaccccccuggggaucgaccucgacgagugguccauggccaccuacuaccuguucgacgagagcggcgaguucaagcuggccucccacauguacugcagcuucuacccccccgacgaggacgaggaggagggggacugcgaggaggaggaguucgagccguccacccaguacgaguacggcacggaggacgacuaccagggcaagccccucgaguucggggcgaccagcgccgcccugcagcccgaggaggagcaggaggaggacuggcuggacgacgacucccagcagaccgugggccagcaggacgggagcgaggacaaccagaccacgaccauccagaccaucguggagguccagccccagcucgagauggagcugaccccgguggugcagacgaucgaggucaacuccuucagcggcuaccugaagcucaccgacaacguguacaucaagaacgccgacaucguggaggaggcgaagaaggucaagcccaccgugguggucaacgccgccaacguguaccugaagcacgggggcggcguggccggggcccugaacaaggcgaccaacaacgccaugcaggucgaguccgacgacuacaucgccacgaacggcccccucaagguggggggcagcugcguccuguccggccacaaccuggccaagcacugccuccacgugguggggcccaacgucaacaagggcgaggacauccagcugcugaagagcgccuacgagaacuucaaccagcacgaggugcuccuggcgccgcugcucuccgccgggaucuucggcgccgaccccauccacagccugcgggugugcgucgacaccgugcgcaccaacguguaccuggccgucuucgacaagaaccucuacgacaagcugguguccagcuuccuggagaugaagagcgagaagcagguggagcagaagaucgccgagauccccaaggaggaggucaagcccuucaucaccgaguccaagccgagcguggagcagcggaagcaggacgacaagaagaucaaggcgugcguggaggaggucacgaccacccucgaggagaccaaguuccugacggagaaccugcuccuguacaucgacaucaacgggaaccugcaccccgacuccgccacccucgugagcgacaucgacaucaccuuccugaagaaggacgcccccuacaucgugggcgacgucgugcaggagggcgugcugaccgccgucgugauccccacgaagaaggccgggggcaccaccgagaugcucgcgaaggcccugcgcaaggugccgaccgacaacuacaucacgaccuaccccgggcagggccugaacggguacaccgucgaggaggccaagaccgugcucaagaagugcaaguccgccuucuacauccugcccagcaucaucuccaacgagaagcaggagauccugggcaccgugagcuggaaccuccgggagaugcuggcgcacgccgaggagacgcgcaagcugaugcccgucugcguggagaccaaggccaucguguccaccauccagcggaaguacaagggcaucaagauccaggagggggucguggacuacggcgcccgcuucuacuucuacaccagcaagacgaccguggccucccugaucaacacccucaacgaccugaacgagacccuggucacgaugccgcucggguacgugacccacggccugaaccuggaggaggcggcccgguacaugcgcagccucaaggugcccgccaccgucuccgugagcucccccgacgccgugaccgccuacaacggguaccugacgagcuccagcaagacccccgaggagcacuucaucgagaccaucucccuggcgggcagcuacaaggacuggagcuacuccggccagagcacccagcucgggaucgaguuccugaagcggggcgacaaguccgucuacuacacgagcaacccgaccaccuuccaccuggacggggaggugaucaccuucgacaaccucaagacgcugcugucccuccgcgaggugcggaccaucaaggucuucaccaccguggacaacaucaaccugcacacgcagguggucgacaugagcaugaccuacggccagcaguucggccccaccuaccuggacggggccgacgugaccaagaucaagccccacaacucccacgagggcaagacguucuacgugcucccgaacgacgacacccugcgcgucgaggccuucgaguacuaccacaccaccgaccccagcuuccuggggcgguacauguccgcccucaaccacacgaagaaguggaaguacccccaggugaacggccugaccagcaucaagugggccgacaacaacugcuaccuggcgaccgcccuccugacccugcagcagaucgagcucaaguucaaccccccggcccugcaggacgccuacuaccgcgcgcgggccggggaggccgccaacuucugcgcccugauccucgcguacugcaacaagacggugggcgagcugggcgacguccgcgagaccauguccuaccuguuccagcacgccaaccucgacagcugcaagcgggugcugaacgucgugugcaagaccugcgggcagcagcagaccacccugaagggcguggaggccgucauguacauggggacgcucuccuacgagcaguucaagaagggcgugcagauccccugcaccugcgggaagcaggccaccaaguaccuggugcagcaggagagccccuucgucaugauguccgcccccccggcgcaguacgagcugaagcacggcaccuucacgugcgccagcgaguacaccggcaacuaccagugcgggcacuacaagcacaucaccuccaaggagacccucuacugcaucgacggcgcccugcugacgaagagcagcgaguacaaggggcccaucaccgacguguucuacaaggagaacuccuacaccaccacgaucaagcccgugaccuacaagcucgacggcgucgugugcaccgagaucgaccccaagcuggacaacuacuacaagaaggacaacagcuacuucaccgagcagccgaucgaccuggugcccaaccagcccuaccccaacgccuccuucgacaacuucaaguucgucugcgacaacaucaaguucgccgacgaccucaaccagcugacgggguacaagaagccggcgagccgcgagcugaaggugaccuucuuccccgaccucaacggcgacguggucgccaucgacuacaagcacuacacccccuccuucaagaagggcgccaagcugcugcacaagcccaucguguggcacgugaacaacgccaccaacaaggcgacguacaagccgaacaccuggugcauccggugccucuggagcaccaagcccgucgagaccuccaacagcuucgacgugcugaaguccgaggacgcccaggggauggacaaccuggccugcgaggaccucaagcccgugagcgaggaggucguggagaaccccacgauccagaaggacgugcuggagugcaacgucaagaccaccgagguggugggcgacaucauccugaagccggccaacaacucccucaagaucaccgaggaggucgggcacacggaccugauggccgcguacguggacaacagcucccugaccaucaagaagcccaacgagcucagccgcgugcugggccugaagacccucgccacccacgggcuggccgccgucaacuccgugcccugggacacgaucgccaacuacgcgaagccguuccugaacaagguggucagcaccaccaccaacaucgugacgcgcugccucaaccgggugugcaccaacuacaugcccuacuucuucacccugcugcuccagcugugcaccuucacccgcuccacgaacagccggaucaaggccuccaugcccaccaccaucgccaagaacaccgucaagagcgugggcaaguucugccuggaggcccucuucaacuaccugaagagccccaacuucuccaagcugaucaacaucaucaucugguuccuccugcugagcgugugccucggcucccugaucuacagcacggccgcgcuggggguccucauguccaaccugggcaugccgagcuacugcaccggguaccgcgagggcuaccugaacuccaccaacgugaccaucgccacguacugcaccggcagcauccccugcuccgugugccucagcgggcuggacucccuggacaccuaccccagccucgagaccauccagaucacgaucuccagcuucaagugggaccugaccgccuucggccuggucgccgagugguuccucgccuacauccuguucacccgguucuucuacgugcuggggcucgcggccaucaugcagcuguucuucuccuacuucgccgugcacuucaucagcaacuccuggcugauguggcugaucaucaaccucguccagauggcccccaucagcgcgauggugcgcauguacaucuucuucgccuccuucuacuacguguggaagagcuacguccacgugguggacggcugcaacagcuccaccugcaugaugugcuacaagcggaaccgcgccacgcgggucgagugcaccaccaucgugaacgggguccgccggagcuucuacguguacgccaacggcggcaagggguucugcaagcugcacaacuggaacugcgugaacugcgacaccuucugcgccggcuccacguucaucagcgacgaggucgcgcgcgaccugucccuccaguucaagcggccgaucaaccccaccgaccagagcuccuacaucguggacagcgugaccgucaagaacggguccauccaccuguacuucgacaaggccggccagaagaccuacgagcgccacagccugucccacuucgugaaccucgacaaccugcgggccaacaacacgaaggggagccugcccaucaacgugaucgucuucgacggcaaguccaagugcgaggagagcuccgccaagagcgccuccguguacuacagccagcucaugugccagcccauccugcugcucgaccaggcgcugguguccgacgucggcgacagcgccgagguggccgugaagauguucgacgccuacgucaacaccuucagcuccaccuucaacgugccgauggagaagcugaagacccucguggccacggcggaggccgagcuggccaagaacgucagccuggacaacgugcucuccaccuucaucagcgccgcgcgccagggguucguggacuccgacgucgagaccaaggacgugguggagugccugaagcugagccaccaguccgacaucgaggucaccggcgacagcugcaacaacuacaugcucacguacaacaagguggagaacaugaccccccgggaccugggggccugcaucgacugcuccgcccgccacaucaacgcccagguggccaagagccacaacaucgcgcugaucuggaacgucaaggacuucaugucccucagcgagcagcugcggaagcagauccgcuccgccgccaagaagaacaaccugcccuucaagcucaccugcgccaccacgcgccagguggugaacgucgugaccaccaagaucgcccugaagggcgggugaggacuaguuauaagacugacuagcccgaugggccucccaacgggcccuccuccccuccuugcaccgagauuaauaaaaaaaaaaaaaaaaaaaaaaaaaaaaaaaaaaaaaaaaaaaaaaaaaaaaaaaaaaaaaaaaugcaucccccccccccccccccccccccccccccccaaaggcucuuuucagagccaccagaauu

SEQ ID NO: 21599 - RNA, 6058 nt, Artificial Sequence
  SARS-CoV-2__MT810827.1__non-structural protein 3 (NSP3) mRNA gc
aggagaaagcuuaccauggcccccaccaaggugaccuucggcgacgacacggucaucgaggugcagggguacaagagcgugaacaucaccuucgagcuggacgagcgcaucgacaagguccucaacgagaagugcuccgccuacaccguggagcugggcaccgaggugaacgaguucgcgugcgucguggccgacgccgugaucaagacgcugcagccggucagcgagcuccugaccccccuggggaucgaccucgacgagugguccauggccaccuacuaccuguucgacgagagcggcgaguucaagcuggccucccacauguacugcagcuucuacccccccgacgaggacgaggaggagggggacugcgaggaggaggaguucgagccguccacccaguacgaguacggcacggaggacgacuaccagggcaagccccucgaguucggggcgaccagcgccgcccugcagcccgaggaggagcaggaggaggacuggcuggacgacgacucccagcagaccgugggccagcaggacgggagcgaggacaaccagaccacgaccauccagaccaucguggagguccagccccagcucgagauggagcugaccccgguggugcagacgaucgaggucaacuccuucagcggcuaccugaaguucaccgacaacguguacaucaagaacgccgacaucguggaggaggcgaagaaggucaagcccaccgugguggucaacgccgccaacguguaccucaagcacgggggcggcguggccggggcccugaacaaggcgaccaacaacgccaugcaggucgaguccgacgacuacaucgccacgaacggcccccugaagguggggggcagcugcguccucuccggccacaaccuggccaagcacugccugcacgugguggggcccaacgucaacaagggcgaggacauccagcuccugaagagcgccuacgagaacuucaaccagcacgaggugcugcucgcgccgcugcuguccgccgggaucuucggcgccgaccccauccacagccuccgggugugcgucgacaccgugcgcaccaacguguaccuggccgucuucgacaagaaccuguacgacaagcucguguccagcuuccuggagaugaagagcgagaagcagguggagcagaagaucgccgagauccccaaggaggaggucaagcccuucaucaccgaguccaagccgagcguggagcagcggaagcaggacgacaagaagaucaaggcgugcguggaggaggucacgaccacccuggaggagaccaaguuccucacggagaaccugcugcucuacaucgacaucaacgggaaccugcaccccgacuccgccacccuggugagcgacaucgacaucaccuuccucaagaaggacgcccccuacaucgugggcgacgucgugcaggagggcgugcugaccgccgucgugauccccacgaagaaggccgggggcaccaccgagaugcuggcgaaggcccuccgcaaggugccgaccgacaacuacaucacgaccuaccccgggcagggccugaacggguacaccgucgaggaggccaagaccgugcugaagaagugcaaguccgccuucuacauccuccccagcaucaucuccaacgagaagcaggagauccugggcaccgugagcuggaaccugcgggagaugcucgcgcacgccgaggagacgcgcaagcugaugcccgucugcguggagaccaaggccaucguguccaccauccagcggaaguacaagggcaucaagauccaggagggggucguggacuacggcgcccgcuucuacuucuacaccagcaagacgaccguggccucccugaucaacacccugaacgaccucaacgagacccuggucacgaugccgcugggguacgugacccacggccucaaccuggaggaggcggcccgguacaugcgcagccugaaggugcccgccaccgucuccgugagcucccccgacgccgugaccgccuacaacggguaccucacgagcuccagcaagacccccgaggagcacuucaucgagaccaucucccuggcgggcagcuacaaggacuggagcuacuccggccagagcacccagcuggggaucgaguuccucaagcggggcgacaaguccgucuacuacacgagcaacccgaccaccuuccaccuggacggggaggugaucaccuucgacaaccugaagacgcuccugucccugcgcgaggugcggaccaucaaggucuucaccaccguggacaacaucaaccuccacacgcagguggucgacaugagcaugaccuacggccagcaguucggccccaccuaccuggacggggccgacgugaccaagaucaagccccacaacucccacgagggcaagacguucuacgugcugccgaacgacgacacccuccgcgucgaggccuucgaguacuaccacaccaccgaccccagcuuccuggggcgguacauguccgcccugaaccacacgaagaaguggaaguacccccaggugaacggccucaccagcaucaagugggccgacaacaacugcuaccuggcgaccgcccugcucacccugcagcagaucgagcugaaguucaaccccccggcccuccaggacgccuacuaccgcgcgcgggccggggaggccgccaacuucugcgcccugauccuggcguacugcaacaagacggugggcgagcucggcgacguccgcgagaccauguccuaccuguuccagcacgccaaccuggacagcugcaagcgggugcucaacgucgugugcaagaccugcgggcagcagcagaccacccugaagggcguggaggccgucauguacauggggacgcuguccuacgagcaguucaagaagggcgugcagauccccugcaccugcgggaagcaggccaccaaguaccucgugcagcaggagagccccuucgucaugauguccgcccccccggcgcaguacgagcugaagcacggcaccuucacgugcgccagcgaguacaccggcaacuaccagugcgggcacuacaagcacaucaccuccaaggagacccuguacugcaucgacggcgcccuccugacgaagagcagcgaguacaaggggcccaucaccgacguguucuacaaggagaacuccuacaccaccacgaucaagcccgugaccuacaagcuggacggcgucgugugcaccgagaucgaccccaagcucgacaacuacuacaagaaggacaacagcuacuucaccgagcagccgaucgaccuggugcccaaccagcccuaccccaacgccuccuucgacaacuucaaguucgucugcgacaacaucaaguucgccgacgaccugaaccagcucacgggguacaagaagccggcgagccgcgagcugaaggugaccuucuuccccgaccugaacggcgacguggucgccaucgacuacaagcacuacacccccuccuucaagaagggcgccaagcuccugcacaagcccaucguguggcacgugaacaacgccaccaacaaggcgacguacaagccgaacaccuggugcauccggugccuguggagcaccaagcccgucgagaccuccaacagcuucgacgugcucaaguccgaggacgcccaggggauggacaaccuggccugcgaggaccugaagcccgugagcgaggaggucguggagaaccccacgauccagaaggacgugcucgagugcaacgucaagaccaccgagguggugggcgacaucauccugaagccggccaacaacucccugaagaucaccgaggaggucgggcacacggaccucauggccgcguacguggacaacagcucccugaccaucaagaagcccaacgagcugagccgcgugcucggccugaagacccuggccacccacgggcucgccgccgucaacuccgugcccugggacacgaucgccaacuacgcgaagccguuccugaacaagguggucagcaccaccaccaacaucgugacgcgcugccugaaccgggugugcaccaacuacaugcccuacuucuucacccuccugcugcagcucugcaccuucacccgcuccacgaacagccggaucaaggccuccaugcccaccaccaucgccaagaacaccgucaagagcgugggcaaguucugccuggaggccagcuucaacuaccugaagucccccaacuucagcaagcucaucaacaucaucaucugguuccugcugcucuccgugugccugggcagccugaucuacuccacggccgcgcucgggguccugaugagcaaccugggcaugccguccuacugcaccggguaccgcgagggcuaccucaacagcaccaacgugaccaucgccacguacugcaccggcuccauccccugcagcgugugccuguccgggcuggacagccucgacaccuaccccucccuggagaccauccagaucacgaucagcuccuucaagugggaccugaccgccuucggccucgucgccgagugguuccuggccuacauccuguucacccgguucuucuacgugcucgggcuggcggccaucaugcagcuguucuucagcuacuucgccgugcacuucaucuccaacagcuggcucauguggcugaucaucaaccugguccagauggcccccaucuccgcgauggugcgcauguacaucuucuucgccagcuucuacuacguguggaagagcuacguccacgugguggacggcugcaacuccagcaccugcaugaugugcuacaagcggaaccgcgccacgcgggucgagugcaccaccaucgugaacgggguccgccgguccuucuacguguacgccaacggcggcaagggguucugcaagcugcacaacuggaacugcgugaacugcgacaccuucugcgccggcagcacguucaucuccgacgaggucgcgcgcgaccucagccugcaguucaagcggccgaucaaccccaccgaccaguccagcuacaucguggacuccgugaccgucaagaacgggagcauccaccuguacuucgacaaggccggccagaagaccuacgagcgccacucccucagccacuucgugaaccuggacaaccugcgggccaacaacacgaaggggucccuccccaucaacgugaucgucuucgacggcaagagcaagugcgaggaguccagcgccaaguccgccagcguguacuacucccagcugaugugccagcccauccugcuccuggaccaggcgcuggugagcgacgucggcgacagcgccgagguggccgugaagauguucgacgccuacgucaacaccuucuccagcaccuucaacgugccgauggagaagcucaagacccugguggccacggcggaggccgagcuggccaagaacgucucccucgacaacgugcugagcaccuucaucuccgccgcgcgccagggguucguggacagcgacgucgagaccaaggacgugguggagugccugaagcucucccaccagagcgacaucgaggucaccggcgacuccugcaacaacuacaugcugacguacaacaagguggagaacaugaccccccgggaccugggggccugcaucgacugcagcgcccgccacaucaacgcccagguggccaagucccacaacaucgcgcucaucuggaacgucaaggacuucaugagccuguccgagcagcugcggaagcagauccgcagcgccgccaagaagaacaaccuccccuucaagcugaccugcgccaccacgcgccagguggugaacgucgugaccaccaagaucgcccugaagggcgggugaggacuaguuauaagacugacuagcccgaugggccucccaacgggcccuccuccccuccuugcaccgagauuaauaaaaaaaaaaaaaaaaaaaaaaaaaaaaaaaaaaaaaaaaaaaaaaaaaaaaaaaaaaaaaaaaugcaucccccccccccccccccccccccccccccccaaaggcucuuuucagagccaccagaauu

SEQ ID NO: 21600 - RNA, 6058 nt, Artificial Sequence
  SARS-CoV-2__MT810831.1__non-structural protein 3 (NSP3) mRNA gc
aggagaaagcuuaccauggcccccaccaaggugaccuucggcgacgacacggucaucgaggugcagggguacaagagcgugaacaucaccuucgagcuggacgagcgcaucgacaagguccucaacgagaagugcuccgccuacaccguggagcugggcaccgaggugaacgaguucgcgugcgucguggccgacgccgugaucaagacgcugcagccggucagcgagcuccugaccccccuggggaucgaccucgacgagugguccauggccaccuacuaccuguucgacgagagcggcgaguucaagcuggccucccacauguacugcagcuucuacccccccgacgaggacgaggaggagggggacugcgaggaggaggaguucgagccguccacccaguacgaguacggcacggaggacgacuaccagggcaagccccucgaguucggggcgaccagcgccgcccugcagcccgaggaggagcaggaggaggacuggcuggacgacgacucccagcagaccgugggccagcaggacgggagcgaggacaaccagaccacgaccauccagaccaucguggagguccagccccagcucgagauggagcugaccccgguggugcagacgaucgaggucaacuccuucagcggcuaccugaagcucaccgacaacguguacaucaagaacgccgacaucguggaggaggcgaagaaggucaagcccaccgugguggucaacgccgccaacguguaccugaagcacgggggcggcguggccggggcccugaacaaggcgaccaacaacgccaugcaggucgaguccgacgacuacaucgccacgaacggcccccucaagguggggggcagcugcguccuguccggccacaaccuggccaagcacugccuccacgugguggggcccaacgucaacaagggcgaggacauccagcugcugaagagcgccuacgagaacuucaaccagcacgaggugcuccuggcgccgcugcucuccgccgggaucuucggcgccgaccccauccacagccugcgggugugcgucgacaccgugcgcaccaacguguaccuggccgucuucgacaagaaccucuacgacaagcugguguccagcuuccuggagaugaagagcgagaagcagguggagcagaagaucgccgagauccccaaggaggaggucaagcccuucaucaccgaguccaagccgagcguggagcagcggaagcaggacgacaagaagaucaaggcgugcguggaggaggucacgaccacccucgaggagaccaaguuccugacggagaaccugcuccuguacaucgacaucaacgggaaccugcaccccgacuccgccacccucgugagcgacaucgacaucaccuuccugaagaaggacgcccccuacaucgugggcgacgucgugcaggagggcgugcugaccgccgucgugauccccacgaagaaggccgggggcaccaccgagaugcucgcgaaggcccugcgcaaggugccgaccgacaacuacaucacgaccuaccccgggcagggccugaacggguacaccgucgaggaggccaagaccgugcucaagaagugcaaguccgccuucuacauccugcccagcaucaucuccaacgagaagcaggagauccugggcaccgugagcuggaaccuccgggagaugcuggcgcacgccgaggagacgcgcaagcugaugcccgucugcguggagaccaaggccaucguguccaccauccagcggaaguacaagggcaucaagauccaggagggggucguggacuacggcgcccgcuucuacuucuacaccagcaagacgaccguggccucccugaucaacacccucaacgaccugaacgagacccuggucacgaugccgcucggguacgugacccacggccugaaccuggaggaggcggcccgguacaugcgcagccucaaggugcccgccaccgucuccgugagcucccccgacgccgugaccgccuacaacggguaccugacgagcuccagcaagacccccgaggagcacuucaucgagaccaucucccuggcgggcagcuacaaggacuggagcuacuccggccagagcacccagcucgggaucgaguuccugaagcggggcgacaaguccgucuacuacacgagcaacccgaccaccuuccaccuggacggggaggugaucaccuucgacaaccucaagacgcugcugucccuccgcgaggugcggaccaucaaggucuucaccaccguggacaacaucaaccugcacacgcagguggucgacaugagcaugaccuacggccagcaguucggccccaccuaccuggacggggccgacgugaccaagaucaagccccacaacucccacgagggcaagacguucuacgugcucccgaacgacgacacccugcgcgucgaggccuucgaguacuaccacaccaccgaccccagcuuccuggggcgguacauguccgcccucaaccacacgaagaaguggaaguacccccaggugaacggccugaccagcaucaagugggccgacaacaacugcuaccuggcgaccgcccuccugacccugcagcagaucgagcucaaguucaaccccccggcccugcaggacgccuacuaccgcgcgcgggccggggaggccgccaacuucugcgcccugauccucgcguacugcaacaagacggugggcgagcugggcgacguccgcgagaccauguccuaccuguuccagcacgccaaccucgacagcugcaagcgggugcugaacgucgugugcaagaccugcgggcagcagcagaccacccugaagggcguggaggccgucauguacauggggacgcucuccuacgagcaguucaagaagggcgugcagauccccugcaccugcgggaagcaggccaccaaguaccuggugcagcaggagagccccuucgucaugauguccgcccccccggcgcaguacgagcugaagcacggcaccuucacgugcgccagcgaguacaccggcaacuaccagugcgggcacuacaagcacaucaccuccaaggagacccucuacugcaucgacggcgcccugcugacgaagagcagcgaguacaaggggcccaucaccgacguguucuacaaggagaacuccuacaccaccacgaucaagcccgugaccuacaagcucgacggcgucgugugcaccgagaucgaccccaagcuggacaacuacuacaagaaggacaacagcuacuucaccgagcagccgaucgaccuggugcccaaccagcccuaccagaacgccuccuucgacaacuucaaguucgucugcgacaacaucaaguucgccgacgaccucaaccagcugacgggguacaagaagcccgcgagccgcgagcugaaggugaccuucuucccggaccucaacggcgacguggucgccaucgacuacaagcacuacacccccuccuucaagaagggcgccaagcugcugcacaagcccaucguguggcacgugaacaacgccaccaacaaggcgacguacaagcccaacaccuggugcauccggugccucuggagcaccaagccggucgagaccuccaacagcuucgacgugcugaaguccgaggacgcccaggggauggacaaccuggccugcgaggaccucaagcccgugagcgaggaggucguggagaaccccacgauccagaaggacgugcuggagugcaacgucaagaccaccgagguggugggcgacaucauccugaagcccgccaacaacucccucaagaucaccgaggaggucgggcacacggaccugauggccgcguacguggacaacagcucccugaccaucaagaagccgaacgagcucagccgcgugcugggccugaagacccucgccacccacgggcuggccgccgucaacuccgugcccugggacacgaucgccaacuacgcgaagcccuuccugaacaagguggucagcaccaccaccaacaucgugacgcgcugccucaaccgggugugcaccaacuacaugccguacuucuucacccugcugcuccagcugugcaccuucacccgcuccacgaacagccggaucaaggccuccaugcccaccaccaucgccaagaacaccgucaagagcgugggcaaguucugccuggaggccagcuucaacuaccucaagucccccaacuucagcaagcugaucaacaucaucaucugguuccugcuccuguccgugugccugggcagccucaucuacuccacggccgcgcuggggguccugaugagcaaccucggcaugcccuccuacugcaccggguaccgcgagggcuaccugaacagcaccaacgugaccaucgccacguacugcaccggcuccaucccgugcagcgugugccuguccgggcucgacagccuggacaccuaccccucccuggagaccauccagaucacgaucagcuccuucaagugggaccucaccgccuucggccuggucgccgagugguuccuggccuacauccucuucacccgguucuucuacgugcuggggcuggcggccaucaugcagcucuucuucagcuacuucgccgugcacuucaucuccaacagcuggcugauguggcugaucaucaaccugguccagauggcccccaucuccgcgauggugcgcauguacaucuucuucgccagcuucuacuacguguggaagagcuacguccacgugguggacggcugcaacuccagcaccugcaugaugugcuacaagcggaaccgcgccacgcgggucgagugcaccaccaucgugaacgggguccgccgguccuucuacguguacgccaacggcggcaagggguucugcaagcuccacaacuggaacugcgugaacugcgacaccuucugcgccggcagcacguucaucuccgacgaggucgcgcgcgaccugagccugcaguucaagcggcccaucaacccgaccgaccaguccagcuacaucguggacuccgugaccgucaagaacgggagcauccaccucuacuucgacaaggccggccagaagaccuacgagcgccacucccugagccacuucgugaaccuggacaaccuccgggccaacaacacgaaggggucccugcccaucaacgugaucgucuucgacggcaagagcaagugcgaggaguccagcgccaaguccgccagcguguacuacucccagcugaugugccagcccauccuccugcuggaccaggcgcucgugagcgacgucggcgacagcgccgagguggccgugaagauguucgacgccuacgucaacaccuucuccagcaccuucaacgugcccauggagaagcugaagacccugguggccacggcggaggccgagcucgccaagaacgucucccuggacaacgugcugagcaccuucaucuccgccgcgcgccagggguucguggacagcgacgucgagaccaaggacgugguggagugccucaagcugucccaccagagcgacaucgaggucaccggcgacuccugcaacaacuacaugcugacguacaacaagguggagaacaugaccccgcgggaccucggggccugcaucgacugcagcgcccgccacaucaacgcccagguggccaagucccacaacaucgcgcugaucuggaacgucaaggacuucaugagccuguccgagcagcuccggaagcagauccgcagcgccgccaagaagaacaaccugcccuucaagcugaccugcgccaccacgcgccagguggugaacgucgugaccaccaagaucgcccucaagggcgggugaggacuaguuauaagacugacuagcccgaugggccucccaacgggcccuccuccccuccuugcaccgagauuaauaaaaaaaaaaaaaaaaaaaaaaaaaaaaaaaaaaaaaaaaaaaaaaaaaaaaaaaaaaaaaaaaugcaucccccccccccccccccccccccccccccccaaaggcucuuuucagagccaccagaauu

SEQ ID NO: 21601 - RNA, 6058 nt, Artificial Sequence
  SARS-CoV-2__MT810843.1__non-structural protein 3 (NSP3) mRNA gc
aggagaaagcuuaccauggcccccaccaaggugaccuucggcgacgacacggucaucgaggugcagggguacaagagcgugaacaucaccuucgagcuggacgagcgcaucgacaagguccucaacgagaagugcuccgccuacaccguggagcugggcaccgaggugaacgaguucgcgugcgucguggccgacgccgugaucaagacgcugcagccggucagcgagcuccugaccccccuggggaucgaccucgacgagugguccauggccaccuacuaccuguucgacgagagcggcgaguucaagcuggccucccacauguacugcagcuucuacccccccgacgaggacgaggaggagggggacugcgaggaggaggaguucgagccguccacccaguacgaguacggcacggaggacgacuaccagggcaagccccucgaguucggggcgaucagcgccgcccugcagcccgaggaggagcaggaggaggacuggcuggacgacgacucccagcagaccgugggccagcaggacgggagcgaggacaaccagaccaccacgauccagaccaucguggagguccagccccagcucgagauggagcugaccccgguggugcagaccaucgaggucaacuccuucagcggcuaccugaagcucacggacaacguguacaucaagaacgccgacaucguggaggaggcgaagaaggucaagcccaccgugguggucaacgccgccaacguguaccugaagcacgggggcggcguggccggggcccugaacaaggcgaccaacaacgccaugcaggucgaguccgacgacuacaucgccaccaacggcccccucaagguggggggcagcugcguccuguccggccacaaccuggccaagcacugccuccacgugguggggcccaacgucaacaagggcgaggacauccagcugcugaagagcgccuacgagaacuucaaccagcacgaggugcuccuggcgccgcugcucuccgccgggaucuucggcgccgaccccauccacagccugcgggugugcgucgacacggugcgcaccaacguguaccuggccgucuucgacaagaaccucuacgacaagcugguguccagcuuccuggagaugaagagcgagaagcagguggagcagaagaucgccgagauccccaaggaggaggucaagcccuucaucaccgaguccaagccgagcguggagcagcggaagcaggacgacaagaagaucaaggcgugcguggaggaggucaccacgacccucgaggagaccaaguuccugaccgagaaccugcuccuguacaucgacaucaacgggaaccugcaccccgacuccgccacgcucgugagcgacaucgacaucaccuuccugaagaaggacgcccccuacaucgugggcgacgucgugcaggagggcgugcugaccgccgucgugauccccaccaagaaggccgggggcacgaccgagaugcucgcgaaggcccugcgcaaggugccgaccgacaacuacaucaccacguaccccgggcagggccugaacggguacaccgucgaggaggccaagaccgugcucaagaagugcaaguccgccuucuacauccugcccagcaucaucuccaacgagaagcaggagauccugggcaccgugagcuggaaccuccgggagaugcuggcgcacgccgaggagacccgcaagcugaugcccgucugcguggagacgaaggccaucguguccaccauccagcggaaguacaagggcaucaagauccaggagggggucguggacuacggcgcccgcuucuacuucuacaccagcaagaccacgguggccucccugaucaacacccucaacgaccugaacgagacccuggucaccaugccgcucggguacgugacgcacggccugaaccuggaggaggcggcccgguacaugcgcagccucaaggugcccgccaccgucuccgugagcucccccgacgccgugaccgccuacaacggguaccugaccagcuccagcaagacgcccgaggagcacuucaucgagaccaucucccuggcgggcagcuacaaggacuggagcuacuccggccagagcacccagcucgggaucgaguuccugaagcggggcgacaaguccgucuacuacaccagcaacccgacgaccuuccaccuggacggggaggugaucaccuucgacaaccucaagacccugcugucccuccgcgaggugcggacgaucaaggucuucaccaccguggacaacaucaaccugcacacccagguggucgacaugagcaugacguacggccagcaguucggccccaccuaccuggacggggccgacgugaccaagaucaagccccacaacucccacgagggcaagaccuucuacgugcucccgaacgacgacacgcugcgcgucgaggccuucgaguacuaccacaccaccgaccccagcuuccuggggcgguacauguccgcccucaaccacaccaagaaguggaaguacccccaggugaacggccugacgagcaucaagugggccgacaacaacugcuaccuggcgaccgcccuccugacccugcagcagaucgagcucaaguucaaccccccggcccugcaggacgccuacuaccgcgcgcgggccggggaggccgccaacuucugcgcccugauccucgcguacugcaacaagaccgugggcgagcugggcgacguccgcgagacgauguccuaccuguuccagcacgccaaccucgacagcugcaagcgggugcugaacgucgugugcaagaccugcgggcagcagcagaccacccugaagggcguggaggccgucauguacauggggacccucuccuacgagcaguucaagaagggcgugcagauccccugcacgugcgggaagcaggccaccaaguaccuggugcagcaggagagccccuucgucaugauguccgcccccccggcgcaguacgagcugaagcacggcaccuucaccugcgccagcgaguacacgggcaacuaccagugcgggcacuacaagcacaucaccuccaaggagacccucuacugcaucgacggcgcccugcugaccaagagcagcgaguacaaggggcccaucacggacguguucuacaaggagaacuccuacaccaccaccaucaagcccgugacguacaagcucgacggcgucgugugcaccgagaucgaccccaagcuggacaacuacuacaagaaggacaacagcuacuucaccgagcagccgaucgaccuggugcccaaccagcccuaccccaacgccuccuucgacaacuucaaguucgucugcgacaacaucaaguucgccgacgaccucaaccagcugaccggguacaagaagccggcgagccgcgagcugaaggugacguucuuccccgaccucaacggcgacguggucgccaucgacuacaagcacuacacccccuccuucaagaagggcgccaagcugcugcacaagcccaucguguggcacgugaacaacgccaccaacaaggcgaccuacaagccgaacacguggugcauccggugccucuggagcaccaagcccgucgagaccuccaacagcuucgacgugcugaaguccgaggacgcccaggggauggacaaccuggccugcgaggaccucaagcccgugagcgaggaggucguggagaaccccaccauccagaaggacgugcuggagugcaacgucaagacgaccgagguggugggcgacaucauccugaagccggccaacaacucccucaagaucaccgaggaggucgggcacaccgaccugauggccgcguacguggacaacagcucccugacgaucaagaagcccaacgagcucagccgcgugcugggccugaagacccucgccacccacgggcuggccgccgucaacuccgugcccugggacaccaucgccaacuacgcgaagccguuccugaacaagguggucagcacgaccaccaacaucgugacccgcugccucaaccgggugugcacgaacuacaugcccuacuucuucacccugcugcuccagcugugcaccuucacccgcuccaccaacagccggaucaaggccuccaugcccacgaccaucgccaagaacaccgucaagagcgugggcaaguucugccuggaggccagcuucaacuaccucaagucccccaacuucagcaagcugaucaacaucaucaucugguuccugcuccuguccgugugccugggcagccucaucuacuccaccgccguccugggggugcugaugagcaaccucggcaugccguccuacugcacgggguaccgcgagggcuaccugaacagcaccaacgugaccaucgcgaccuacugcacgggcuccauccccugcagcgucugccuguccgggcucgacagccuggacaccuaccccucccuggagaccauccagaucaccaucagcuccuucaagugggaccucacggccuucggccugguggccgagugguuccuggccuacauccucuucacccgguucuucuacgugcuggggcuggccgcgaucaugcagcucuucuucagcuacuucgccguccacuucaucuccaacagcuggcugauguggcugaucaucaaccuggugcagauggcccccaucuccgccauggugcgcauguacaucuucuucgcgagcuucuacuacgucuggaagagcuacgugcacguggucgacggcugcaacuccagcaccugcaugaugugcuacaagcggaaccgcgccacccggguggagugcacgaccaucgucaacggggugcgccgguccuucuacguguacgccaacggcggcaagggguucugcaagcuccacaacuggaacugcgucaacugcgacaccuucugcgccggcagcaccuucaucuccgacgagguggcccgcgaccugagccugcaguucaagcggccgaucaaccccacggaccaguccagcuacaucguggacuccgucaccgugaagaacgggagcauccaccucuacuucgacaaggcgggccagaagaccuacgagcgccacucccugagccacuucgugaaccuggacaaccuccgggccaacaacaccaaggggucccugcccaucaacgucaucguguucgacggcaagagcaagugcgaggaguccagcgccaaguccgccagcguguacuacucccagcugaugugccagcccauccuccugcuggaccaggcccucgucagcgacgugggcgacagcgcggagguggccgucaagauguucgacgccuacgugaacacguucuccagcaccuucaacgugccgauggagaagcugaagacccuggucgccaccgccgaggcggagcucgccaagaacgugucccuggacaacgugcugagcacguucaucuccgccgcccgccagggguucgucgacagcgacguggagaccaaggacguggucgagugccucaagcugucccaccagagcgacaucgaggugaccggcgacuccugcaacaacuacaugcugaccuacaacaagguggagaacaugacgccccgggaccucggggcgugcaucgacugcagcgcccgccacaucaacgcccaggucgccaagucccacaacaucgcccugaucuggaacgugaaggacuucaugagccuguccgagcagcuccggaagcagauccgcagcgcggccaagaagaacaaccugcccuucaagcugaccugcgccaccacccgccagguggucaacguggugacgaccaagaucgcccucaagggcgggugaggacuaguuauaagacugacuagcccgaugggccucccaacgggcccuccuccccuccuugcaccgagauuaauaaaaaaaaaaaaaaaaaaaaaaaaaaaaaaaaaaaaaaaaaaaaaaaaaaaaaaaaaaaaaaaaugcaucccccccccccccccccccccccccccccccaaaggcucuuuucagagccaccagaauu

SEQ ID NO: 21602 - RNA, 6058 nt, Artificial Sequence
  SARS-CoV-2__MT810895.1__non-structural protein 3 (NSP3) mRNA gc
aggagaaagcuuaccauggcccccaccaaggugaccuucggcgacgacacggucaucgaggugcagggguacaagagcgugaacaucaccuucgagcuggacgagcgcaucgacaagguccucaacgagaagugcuccgccuacaccguggagcugggcaccgaggugaacgaguucgcgugcgucguggccgacgccgugaucaagacgcugcagccggucagcgagcuccugaccccccuggggaucgaccucgacgagugguccauggccaccuacuaccuguucgacgagagcggcgaguucaagcuggccucccacauguacugcagcuucuacccccccgacgaggacgaggaggagggggacugcgaggaggaggaguucgagccguccacccaguacgaguacggcacggaggacgacuaccagggcaagccccucgaguucggggcgaccagcgccgcccugcagcccgaggaggagcaggaggaggacuggcuggacgacgacucccagcagaccgugggccagcaggacgggagcgaggacaaccagaccacgaccauccagaccaucguggagguccagccccagcucgagauggagcugaccccgguggugcagacgaucgaggucaacuccuucagcggcuaccugaagcucaccgacaacguguacaucaagaacgccgacaucguggaggaggcgaagaaggucaagcccaccgugguggucaacgccgccaacguguaccugaagcacgggggcggcguggccggggcccugaacaaggcgaccaacaacgccaugcaggucgaguccgacgacuacaucgccacgaacggcccccucaagguggggggcagcugcguccuguccggccacaaccuggccaagcacugccuccacgugguggggcccaacgucaacaagggcgaggacauccagcugcugaagagcgccuacgagaacuucaaccagcacgaggugcuccuggcgccgcugcucuccgccgggaucuucggcgccgaccccauccacagccugcgggugugcgucgacaccgugcgcaccaacguguaccuggccgucuucgacaagaaccucuacgacaagcugguguccagcuuccuggagaugaagagcgagaagcagguggagcagaagaucgccgagauccccaaggaggaggucaagcccuucaucaccgaguccaagccgagcguggagcagcggaagcaggacgacaagaagaucaaggcgugcguggaggaggucacgaccacccucgaggagaccaaguuccugacggagaaccugcuccuguacaucgacaucaacgggaaccugcaccccgacuccgccacccucgugagcgacaucgacaucaccuuccugaagaaggacgcccccuacaucgugggcgacgucgugcaggagggcgugcugaccgccgucgugauccccacgaagaaggccgggggcaccaccgagaugcucgcgaaggcccugcgcaaggugccgaccgacaacuacaucacgaccuaccccgggcagggccugaacggguacaccgucgaggaggccaagaccgugcucaagaagugcaaguccgccuucuacauccugcccagcaucaucuccaacgagaagcaggagauccugggcaccgugagcuggaaccuccgggagaugcuggcgcacgccgaggagacgcgcaagcugaugcccgucugcguggagaccaaggccaucguguccaccauccagugcaaguacaagggcaucaagauccaggagggggucguggacuacggcgcccgguucuacuucuacaccagcaagacgaccguggccucccugaucaacacccucaacgaccugaacgagacccuggucacgaugccgcucggguacgugacccacggccugaaccuggaggaggcggcccgcuacaugcggagccucaaggugcccgccaccgucuccgugagcucccccgacgccgugaccgccuacaacggguaccugacgagcuccagcaagacccccgaggagcacuucaucgagaccaucucccuggcgggcagcuacaaggacuggagcuacuccggccagagcacccagcucgggaucgaguuccugaagcgcggcgacaaguccgucuacuacacgagcaacccgaccaccuuccaccuggacggggaggugaucaccuucgacaaccucaagacgcugcugucccuccgggaggugcgcaccaucaaggucuucaccaccguggacaacaucaaccugcacacgcagguggucgacaugagcaugaccuacggccagcaguucggccccaccuaccuggacggggccgacgugaccaagaucaagccccacaacucccacgagggcaagacguucuacgugcucccgaacgacgacacccugcgggucgaggccuucgaguacuaccacaccaccgaccccagcuuccuggggcgcuacauguccgcccucaaccacacgaagaaguggaaguacccccaggugaacggccugaccagcaucaagugggccgacaacaacugcuaccuggcgaccgcccuccugacccugcagcagaucgagcucaaguucaaccccccggcccugcaggacgccuacuaccgggcgcgcgccggggaggccgccaacuucugcgcccugauccucgcguacugcaacaagacggugggcgagcugggcgacguccgggagaccauguccuaccuguuccagcacgccaaccucgacagcugcaagcgcgugcugaacgucgugugcaagaccugcgggcagcagcagaccacccugaagggcguggaggccgucauguacauggggacgcucuccuacgagcaguucaagaagggcgugcagauccccugcaccugcgggaagcaggccaccaaguaccuggugcagcaggagagccccuucgucaugauguccgcccccccggcgcaguacgagcugaagcacggcaccuucacgugcgccagcgaguacaccggcaacuaccagugcgggcacuacaagcacaucaccuccaaggagacccucuacugcaucgacggcgcccugcugacgaagagcagcgaguacaaggggcccaucaccgacguguucuacaaggagaacuccuacaccaccacgaucaagcccgugaccuacaagcucgacggcgucgugugcaccgagaucgaccccaagcuggacaacuacuacaagaaggacaacagcuacuucaccgagcagccgaucgaccuggugcccaaccagcccuaccccaacgccuccuucgacaacuucaaguucgucugcgacaacaucaaguucgccgacgaccucaaccagcugacgggguacaagaagccggcgagccgggagcugaaggugaccuucuuccccgaccucaacggcgacguggucgccaucgacuacaagcacuacacccccuccuucaagaagggcgccaagcugcugcacaagcccaucguguggcacgugaacaacgccaccaacaaggcgacguacaagccgaacaccuggugcauccgcugccucuggagcaccaagcccgucgagaccuccaacagcuucgacgugcugaaguccgaggacgcccaggggauggacaaccuggccugcgaggaccucaagcccgugagcgaggaggucguggagaaccccacgauccagaaggacgugcuggagugcaacgucaagaccaccgagguggugggcgacaucauccugaagccggccaacaacucccucaagaucaccgaggaggucgggcacacggaccugauggccgcguacguggacaacagcucccugaccaucaagaagcccaacgagcucagccgggugcugggccugaagacccucgccacccacgggcuggccgccgucaacuccgugcccugggacacgaucgccaacuacgcgaagccguuccugaacaagguggucagcaccaccaccaacaucgugacgcgcugccucaaccgcgugugcaccaacuacaugcccuacuucuucacccugcugcuccagcugugcaccuucacccgguccacgaacagccgcaucaaggccuccaugcccaccaccaucgccaagaacaccgucaagagcgugggcaaguucugccuggaggccagcuucaacuaccucaagucccccaacuucagcaagcugaucaacaucaucaucugguuccugcuccuguccgugugccugggcagccucaucuacuccacggccgcgcuggggguccugaugagcaaccucggcaugccguccuacugcaccggguaccgggagggcuaccugaacagcaccaacgugaccaucgccacguacugcaccggcuccauccccugcagcgugugccuguccgggcucgacagccuggacaccuaccccucccuggagaccauccagaucacgaucagcuccuucaagugggaccucaccgccuucggccuggucgccgagugguuccuggccuacauccucuucacccgcuucuucuacgugcuggggcuggcggccaucaugcagcucuucuucagcuacuucgccgugcacuucaucuccaacagcuggcugauguggcugaucaucaaccugguccagauggcccccaucuccgcgauggugcggauguacaucuucuucgccagcuucuacuacguguggaagagcuacguccacgugguggacggcugcaacuccagcaccugcaugaugugcuacaagcgcaaccgggccacgcgcgucgagugcaccaccaucgugaacgggguccggcgcuccuucuacguguacgccaacggcggcaagggguucugcaagcuccacaacuggaacugcgugaacugcgacaccuucugcgccggcagcacguucaucuccgacgaggucgcgcgggaccugagccugcaguucaagcgcccgaucaaccccaccgaccaguccagcuacaucguggacuccgugaccgucaagaacgggagcauccaccucuacuucgacaaggccggccagaagaccuacgagcggcacucccugagccacuucgugaaccuggacaaccuccgcgccaacaacacgaaggggucccugcccaucaacgugaucgucuucgacggcaagagcaagugcgaggaguccagcgccaaguccgccagcguguacuacucccagcugaugugccagcccauccuccugcuggaccaggcgcucgugagcgacgucggcgacagcgccgagguggccgugaagauguucgacgccuacgucaacaccuucuccagcaccuucaacgugccgauggagaagcugaagacccugguggccacggcggaggccgagcucgccaagaacgucucccuggacaacgugcugagcaccuucaucuccgccgcgcggcagggguucguggacagcgacgucgagaccaaggacgugguggagugccucaagcugucccaccagagcgacaucgaggucaccggcgacuccugcaacaacuacaugcugacguacaacaagguggagaacaugaccccccgcgaccucggggccugcaucgacugcagcgcccggcacaucaacgcccagguggccaagucccacaacaucgcgcugaucuggaacgucaaggacuucaugagccuguccgagcagcuccgcaagcagauccggagcgccgccaagaagaacaaccugcccuucaagcugaccugcgccaccacgcgccagguggugaacgucgugaccaccaagaucgcccucaagggcgggugaggacuaguuauaagacugacuagcccgaugggccucccaacgggcccuccuccccuccuugcaccgagauuaauaaaaaaaaaaaaaaaaaaaaaaaaaaaaaaaaaaaaaaaaaaaaaaaaaaaaaaaaaaaaaaaaugcaucccccccccccccccccccccccccccccccaaaggcucuuuucagagccaccagaauu

SEQ ID NO: 21603 - RNA, 6058 nt, Artificial Sequence
  SARS-CoV-2__MT810916.1__non-structural protein 3 (NSP3) mRNA gc
aggagaaagcuuaccauggcccccaccaaggugaccuucggcgacgacacggucaucgaggugcagggguacaagagcgugaacaucaccuucgagcuggacgagcgcaucgacaagguccucaacgagaagugcuccgccuacaccguggagcugggcaccgaggugaacgaguucgcgugcgucguggccgacgccgugaucaagacgcugcagccggucagcgagcuccugaccccccuggggaucgaccucgacgagugguccauggccaccuacuaccuguucgacgagagcggcgaguucaagcuggccucccacauguacugcagcuucuacccccccgacgaggacgaggaggagggggacugcgaggaggaggaguucgagccguccacccaguacgaguacggcacggaggacgacuaccagggcaagccccucgaguucggggcgaccagcgccgcccugcagcccgaggaggagcaggaggaggacuggcuggacgacgacucccagcagaccgugggccagcaggacgggagcgaggacaaccagaccacgaccauccagaccaucguggagguccagccccagcucgagauggagcugaccccgguggugcagacgaucgaggucaacuccuucagcggcuaccugaagcucaccgacaacguguacaucaagaacgccgacaucguggaggaggcgaagaaggucaagcccaccgugguggucaacgccgccaacguguaccugaagcacgggggcggcguggccggggcccugaacaaggcgaccaacaacgccaugcaggucgaguccgacgacuacaucgccacgaacggcccccucaagguggggggcagcugcguccuguccggccacaaccuggccaagcacugccuccacgugguggggcccaacgucaacaagggcgaggacauccagcugcugaagagcgccuacgagaacuucaaccagcacgaggugcuccuggcgccgcugcucuccgccgggaucuucggcgccgaccccauccacagccugcgggugugcgucgacaccgugcgcaccaacguguaccuggccgucuucgacaagaaccucuacgacaagcugguguccagcuuccuggagaugaagagcgagaagcagguggagcagaagaucgccgagauccccaaggaggaggucaagcccuucaucaccgaguccaagccgagcguggagcagcggaagcaggacgacaagaagaucaaggcgugcguggaggaggucacgaccacccucgaggagaccaaguuccugacggagaaccugcuccuguacaucgacaucaacgggaaccugcaccccgacuccgccacccucgugagcgacaucgacaucaccuuccugaagaaggacgcccccuacaucgugggcgacgucgugcaggagggcgugcugaccgccgucgugauccccacgaagaaggccgggggcaccaccgagaugcucgcgaaggcccugcgcaaggugccgaccgacaacuacaucacgaccuaccccgggcagggccugaacggguacaccgucgaggaggccaagaccgugcucaagaagugcaaguccgccuucuacauccugcccagcaucaucuccaacgagaagcaggagauccugggcaccgugagcuggaaccuccgggagaugcuggcgcacgccgaggagacgcgcaagcugaugcccgucugcguggagaccaaggccaucguguccaccauccagcggaaguacaagggcaucaagauccaggagggggucguggacuacggcgcccgcuucuacuucuacaccagcaagacgaccguggccucccugaucaacacccucaacgaccugaacgagacccuggucacgaugccgcucggguacgugacccacggccugaaccuggaggaggcggcccgguacaugcgcagccucaaggugcccgccaccgucuccgugagcucccccgacgccgugaccgccuacaacggguaccugacgagcuccagcaagacccccgaggagcacuucaucgagaccaucucccuggcgggcagcuacaaggacuggagcuacuccggccagagcacccagcucgggaucgaguuccugaagcggggcgacaaguccgucuacuacacgagcaacccgaccaccuuccaccuggacggggaggugaucaccuucgacaaccucaagacgcugcugucccuccgcgaggugcggaccaucaaggucuucaccaccguggacaacaucaaccugcacacgcagguggucgacaugagcaugaccuacggccagcaguucggccccaccuaccuggacggggccgacgugaccaagaucaagccccacaacucccacgagggcaagacguucuacgugcucccgaacgacgacacccugcgcgucgaggccuucgaguacuaccacaccaccgaccccagcuuccuggggcgguacauguccgcccucaaccacacgaagaaguggaaguacccccaggugaacggccugaccagcaucaagugggccgacaacaacugcuaccuggcgaccgcccuccugacccugcagcagaucgagcucaaguucaaccccccggcccugcaggacgccuacuaccgcgcgcgggccggggaggccgccaacuucugcgcccugauccucgcguacugcaacaagacggugggcgagcugggcgacguccgcgagaccauguccuaccuguuccagcacgccaaccucgacagcugcaagcgggugcugaacgucgugugcaagaccugcgggcagcagcagaccacccugaagggcguggaggccgucauguacauggggacgcucuccuacgagcaguucaagaagggcgugcagauccccugcaccugcgggaagcaggccaccaaguaccuggugcagcaggagagccccuucgucaugauguccgcccccccggcgcaguacgagcugaagcacggcaccuucacgugcgccagcgaguacaccggcaacuaccagugcgggcacuacaagcacaucaccuccaaggagacccucuacugcaucgacggcgcccugcugacgaagagcagcgaguacaaggggcccaucaccgacguguucuacaaggagaacuccuacaccaccacgaucaagcccgugaccuacaagcucgacggcgucgugugcaccgagaucgaccccaagcuggacaacuacuacaagaaggacaacagcuacuucaccgagcagccgaucgaccuggugcccaaccagcccuaccccaacgccuccuucgacaacuucaaguucgucugcgacaacaucaaguucgccgacgaccucaaccagcugacgggguacaagaagccggcgagccgcgagcugaaggugaccuucuuccccgaccucaacggcgacguggucgccaucgacuacaagcacuacacccccuccuucaagaagggcgccaagcugcugcacaagcccaucguguggcacgugaacaacgucaccaacaaggccacguacaagccgaacaccuggugcauccggugccucuggagcaccaagcccguggagaccuccaacagcuucgacgugcugaaguccgaggacgcgcaggggauggacaaccuggccugcgaggaccucaagcccgucagcgaggaggugguggagaaccccacgauccagaaggacguccuggagugcaacgugaagaccaccgagguggucggcgacaucauccugaagccggccaacaacucccucaagaucaccgaggagguggggcacacggaccugauggccgccuacguggacaacagcucccugaccaucaagaagcccaacgagcucagccgcguccugggccugaagacccucgcgacccacgggcuggccgccgugaacuccgugcccugggacacgaucgccaacuacgccaagccguuccugaacaaggucgugagcaccaccaccaacaucgugacgcgcugccucaaccgggucugcaccaacuacaugcccuacuucuucacccugcugcuccagcugugcaccuucacccgcuccacgaacagccggaucaaggcguccaugcccaccaccaucgccaagaacaccgugaagagcgugggcaaguucugccuggaggccagcuucaacuaccucaagucccccaacuucagcaagcugaucaacaucaucaucugguuccugcuccuguccgucugccugggcagccucaucuacuccacggccgcccugggggugcugaugagcaaccucggcaugccguccuacugcaccggguaccgcgagggcuaccugaacagcaccaacgugaccaucgcgacguacugcaccggcuccauccccugcagcgucugccuguccgggcucgacagccuggacaccuaccccucccuggagaccauccagaucacgaucagcuccuucaagugggaccucaccgccuucggccugguggccgagugguuccuggccuacauccucuucacccgguucuucuacgugcuggggcuggccgcgaucaugcagcucuucuucagcuacuucgccguccacuucaucuccaacagcuggcugauguggcugaucaucaaccuggugcagauggcccccaucuccgccauggugcgcauguacaucuucuucgcgagcuucuacuacgucuggaagagcuacgugcacguggucgacggcugcaacuccagcaccugcaugaugugcuacaagcggaaccgcgccacgcggguggagugcaccaccaucgucaacggggugcgccgguccuucuacguguacgccaacggcggcaagggguucugcaagcuccacaacuggaacugcgucaacugcgacaccuucugcgccggcagcacguucaucuccgacgagguggcccgcgaccugagccugcaguucaagcggccgaucaaccccaccgaccaguccagcuacaucguggacuccgucaccgugaagaacgggagcauccaccucuacuucgacaaggcgggccagaagaccuacgagcgccacucccugagccacuucgugaaccuggacaaccuccgggccaacaacacgaaggggucccugcccaucaacgucaucguguucgacggcaagagcaagugcgaggaguccagcgccaaguccgccagcguguacuacucccagcugaugugccagcccauccuccugcuggaccaggcccucgucagcgacgugggcgacagcgcggagguggccgucaagauguucgacgccuacgugaacaccuucuccagcaccuucaacgugccgauggagaagcugaagacccuggucgccacggccgaggcggagcucgccaagaacgugucccuggacaacgugcugagcaccuucaucuccgccgcccgccagggguucgucgacagcgacguggagaccaaggacguggucgagugccucaagcugucccaccagagcgacaucgaggugaccggcgacuccugcaacaacuacaugcugacguacaacaagguggagaacaugaccccccgggaccucggggcgugcaucgacugcagcgcccgccacaucaacgcccaggucgccaagucccacaacaucgcccugaucuggaacgugaaggacuucaugagccuguccgagcagcuccggaagcagauccgcagcgcggccaagaagaacaaccugcccuucaagcugaccugcgccaccacgcgccagguggucaacguggugaccaccaagaucgcccucaagggcgggugaggacuaguuauaagacugacuagcccgaugggccucccaacgggcccuccuccccuccuugcaccgagauuaauaaaaaaaaaaaaaaaaaaaaaaaaaaaaaaaaaaaaaaaaaaaaaaaaaaaaaaaaaaaaaaaaugcaucccccccccccccccccccccccccccccccaaaggcucuuuucagagccaccagaauu

SEQ ID NO: 21604 - RNA, 6058 nt, Artificial Sequence
  SARS-CoV-2__MT810930.1__non-structural protein 3 (NSP3) mRNA gc
aggagaaagcuuaccauggcccccaccaaggugaccuucggcgacgacacggucaucgaggugcagggguacaagagcgugaacaucaccuucgagcuggacgagcgcaucgacaagguccucaacgagaagugcuccgccuacaccguggagcugggcaccgaggugaacgaguucgcgugcgucguggccgacgccgugaucaagacgcugcagccggucagcgagcuccugaccccccuggggaucgaccucgacgagugguccauggccaccuacuaccuguucgacgagagcggcgaguucaagcuggccucccacauguacugcagcuucuacccccccgacgaggacgaggaggagggggacugcgaggaggaggaguucgagccguccacccaguacgaguacggcacggaggacgacuaccagggcaagccccucgaguucggggcgaccagcgccgcccugcagcccgaggaggagcaggaggaggacuggcuggacgacgacucccagcagaccgugggccagcaggacgggagcgaggacaaccagaccacgaccauccagaccaucguggagguccagccccagcucgagauggagcugaccccgguggugcagacgaucgaggucaacuccuucagcggcuaccugaagcucaccgacaacguguacaucaagaacgccgacaucguggaggaggcgaagaaggucaagcccaccgugguggucaacgccgccaacguguaccugaagcacgggggcggcguggccggggcccugaacaaggcgaccaacaacgccaugcaggucgaguccgacgacuacaucgccacgaacggcccccucaagguggggggcagcugcguccuguccggccacaaccuggccaagcacugccuccacgugguggggcccaacgucaacaagggcgaggacauccagcugcugaagagcgccuacgagaacuucaaccagcacgaggugcuccuggcgccgcugcucuccgccgggaucuucggcgccgaccccauccacagccugcgggugugcgucgacaccgugcgcaccaacguguaccuggccgucuucgacaagaaccucuacgacaagcugguguccagcuuccuggagaugaagagcgagaagcagguggagcagaagaucgccgagauccccaaggaggaggucaagcccuucaucaccgaguccaagccgagcguggagcagcggaagcaggacgacaagaagaucaaggcgugcguggaggaggucacgaccacccucgaggagaccaaguuccugacggagaaccugcuccuguacaucgacaucaacgggaaccugcaccccgacuccgccacccucgugagcgacaucgacaucaccuuccugaagaaggacgcccccuacaucgugggcgacgucgugcaggagggcgugcugaccgccgucgugauccccacgaagaaggccgggggcaccaccgacaugcucgcgaaggcccugcgcaaggugccgaccgacaacuacaucacgaccuaccccgggcagggccugaacggguacaccgucgaggaggccaagaccgugcucaagaagugcaaguccgccuucuacauccugcccagcaucaucuccaacgagaagcaggagauccugggcaccgugagcuggaaccuccgggagaugcuggcgcacgccgaggagacgcgcaagcugaugcccgucugcguggagaccaaggccaucguguccaccauccagcggaaguacaagggcaucaagauccaggagggggucguggacuacggcgcccgcuucuacuucuacaccagcaagacgaccguggccucccugaucaacacccucaacgaccugaacgagacccuggucacgaugccgcucggguacgugacccacggccugaaccuggaggaggcggcccgguacaugcgcagccucaaggugcccgccaccgucuccgugagcucccccgacgccgugaccgccuacaacggguaccugacgagcuccagcaagacccccgaggagcacuucaucgagaccaucucccuggcgggcagcuacaaggacuggagcuacuccggccagagcacccagcucgggaucgaguuccugaagcggggcgacaaguccgucuacuacacgagcaacccgaccaccuuccaccuggacggggaggugaucaccuucgacaaccucaagacgcugcugucccuccgcgaggugcggaccaucaaggucuucaccaccguggacaacaucaaccugcacacgcagguggucgacaugagcaugaccuacggccagcaguucggccccaccuaccuggacggggccgacgugaccaagaucaagccccacaacucccacgagggcaagacguucuacgugcucccgaacgacgacacccugcgcgucgaggccuucgaguacuaccacaccaccgaccccagcuuccuggggcgguacauguccgcccucaaccacacgaagaaguggaaguacccccaggugaacggccugaccagcaucaagugggccgacaacaacugcuaccuggcgaccgcccuccugacccugcagcagaucgagcucaaguucaaccccccggcccugcaggacgccuacuaccgcgcgcgggccggggaggccgccaacuucugcgcccugauccucgcguacugcaacaagacggugggcgagcugggcgacguccgcgagaccauguccuaccuguuccagcacgccaaccucgacagcugcaagcgggugcugaacgucgugugcaagaccugcgggcagcagcagaccacccugaagggcguggaggccgucauguacauggggacgcucuccuacgagcaguucaagaagggcgugcagauccccugcaccugcgggaagcaggccaccaaguaccuggugcagcaggagagccccuucgucaugauguccgcccccccggcgcaguacgagcugaagcacggcaccuucacgugcgccagcgaguacaccggcaacuaccagugcgggcacuacaagcacaucaccuccaaggagacccucuacugcaucgacggcgcccugcugacgaagagcagcgaguacaaggggcccaucaccgacguguucuacaaggagaacuccuacaccaccacgaucaagcccgugaccuacaagcucgacggcgucgugugcaccgagaucgaccccaagcuggacaacuacuacaagaaggacaacagcuacuucaccgagcagccgaucgaccuggugcccaaccagcccuaccccaacgccuccuucgacaacuucaaguucgucugcgacaacaucaaguucgccgacgaccucaaccagcugacgggguacaagaagccggcgagccgcgagcugaaggugaccuucuuccccgaccucaacggcgacguggucgccaucgacuacaagcacuacacccccuccuucaagaagggcgccaagcugcugcacaagcccaucguguggcacgugaacaacgccaccaacaaggcgacguacaagccgaacaccuggugcauccggugccucuggagcaccaagcccgucgagaccuccaacagcuucgacgugcugaaguccgaggacgcccaggggauggacaaccuggccugcgaggaccucaagcccgugagcgaggaggucguggagaaccccacgauccagaaggacgugcuggagugcaacgucaagaccaccgagguggugggcgacaucauccugaagccggccaacaacucccucaagaucaccgaggaggucgggcacacggaccugauggccgcguacguggacaacagcucccugaccaucaagaagcccaacgagcucagccgcgugcugggccugaagacccucgccacccacgggcuggccgccgucaacuccgugcccugggacacgaucgccaacuacgcgaagccguuccugaacaagguggucagcaccaccaccaacaucgugacgcgcugccucaaccgggugugcaccaacuacaugcccuacuucuucacccugcugcuccagcugugcaccuucacccgcuccacgaacagccggaucaaggccuccaugcccaccaccaucgccaagaacaccgucaagagcgugggcaaguucugccuggaggccagcuucaacuaccucaagucccccaacuucagcaagcugaucaacaucaucaucugguuccugcuccuguccgugugccugggcagccucaucuacuccacggccgcgcuggggguccugaugagcaaccucggcaugccguccuacugcaccggguaccgcgagggcuaccugaacagcaccaacgugaccaucgccacguacugcaccggcuccauccccugcagcgugugccuguccgggcucgacagccuggacaccuaccccucccuggagaccauccagaucacgaucagcuccuucaagugggaccucaccgccuucggccuggucgccgagugguuccuggccuacauccucuucacccgguucuucuacgugcuggggcuggcggccaucaugcagcucuucuucagcuacuucgccgugcacuucaucuccaacagcuggcugauguggcugaucaucaaccugguccagauggcccccaucuccgcgauggugcgcauguacaucuucuucgccagcuucuacuacguguggaagagcuacguccacgugguggacggcugcaacuccagcaccugcaugaugugcuacaagcggaaccgcgccacgcgggucgagugcaccaccaucgugaacgggguccgccgguccuucuacguguacgccaacggcggcaagggguucugcaagcuccacaacuggaacugcgugaacugcgacaccuucugcgccggcagcacguucaucuccgacgaggucgcgcgcgaccugagccugcaguucaagcggccgaucaaccccaccgaccaguccagcuacaucguggacuccgugaccgucaagaacgggagcauccaccucuacuucgacaaggccggccagaagaccuacgagcgccacucccugagccacuucgugaaccuggacaaccuccgggccaacaacacgaaggggucccugcccaucaacgugaucgucuucgacggcaagagcaagugcgaggaguccagcgccaaguccgccagcguguacuacucccagcugaugugccagcccauccuccugcuggaccaggcgcucgugagcgacgucggcgacagcgccgagguggccgugaagauguucgacgccuacgucaacaccuucuccagcaccuucaacgugccgauggagaagcugaagacccugguggccacggcggaggccgagcucgccaagaacgucucccuggacaacgugcugagcaccuucaucuccgccgcgcgccagggguucguggacagcgacgucgagaccaaggacgugguggagugccucaagcugucccaccagagcgacaucgaggucaccggcgacuccugcaacaacuacaugcugacguacaacaagguggagaacaugaccccccgggaccucggggccugcaucgacugcagcgcccgccacaucaacgcccagguggccaagucccacaacaucgcgcugaucuggaacgucaaggacuucaugagccuguccgagcagcuccggaagcagauccgcagcgccgccaagaagaacaaccugcccuucaagcugaccugcgccaccacgcgccagguggugaacgucgugaccaccaagaucgcccucaagggcgggugaggacuaguuauaagacugacuagcccgaugggccucccaacgggcccuccuccccuccuugcaccgagauuaauaaaaaaaaaaaaaaaaaaaaaaaaaaaaaaaaaaaaaaaaaaaaaaaaaaaaaaaaaaaaaaaaugcaucccccccccccccccccccccccccccccccaaaggcucuuuucagagccaccagaauu

SEQ ID NO: 21605 - RNA, 6058 nt, Artificial Sequence
  SARS-CoV-2__MT810941.1__non-structural protein 3 (NSP3) mRNA gc
aggagaaagcuuaccauggcccccaccaaggugaccuucggcgacgacacggucaucgaggugcagggguacaagagcgugaacaucaccuucgagcuggacgagcgcaucgacaagguccucaacgagaagugcuccgccuacaccguggagcugggcaccgaggugaacgaguucgcgugcgucguggccgacgccgugaucaagacgcugcagccggucagcgagcuccugaccccccuggggaucgaccucgacgagugguccauggccaccuacuaccuguucgacgagagcggcgaguucaagcuggccucccacauguacugcagcuucuacccccccgacgaggacgaggaggagggggacugcgaggaggaggaguucgagccguccacccaguacgaguacggcacggaggacgacuaccagggcaagccccucgaguucggggcgaccagcgccgcccugcagcccgaggaggagcaggaggaggacuggcuggacgacgacucccagcagaccgugggccagcaggacgggagcgaggacaaccagaccacgaccauccagaccaucguggagguccagccccagcucgagauggagcugaccccgguggugcagacgaucgaggucaacuccuucagcggcuaccugaagcucaccgacaacguguacaucaagaacgccgacaucguggaggaggcgaagaaggucaagcccaccgugguggucaacgccgccaacguguaccugaagcacgggggcggcguggccggggcccugaacaaggcgaccaacaacgccaugcaggucgaguccgacgacuacaucgccacgaacggcccccucaagguggggggcagcugcguccuguccggccacaaccuggccaagcacugccuccacgugguggggcccaacgucaacaagggcgaggacauccagcugcugaagagcgccuacgagaacuucaaccagcacgaggugcuccuggcgccgcugcucuccgccgggaucuucggcgccgaccccauccacagccugcgggugugcgucgacaccgugcgcaccaacguguaccuggccgucuucgacaagaaccucuacgacaagcugguguccagcuuccuggagaugaagagcgagaagcagguggagcagaagaucgccgagauccccaaggaggaggucaagcccuucaucaccgaguccaagccgagcguggagcagcggaagcaggacgacaagaagaucaaggcgugcguggaggaggucacgaccacccucgaggagaccaaguuccugacggagaaccugcuccuguacaucgacaucaacgggaaccugcaccccgacuccgccacccucgugagcgacaucgacaucaccuuccugaagaaggacgcccccuacaucgugggcgacgucgugcaggagggcgugcugaccgccgucgugauccccacgaagaaggccgggggcaccaccgagaugcucgcgaaggcccugcgcaaggugccgaccgacaacuacaucacgaccuaccccgggcagggccugaacggguacaccgucgaggaggccaagaccgugcucaagaagugcaaguccgccuucuacauccugcccagcaucaucuccaacgagaagcaggagauccugggcaccgugagcuggaaccuccgggagaugcuggcgcacgccgaggagacgcgcaagcugaugcccgucugcguggagaccaaggccaucguguccaccauccagcggaaguacaagggcaucaagauccaggagggggucguggacuacggcgcccgcuucuacuucuacaccagcaagacgaccguggccucccugaucaacacccucaacgaccugaacgagacccuggucacgaugccgcucggguacgugacccacggccugaaccuggaggaggcggcccgguacaugcgcagccucaaggugcccgccaccgucuccgugagcucccccgacgccgugaccgccuacaacggguaccugacgagcuccagcaagacccccgaggagcacuucaucgagaccaucucccuggcgggcagcuacaaggacuggagcuacuccggccagagcacccagcucgggaucgaguuccugaagcggggcgacaaguccgucuacuacacgagcaacccgaccaccuuccaccuggacggggaggugaucaccuucgacaaccucaagacgcugcugucccuccgcgaggugcggaccaucaaggucuucaccaccguggacaacaucaaccugcacacgcagguggucgacaugagcaugaccuacggccagcaguucggccccaccuaccuggacggggccgacgugaccaagaucaagccccacaacucccacgagggcaagacguucuacgugcucccgaacgacgacacccugcgcgucgaggccuucgaguacuaccacaccaccgaccccagcuuccuggggcgguacauguccgcccucaaccacacgaagaaguggaaguacccccaggugaacggccugaccagcaucaagugggccgacaacaacugcuaccuggcgaccgcccuccugacccugcagcagaucgagcucaaguucaaccccccggcccugcaggacgccuacuaccgcgcgcgggccggggaggccgccaacuucugcgcccuggugcucgcguacugcaacaagacggucggcgagcugggcgacgugcgcgagaccauguccuaccuguuccagcacgccaaccucgacagcugcaagcggguccugaacguggugugcaagaccugcgggcagcagcagaccacccugaagggcgucgaggccgugauguacauggggacgcucuccuacgagcaguucaagaagggcgugcagauccccugcaccugcgggaagcaggccaccaaguaccugguccagcaggagagccccuucgugaugauguccgcccccccggcgcaguacgagcugaagcacggcaccuucacgugcgccagcgaguacaccggcaacuaccagugcgggcacuacaagcacaucaccuccaaggagacccucuacugcaucgacggcgcccugcugacgaagagcagcgaguacaaggggcccaucaccgacguguucuacaaggagaacuccuacaccaccacgaucaagcccgucaccuacaagcucgacggcguggugugcaccgagaucgaccccaagcuggacaacuacuacaagaaggacaacagcuacuucaccgagcagccgaucgaccugguccccaaccagcccuaccccaacgccuccuucgacaacuucaaguucgugugcgacaacaucaaguucgccgacgaccucaaccagcugacgggguacaagaagccggcgagccgcgagcugaaggugaccuucuuccccgaccucaacggcgacgucguggccaucgacuacaagcacuacacccccuccuucaagaagggcgccaagcugcugcacaagcccaucguguggcacgucaacaacgccaccaacaaggcgacguacaagccgaacaccuggugcauccggugccucuggagcaccaagcccguggagaccuccaacagcuucgacgugcugaaguccgaggacgcccaggggauggacaaccuggccugcgaggaccucaagcccgucagcgaggaggugguggagaaccccacgauccagaaggacguccuggagugcaacgugaagaccaccgagguggucggcgacaucauccugaagccggccaacaacucccucaagaucaccgaggagguggggcacacggaccugauggccgcguacguggacaacagcucccugaccaucaagaagcccaacgagcucagccgcguccugggccugaagacccucgccacccacgggcuggccgccgugaacuccgugcccugggacacgaucgccaacuacgcgaagccguuccugaacaaggucgugagcaccaccaccaacaucgugacgcgcugccucaaccgggucugcaccaacuacaugcccuacuucuucacccugcugcuccagcugugcaccuucacccgcuccacgaacagccggaucaaggccuccaugcccaccaccaucgccaagaacaccgugaagagcgugggcaaguucugccuggaggccagcuucaacuaccucaagucccccaacuucagcaagcugaucaacaucaucaucugguuccugcuccuguccgucugccugggcagccucaucuacuccacggccgcgcugggggugcugaugagcaaccucggcaugccguccuacugcaccggguaccgcgagggcuaccugaacagcaccaacgugaccaucgccacguacugcaccggcuccauccccugcagcgucugccuguccgggcucgacagccuggacaccuaccccucccuggagaccauccagaucacgaucagcuccuucaagugggaccucaccgccuucggccugguggccgagugguuccuggccuacauccucuucacccgguucuucuacgugcuggggcuggcggccaucaugcagcucuucuucagcuacuucgccguccacuucaucuccaacagcuggcugauguggcugaucaucaaccuggugcagauggcccccaucuccgcgauggugcgcauguacaucuucuucgccagcuucuacuacgucuggaagagcuacgugcacguggucgacggcugcaacuccagcaccugcaugaugugcuacaagcggaaccgcgccacgcggguggagugcaccaccaucgucaacggggugcgccgguccuucuacguguacgccaacggcggcaagggguucugcaagcuccacaacuggaacugcgucaacugcgacaccuucugcgccggcagcacguucaucuccgacgagguggcgcgcgaccugagccugcaguucaagcggccgaucaaccccaccgaccaguccagcuacaucguggacuccgucaccgugaagaacgggagcauccaccucuacuucgacaaggccggccagaagaccuacgagcgccacucccugagccacuucgugaaccuggacaaccuccgggccaacaacacgaaggggucccugcccaucaacgucaucguguucgacggcaagagcaagugcgaggaguccagcgccaaguccgccagcguguacuacucccagcugaugugccagcccauccuccugcuggaccaggcgcucgucagcgacgugggcgacagcgccgagguggccgucaagauguucgacgccuacgugaacaccuucuccagcaccuucaacgugccgauggagaagcugaagacccuggucgccacggcggaggccgagcucgccaacaacgugucccuggacaacgugcugagcaccuucaucuccgccgcgcgccagggguucgucgacagcgacguggagaccaaggacguggucgagugccucaagcugucccaccagagcgacaucgaggugaccggcgacuccugcaacaacuacaugcugacguacaacaagguggagaacaugaccccccgggaccucggggccugcaucgacugcagcgcccgccacaucaacgcccaggucgccaagucccacaacaucgcgcugaucuggaacgugaaggacuucaugagccuguccgagcagcuccggaagcagauccgcagcgccgccaagaagaacaaccugcccuucaagcugaccugcgccaccacgcgccagguggucaacguggugaccaccaagaucgcccucaagggcgggugaggacuaguuauaagacugacuagcccgaugggccucccaacgggcccuccuccccuccuugcaccgagauuaauaaaaaaaaaaaaaaaaaaaaaaaaaaaaaaaaaaaaaaaaaaaaaaaaaaaaaaaaaaaaaaaaugcaucccccccccccccccccccccccccccccccaaaggcucuuuucagagccaccagaauu

SEQ ID NO: 21606 - RNA, 6058 nt, Artificial Sequence
  SARS-CoV-2__MT810979.1__non-structural protein 3 (NSP3) mRNA gc
aggagaaagcuuaccauggcccccaccaaggugaccuucggcgacgacacggucaucgaggugcagggguacaagagcgugaacaucaccuucgagcuggacgagcgcaucgacaagguccucaacgagaagugcuccgccuacaccguggagcugggcaccgaggugaacgaguucgcgugcgucguggccgacgccgugaucaagacgcugcagccggucagcgagcuccugaccccccuggggaucgaccucgacgagugguccauggccaccuacuaccuguucgacgagagcggcgaguucaagcuggccucccacauguacugcagcuucuacccccccgacgaggacgaggaggagggggacugcgaggaggaggaguucgagccguccacccaguacgaguacggcacggaggacgacuaccagggcaagccccucgaguucggggcgaccagcgccgcccugcagcccgaggaggagcaggaggaggacuggcuggacgacgacucccagcagaccgugggccagcaggacgggagcgaggacaaccagaccacgaccauccagaccaucguggagguccagccccagcucgagauggagcugaccccgguggugcagacgaucgaggucaacuccuucagcggcuaccugaagcucaccgacaacguguacaucaagaacgccgacaucguggaggaggcgaagaaggucaagcccaccgugguggucaacgccgccaacguguaccugaagcacgggggcggcguggccggggcccugaacaaggcgaccaacaacgccaugcaggucgaguccgacgacuacaucgccacgaacggcccccucaagguggggggcagcugcguccuguccggccacaaccuggccaagcacugccuccacgugguggggcccaacgucaacaagggcgaggacauccagcugcugaagagcgccuacgagaacuucaaccagcacgaggugcuccuggcgccgcugcucuccgccgggaucuucggcgccgaccccauccacagccugcgggugugcgucgacaccgugcgcaccaacguguaccuggccgucuucgacaagaaccucuacgacaagcugguguccagcuuccuggagaugaagagcgagaagcagguggagcagaagaucgccgagauccccaaggaggaggucaagcccuucaucaccgaguccaagccgagcguggagcagcggaagcaggacgacaagaagaucaaggcgugcguggaggaggucacgaccacccucgaggagaccaaguuccugacggagaaccugcuccuguacaucgacaucaacgggaaccugcaccccgacuccgccacccucgugagcgacaucgacaucaccuuccugaagaaggacgcccccuacaucgugggcgacgucgugcaggagggcgugcugaccgccgucgugauccccacgaagaaggccgggggcaccaccgagaugcucgcgaaggcccugcgcaaggugccgaccgacaacuacaucacgaccuaccccgggcagggccugaacggguacaccgucgaggaggccaagaccgugcucaagaagugcaaguccgccuucuacauccugcccagcaucaucuccaacgagaagcaggagauccugggcaccgugagcuggaaccuccgggagaugcuggcgcacgccgaggagacgcgcaagcugaugcccgucugcguggagaccaaggccaucguguccaccauccagcggaaguacaagggcaucaagauccaggagggggucguggacuacggcgcccgcuucuacuucuacaccagcaagacgaccguggccucccugaucaacacccucaacgaccugaacgagacccuggucacgaugccgcucggguacgugacccacggccugaaccuggaggaggcggcccgguacaugcgcagccucaaggugcccgccaccgucuccgugagcucccccgacgccgugaccgccuacaacggguaccugacgagcuccagcaagacccccgaggagcacuucaucgagaccaucucccuggcgggcagcuacaaggacuggagcuacuccggccagagcacccagcucgggaucgaguuccugaagcggggcgacaaguccgucuacuacacgagcaacccgaccaccuuccaccuggacggggaggugaucaccuucgacaaccucaagacgcugcugucccuccgcgaggugcggaccaucaaggucuucaccaccguggacaacaucaaccugcacacgcagguggucgacaugagcaugaccuacggccagcaguucggccccaccuaccuggacggggccgacgugaccaagaucaagccccacaacucccacgagggcaagacguucuacgugcucccgaacgacgacacccugcgcgucgaggccuucgaguacuaccacaccaccgaccccagcuuccuggggcgguacauguccgcccucaaccacacgaagaaguggaaguacccccaggugaacggccugaccagcaucaagugggccgacaacaacugcuaccuggcgaccgcccuccugacccugcagcagaucgagcucaaguucaaccccccggcccugcaggacgccuacuaccgcgcgcgggccggggaggccgccaacuucugcgcccugauccucgcguacugcaacaagacggugggcgagcugggcgacguccgcgagaccauguccuaccuguuccagcacgccaaccucgacagcugcaagcgggugcugaacgucgugugcaagaccugcgggcagcagcagaccacccugaagggcguggaggccgucauguacauggggacgcucuccuacgagcaguucaagaagggcgugcagauccccugcaccugcgggaagcaggccaccaaguaccuggugcagcaggagagccccuucgucaugauguccgcccccccggcgcaguacgagcugaagcacggcaccuucacgugcgccagcgaguacaccggcaacuaccagugcgggcacuacaagcacaucaccuccaaggagacccucuacugcaucgacggcgcccugcugacgaagagcagcgaguacaaggggcccaucaccgacguguucuacaaggagaacuccuacaccaccacgaucaagcccgugaccuacaagcucgacggcgucgugugcaccgagaucgaccccaagcuggacaacuacuacaagaaggacaacagcuacuucaccgagcagccgaucgaccuggugcccaaccagcccuaccccaacgccuccuucgacaacuucaaguucgucugcgacaacaucaaguucgccgacgaccucaaccagcugacgggguacaagaagccggcgagccgcgagcugaaggugaccuucuuccccgaccucaacggcgacguggucgccaucgacuacaagcacuacacccccuccuucaagaagggcgccaagcugcugcacaagcccaucguguggcacgugaacaacgccaccaacaaggcgacguacaagccgaacaccuggugcauccggugccucuggagcaccaagcccgucgagaccuccaacagcuucgacgugcugaaguccgaggacgcccaggggauggacaaccuggccugcgaggaccucaagcccgugagcgaggaggucguggagaaccccacgauccagaaggacgugcuggagugcaacgucaagaccaccgagguggugggcgacaucauccugaagccggccaacaacucccucaagaucaccgaggaggucgggcacacggaccugauggccgcguacguggacaacagcucccugaccaucaagaagcccaacgagcucagccgcgugcugggccugaagaccuucgccacccacgggcucgccgccgucaacuccgugcccugggacacgaucgccaacuacgcgaagccguuccugaacaagguggucagcaccaccaccaacaucgugacgcgcugccugaaccgggugugcaccaacuacaugcccuacuucuucacccuccugcugcagcucugcaccuucacccgcuccacgaacagccggaucaaggccuccaugcccaccaccaucgccaagaacaccgucaagagcgugggcaaguucugccuggaggccagcuucaacuaccugaagucccccaacuucagcaagcucaucaacaucaucaucugguuccugcugcucuccgugugccugggcagccugaucuacuccacggccgcgcucgggguccugaugagcaaccugggcaugccguccuacugcaccggguaccgcgagggcuaccucaacagcaccaacgugaccaucgccacguacugcaccggcuccauccccugcagcgugugccuguccgggcuggacagccucgacaccuaccccucccuggagaccauccagaucacgaucagcuccuucaagugggaccugaccgccuucggccucgucgccgagugguuccuggccuacauccuguucacccgguucuucuacgugcucgggcuggcggccaucaugcagcuguucuucagcuacuucgccgugcacuucaucuccaacagcuggcucauguggcugaucaucaaccugguccagauggcccccaucuccgcgauggugcgcauguacaucuucuucgccagcuucuacuacguguggaagagcuacguccacgugguggacggcugcaacuccagcaccugcaugaugugcuacaagcggaaccgcgccacgcgggucgagugcaccaccaucgugaacgggguccgccgguccuucuacguguacgccaacggcggcaagggguucugcaagcugcacaacuggaacugcgugaacugcgacaccuucugcgccggcagcacguucaucuccgacgaggucgcgcgcgaccucagccugcaguucaagcggccgaucaaccccaccgaccaguccagcuacaucguggacuccgugaccgucaagaacgggagcauccaccuguacuucgacaaggccggccagaagaccuacgagcgccacucccucagccacuucgugaaccuggacaaccugcgggccaacaacacgaaggggucccuccccaucaacgugaucgucuucgacggcaagagcaagugcgaggaguccagcgccaaguccgccagcguguacuacucccagcugaugugccagcccauccugcuccuggaccaggcgcuggugagcgacgucggcgacagcgccgagguggccgugaagauguucgacgccuacgucaacaccuucuccagcaccuucaacgugccgauggagaagcucaagacccugguggccacggcggaggccgagcuggccaagaacgucucccucgacaacgugcugagcaccuucaucuccgccgcgcgccagggguucguggacagcgacgucgagaccaaggacgugguggagugccugaagcucucccaccagagcgacaucgaggucaccggcgacuccugcaacaacuacaugcugacguacaacaagguggagaacaugaccccccgggaccugggggccugcaucgacugcagcgcccgccacaucaacgcccagguggccaagucccacaacaucgcgcucaucuggaacgucaaggacuucaugagccuguccgagcagcugcggaagcagauccgcagcgccgccaagaagaacaaccuccccuucaagcugaccugcgccaccacgcgccagguggugaacgucgugaccaccaagaucgcccugaagggcgggugaggacuaguuauaagacugacuagcccgaugggccucccaacgggcccuccuccccuccuugcaccgagauuaauaaaaaaaaaaaaaaaaaaaaaaaaaaaaaaaaaaaaaaaaaaaaaaaaaaaaaaaaaaaaaaaaugcaucccccccccccccccccccccccccccccccaaaggcucuuuucagagccaccagaauu

SEQ ID NO: 21607 - RNA, 6058 nt, Artificial Sequence
  SARS-CoV-2__MT810984.1__non-structural protein 3 (NSP3) mRNA gc
aggagaaagcuuaccauggcccccaccaaggugaccuucggcgacgacacggucaucgaggugcagggguacaagagcgugaacaucaccuucgagcuggacgagcgcaucgacaagguccucaacgagaagugcuccgccuacaccguggagcugggcaccgaggugaacgaguucgcgugcgucguggccgacgccgugaucaagacgcugcagccggucagcgagcuccugaccccccuggggaucgaccucgacgagugguccauggccaccuacuaccuguucgacgagagcggcgaguucaagcuggccucccacauguacugcagcuucuacccccccgacgaggacgaggaggagggggacugcgaggaggaggaguucgagccguccacccaguacgaguacggcacggaggacgacuaccagggcaagccccucgaguucggggcgaccagcgccgcccugcagcccgaggaggagcaggaggaggacuggcuggacgacgacucccagcagaccgugggccagcaggacgggagcgaggacaaccagaccacgaccauccagaccaucguggagguccagccccagcucgagauggagcugaccccgguggugcagacgaucgaggucaacuccuucagcggcuaccugaagcucaccgacaacguguacaucaagaacgccgacaucguggaggaggcgaagaaggucaagcccaccgugguggucaacgccgccaacguguaccugaagcacgggggcggcguggccggggcccugaacaaggcgaccaacaacgccaugcaggucgaguccgacgacuacaucgccacgaacggcccccucaagguggggggcagcugcguccuguccggccacaaccuggccaagcacugccuccacgugguggggcccaacgucaacaagggcgaggacauccagcugcugaagagcgccuacgagaacuucaaccagcacgaggugcuccuggcgccgcugcucuccgccgggaucuucggcgccgaccccauccacagccugcgggugugcgucgacaccgugcgcaccaacguguaccuggccgucuucgacaagaaccucuacgacaagcugguguccagcuuccuggagaugaagagcgagaagcagguggagcagaagaucgccgagauccccaaggaggaggucaagcccuucaucaccgaguccaagccgagcguggagcagcggaagcaggacgacaagaagaucaaggcgugcguggaggaggucacgaccacccucgaggagaccaaguuccugacggagaaccugcuccuguacaucgacaucaacgggaaccugcaccccgacuccgccacccucgugagcgacaucgacaucaccuuccugaagaaggacgcccccuacaucgugggcgacgucgugcaggagggcgugcugaccgccgucgugauccccacgaagaaggccgggggcaccaccgagaugcucgcgaaggcccugcgcaaggugccgaccgacaacuacaucacgaccuaccccgggcagggccugaacggguacaccgucgaggaggccaagaccgugcucaagaagugcaaguccguguucuacauccugcccagcaucaucuccaacgagaagcaggagauccugggcaccgucagcuggaaccuccgggagaugcuggcccacgcggaggagacgcgcaagcugaugcccgugugcguggagaccaaggccaucgucuccaccauccagcggaaguacaagggcaucaagauccaggagggggugguggacuacggcgcccgcuucuacuucuacaccagcaagacgaccgucgccucccugaucaacacccucaacgaccugaacgagacccuggugacgaugccgcucggguacgugacccacggccugaaccuggaggaggccgcgcgguacaugcgcagccucaagguccccgccaccguguccgugagcucccccgacgccgucaccgccuacaacggguaccugacgagcuccagcaagacccccgaggagcacuucaucgagaccaucucccuggccggcagcuacaaggacuggagcuacuccggccagagcacccagcucgggaucgaguuccugaagcggggcgacaaguccguguacuacacgagcaacccgaccaccuuccaccuggacggggaggugaucaccuucgacaaccucaagacgcugcugucccuccgcgagguccggaccaucaagguguucaccaccguggacaacaucaaccugcacacgcaggucguggacaugagcaugaccuacggccagcaguucggccccaccuaccuggacggggcggacgugaccaagaucaagccccacaacucccacgagggcaagacguucuacguccucccgaacgacgacacccugcgcguggaggccuucgaguacuaccacaccaccgaccccagcuuccuggggcgguacauguccgcccucaaccacacgaagaaguggaaguacccccaggugaacggccugaccagcaucaagugggccgacaacaacugcuaccuggccaccgcgcuccugacccugcagcagaucgagcucaaguucaaccccccggcccugcaggacgccuacuaccgcgcccgggcgggggaggccgccaacuucugcgcccugauccucgccuacugcaacaagacggucggcgagcugggcgacgugcgcgagaccauguccuaccuguuccagcacgcgaaccucgacagcugcaagcggguccugaacguggugugcaagaccugcgggcagcagcagaccacccugaagggcgucgaggccgugauguacauggggacgcucuccuacgagcaguucaagaagggcgugcagauccccugcaccugcgggaagcaggccaccaaguaccugguccagcaggagagccccuucgugaugauguccgcccccccggcccaguacgagcugaagcacggcaccuucacgugcgcgagcgaguacaccggcaacuaccagugcgggcacuacaagcacaucaccuccaaggagacccucuacugcaucgacggcgcccugcugacgaagagcagcgaguacaaggggcccaucaccgacguguucuacaaggagaacuccuacaccaccacgaucaagcccgucaccuacaagcucgacggcguggugugcaccgagaucgaccccaagcuggacaacuacuacaagaaggacaacagcuacuucaccgagcagccgaucgaccugguccccaaccagcccuaccccaacgccuccuucgacaacuucaaguucgugugcgacaacaucaaguucgccgacgaccucaaccagcugacgggguacaagaagccggccagccgcgagcugaaggugaccuucuuccccgaccucaacggcgacgucguggcgaucgacuacaagcacuacacccccuccuucaagaagggcgccaagcugcugcacaagcccaucguguggcacgucaacaacgccaccaacaaggccacguacaagccgaacaccuggugcauccggugccucuggagcaccaagcccguggagaccuccaacagcuucgacgugcugaaguccgaggacgcgcaggggauggacaaccuggccugcgaggaccucaagcccgucagcgaggaggugguggagaaccccacgauccagaaggacguccuggagugcaacgugaagaccaccgagguggucggcgacaucauccugaagccggccaacaacucccucaagaucaccgaggagguggggcacacggaccugauggccgccuacguggacaacagcucccugaccaucaagaagcccaacgagcucagccgcguccugggccugaagacccucgcgacccacgggcuggccgccgugaacuccgugcccugggacacgaucgccaacuacgccaagccguuccugaacaaggucgugagcaccaccaccaacaucgugacgcgcugccucaaccgggucugcaccaacuacaugcccuacuucuucacccugcugcuccagcugugcaccuucacccgcuccacgaacagccggaucaaggcguccaugcccaccaccaucgccaagaacaccgugaagagcgugggcaaguucugccuggaggccagcuucaacuaccucaagucccccaacuucagcaagcugaucaacaucaucaucugguuccugcuccuguccgucugccugggcagccucaucuacuccacggccgcccugggggugcugaugagcaaccucggcaugccguccuacugcaccggguaccgcgagggcuaccugaacagcaccaacgugaccaucgcgacguacugcaccggcuccauccccugcagcgucugccuguccgggcucgacagccuggacaccuaccccucccuggagaccauccagaucacgaucagcuccuucaagugggaccucaccgccuucggccugguggccgagugguuccuggccuacauccucuucacccgguucuucuacgugcuggggcuggccgcgaucaugcagcucuucuucagcuacuucgccguccacuucaucuccaacagcuggcugauguggcugaucaucaaccuggugcagauggcccccaucuccgccauggugcgcauguacaucuucuucgcgagcuucuacuacgucuggaagagcuacgugcacguggucgacggcugcaacuccagcaccugcaugaugugcuacaagcggaaccgcgccacgcggguggagugcaccaccaucgucaacggggugcgccgguccuucuacguguacgccaacggcggcaagggguucugcaagcuccacaacuggaacugcgucaacugcgacaccuucugcgccggcagcacguucaucuccgacgagguggcccgcgaccugagccugcaguucaagcggccgaucaaccccaccgaccaguccagcuacaucguggacuccgucaccgugaagaacgggagcauccaccucuacuucgacaaggcgggccagaagaccuacgagcgccacucccugagccacuucgugaaccuggacaaccuccgggccaacaacacgaaggggucccugcccaucaacgucaucguguucgacggcaagagcaagugcgaggaguccagcgccaaguccgccagcguguacuacucccagcugaugugccagcccauccuccugcuggaccaggcccucgucagcgacgugggcgacagcgcggagguggccgucaagauguucgacgccuacgugaacaccuucuccagcaccuucaacgugccgauggagaagcugaagacccuggucgccacggccgaggcggagcucgccaagaacgugucccuggacaacgugcugagcaccuucaucuccgccgcccgccagggguucgucgacagcgacguggagaccaaggacguggucgagugccucaagcugucccaccagagcgacaucgaggugaccggcgacuccugcaacaacuacaugcugacguacaacaagguggagaacaugaccccccgggaccucggggcgugcaucgacugcagcgcccgccacaucaacgcccaggucgccaagucccacaacaucgcccugaucuggaacgugaaggacuucaugagccuguccgagcagcuccggaagcagauccgcagcgcggccaagaagaacaaccugcccuucaagcugaccugcgccaccacgcgccagguggucaacguggugaccaccaagaucgcccucaagggcgggugaggacuaguuauaagacugacuagcccgaugggccucccaacgggcccuccuccccuccuugcaccgagauuaauaaaaaaaaaaaaaaaaaaaaaaaaaaaaaaaaaaaaaaaaaaaaaaaaaaaaaaaaaaaaaaaaugcaucccccccccccccccccccccccccccccccaaaggcucuuuucagagccaccagaauu

SEQ ID NO: 21608 - RNA, 6058 nt, Artificial Sequence
  SARS-CoV-2__MT810985.1__non-structural protein 3 (NSP3) mRNA gc
aggagaaagcuuaccauggcccccaccaaggugaccuucggcgacgacacggucaucgaggugcagggguacaagagcgugaacaucaccuucgagcuggacgagcgcaucgacaagguccucaacgagaagugcuccgccuacaccguggagcugggcaccgaggugaacgaguucgcgugcgucguggccgacgccgugaucaagacgcugcagccggucagcgagcuccugaccccccuggggaucgaccucgacgagugguccauggccaccuacuaccuguucgacgagagcggcgaguucaagcuggccucccacauguacugcagcuucuacccccccgacgaggacgaggaggagggggacugcgaggaggaggaguucgagccguccacccaguacgaguacggcacggaggacgacuaccagggcaagccccucgaguucggggcgaccagcgccgcccugcagcccgaggaggagcaggaggaggacuggcuggacgacgacucccagcagaccgugggccagcaggacgggagcgaggacaaccagaccacgaccauccagaccaucguggagguccagccccagcucgagauggagcugaccccgguggugcagacgaucgaggucaacuccuucagcggcuaccugaagcucaccgacaacguguacaucaagaacgccgacaucguggaggaggcgaagaaggucaagcccaccgugguggucaacgccgccaacguguaccugaagcacgggggcggcguggccggggcccugaacaaggcgaccaacaacgccaugcaggucgaguccgacgacuacaucgccacgaacggcccccucaagguggggggcagcugcguccuguccggccacaaccuggccaagcacugccuccacgugguggggcccaacgucaacaagggcgaggacauccagcugcugaagagcgccuacgagaacuucaaccagcacgaggugcuccuggcgccgcugcucuccgccgggaucuucggcgccgaccccauccacagccugcgggugugcgucgacaccgugcgcaccaacguguaccuggccgucuucgacaagaaccucuacgacaagcugguguccagcuuccuggagaugaagagcgagaagcagguggagcagaagaucgccgagauccccaaggaggaggucaagcccuucaucaccgaguccaagccgagcguggagcagcggaagcaggacgacaagaagaucaaggcgugcguggaggaggucacgaccacccucgaggagaccaaguuccugacggagaaccugcuccuguacaucgacaucaacgggaaccugcaccccgacuccgccacccucgugagcgacaucgacaucaccuuccugaagaaggacgcccccuacaucgugggcgacgucauccaggagggcgugcugaccgccguggucauccccacgaagaaggccgggggcaccaccgagaugcucgcgaaggcccugcgcaaggugccgaccgacaacuacaucacgaccuaccccgggcagggccugaacggguacaccguggaggaggccaagaccguccucaagaagugcaaguccgccuucuacauccugcccagcaucaucuccaacgagaagcaggagauccugggcaccgugagcuggaaccuccgggagaugcuggcgcacgccgaggagacgcgcaagcugaugcccgugugcgucgagaccaaggccaucguguccaccauccagcggaaguacaagggcaucaagauccaggaggggguggucgacuacggcgcccgcuucuacuucuacaccagcaagacgaccguggccucccugaucaacacccucaacgaccugaacgagacccuggugacgaugccgcucggguacgucacccacggccugaaccuggaggaggcggcccgguacaugcgcagccucaaggugcccgccaccguguccgucagcucccccgacgccgugaccgccuacaacggguaccugacgagcuccagcaagacccccgaggagcacuucaucgagaccaucucccuggcgggcagcuacaaggacuggagcuacuccggccagagcacccagcucgggaucgaguuccugaagcggggcgacaaguccguguacuacacgagcaacccgaccaccuuccaccuggacggggaggucaucaccuucgacaaccucaagacgcugcugucccuccgcgaggugcggaccaucaagguguucaccaccgucgacaacaucaaccugcacacgcaggugguggacaugagcaugaccuacggccagcaguucggccccaccuaccuggacggggccgacgucaccaagaucaagccccacaacucccacgagggcaagacguucuacgugcucccgaacgacgacacccugcgcguggaggccuucgaguacuaccacaccaccgaccccagcuuccuggggcgguacauguccgcccucaaccacacgaagaaguggaaguacccccaggucaacggccugaccagcaucaagugggccgacaacaacugcuaccuggcgaccgcccuccugacccugcagcagaucgagcucaaguucaaccccccggcccugcaggacgccuacuaccgcgcgcgggccggggaggccgccaacuucugcgcccugauccucgcguacugcaacaagacggugggcgagcugggcgacgugcgcgagaccauguccuaccuguuccagcacgccaaccucgacagcugcaagcggguccugaacguggucugcaagaccugcgggcagcagcagaccacccugaagggcguggaggccgugauguacauggggacgcucuccuacgagcaguucaagaagggcguccagauccccugcaccugcgggaagcaggccaccaaguaccuggugcagcaggagagccccuucgugaugauguccgcccccccggcgcaguacgagcugaagcacggcaccuucacgugcgccagcgaguacaccggcaacuaccagugcgggcacuacaagcacaucaccuccaaggagacccucuacugcaucgacggcgcccugcugacgaagagcagcgaguacaaggggcccaucaccgacgucuucuacaaggagaacuccuacaccaccacgaucaagcccgugaccuacaagcucgacggcguggucugcaccgagaucgaccccaagcuggacaacuacuacaagaaggacaacagcuacuucaccgagcagccgaucgaccuggugcccaaccagcccuaccccaacgccuccuucgacaacuucaaguucgugugcgacaacaucaaguucgccgacgaccucaaccagcugacgggguacaagaagccggcgagccgcgagcugaaggucaccuucuuccccgaccucaacggcgacgugguggccaucgacuacaagcacuacacccccuccuucaagaagggcgccaagcugcugcacaagcccaucgucuggcacgugaacaacgccaccaacaaggcgacguacaagccgaacaccuggugcauccggugccucuggagcaccaagcccguggagaccuccaacagcuucgacguccugaaguccgaggacgcccaggggauggacaaccuggccugcgaggaccucaagcccgugagcgaggagguggucgagaaccccacgauccagaaggacgugcuggagugcaacgugaagaccaccgaggucgugggcgacaucauccugaagccggccaacaacucccucaagaucaccgaggagguggggcacacggaccugauggccgcguacgucgacaacagcucccugaccaucaagaagcccaacgagcucagccgcgugcugggccugaagacccucgccacccacgggcuggccgccgugaacuccguccccugggacacgaucgccaacuacgcgaagccguuccugaacaagguggugagcaccaccaccaacaucgucacgcgcugccucaaccgggugugcaccaacuacaugcccuacuucuucacccugcugcuccagcugugcaccuucacccgcuccacgaacagccggaucaaggccuccaugcccaccaccaucgccaagaacaccgugaagagcgucggcaaguucugccuggaggccagcuucaacuaccucaagucccccaacuucagcaagcugaucaacaucaucaucugguuccugcuccuguccgugugccugggcagccucaucuacuccacggccgcgcugggggugcugaugagcaaccucggcaugccguccuacugcaccggguaccgcgagggcuaccugaacagcaccaacgucaccaucgccacguacugcaccggcuccauccccugcagcgugugccuguccgggcucgacagccuggacaccuaccccucccuggagaccauccagaucacgaucagcuccuucaagugggaccucaccgccuucggccugguggccgagugguuccuggccuacauccucuucacccgguucuucuacguccuggggcuggcggccaucaugcagcucuucuucagcuacuucgccgugcacuucaucuccaacagcuggcugauguggcugaucaucaaccuggugcagauggcccccaucuccgcgaugguccgcauguacaucuucuucgccagcuucuacuacguguggaagagcuacgugcacgucguggacggcugcaacuccagcaccugcaugaugugcuacaagcggaaccgcgccacgcggguggagugcaccaccaucgucaacggggugcgccgguccuucuacgucuacgccaacggcggcaagggguucugcaagcuccacaacuggaacugcgugaacugcgacaccuucugcgccggcagcacguucaucuccgacgagguggcgcgcgaccugagccugcaguucaagcggccgaucaaccccaccgaccaguccagcuacaucgucgacuccgugaccgugaagaacgggagcauccaccucuacuucgacaaggccggccagaagaccuacgagcgccacucccugagccacuucgucaaccuggacaaccuccgggccaacaacacgaaggggucccugcccaucaacgugaucguguucgacggcaagagcaagugcgaggaguccagcgccaaguccgccagcgucuacuacucccagcugaugugccagcccauccuccugcuggaccaggcgcucgugagcgacgugggcgacagcgccgaggucgccgugaagauguucgacgccuacgugaacaccuucuccagcaccuucaacgucccgauggagaagcugaagacccugguggccacggcggaggccgagcucgccaagaacgugucccuggacaacguccugagcaccuucaucuccgccgcgcgccagggguucguggacagcgacguggagaccaaggacgucguggagugccucaagcugucccaccagagcgacaucgaggugaccggcgacuccugcaacaacuacaugcugacguacaacaaggucgagaacaugaccccccgggaccucggggccugcaucgacugcagcgcccgccacaucaacgcccagguggccaagucccacaacaucgcgcugaucuggaacgugaaggacuucaugagccuguccgagcagcuccggaagcagauccgcagcgccgccaagaagaacaaccugcccuucaagcugaccugcgccaccacgcgccaggucgugaacguggucaccaccaagaucgcccucaagggcgggugaggacuaguuauaagacugacuagcccgaugggccucccaacgggcccuccuccccuccuugcaccgagauuaauaaaaaaaaaaaaaaaaaaaaaaaaaaaaaaaaaaaaaaaaaaaaaaaaaaaaaaaaaaaaaaaaugcaucccccccccccccccccccccccccccccccaaaggcucuuuucagagccaccagaauu

SEQ ID NO: 21609 - RNA, 6058 nt, Artificial Sequence
  SARS-CoV-2__MT811197.1__non-structural protein 3 (NSP3) mRNA gc
aggagaaagcuuaccauggcccccaccaaggugaccuucggcgacgacacggucaucgaggugcagggguacaagagcgugaacaucaccuucgagcuggacgagcgcaucgacaagguccucaacgagaagugcuccgccuacaccguggagcugggcaccgaggugaacgaguucgcgugcgucguggccgacgccgugaucaagacgcugcagccggucagcgagcuccugaccccccuggggaucgaccucgacgagugguccauggccaccuacuaccuguucgacgagagcggcgaguucaagcuggccucccacauguacugcagcuucuacccccccgacgaggacgaggaggagggggacugcgaggaggaggaguucgagccguccacccaguacgaguacggcacggaggacgacuaccagggcaagccccucgaguucggggcgaccagcgccgcccugcagcccgaggaggagcaggaggaggacuggcuggacgacgacucccagcagaccgugggccagcaggacgggagcgaggacaaccagaccacgaccauccagaccaucguggagguccagccccagcucgagauggagcugaccccgguggugcagacgaucgaggucaacuccuucagcggcuaccugaagcucaccgacaacguguacaucaagaacgccgacaucguggaggaggcgaagaaggucaagcccaccgugguggucaacgccgccaacguguaccugaagcacgggggcggcguggccggggcccugaacaaggcgaccaacaacgccaugcaggucgaguccgacgacuacaucgccacgaacggcccccucaagguggggggcagcugcguccuguccggccacaaccuggccaagcacugccuccacgugguggggcccaacgucaacaagggcgaggacauccagcugcugaagagcgccuacgagaacuucaaccagcacgaggugcuccuggcgccgcugcucuccgccgggaucuucggcgccgaccccauccacagccugcgggugugcgucgacaccgugcgcaccaacguguaccuggccgucuucgacaagaaccucuacgacaagcugguguccagcuuccuggagaugaagagcgagaagcagguggagcagaagaucgccgagauccccaaggaggaggucaagcccuucaucaccgaguccaagccgagcguggagcagcggaagcaggacgacaagaagaucaaggcgugcguggaggaggucacgaccacccucgaggagaccaaguuccugacggagaaccugcuccuguacaucgacaucaacgggaaccugcaccccgacuccgccacccucgugagcgacaucgacaucaccuuccugaagaaggacgcccccuacaucgugggcgacgucgugcaggagggcgugcugaccgccgucgugauccccacgaagaaggccgggggcaccaccgagaugcucgcgaaggcccugcgcaaggugccgaccgacaacuacaucacgaccuaccccgggcagggccugaacggguacaccgucgaggaggccaagaccgugcucaagaagugcaaguccgccuucuacauccugcccagcaucaucuccaacgagaagcaggagauccugggcaccgugagcuggaaccuccgggagaugcuggcgcacgccgaggagacgcgcaagcugaugcccgucugcguggagaccaaggccaucguguccaccauccagcggaaguacaagggcaucaagauccaggagggggucguggacuacggcgcccgcuucuacuucuacaccagcaagacgaccguggccucccugaucaacacccucaacgaccugaacgagacccuggucacgaugccgcucggguacgugacccacggccugaaccuggaggaggcggcccgguacaugcgcagccucaaggugcccgccaccgucuccgugagcucccccgacgccgugaccgccuacaacggguaccugacgagcuccagcaagacccccgaggagcacuucaucgagaccaucucccuggcgggcagcuacaaggacuggagcuacuccggccagagcacccagcucgggaucgaguuccugaagcggggcgacaaguccgucuacuacacgagcaacccgaccaccuuccaccuggacggggaggugaucaccuucgacaaccucaagacgcugcugucccuccgcgaggugcggaccaucaaggucuucaccaccguggacaacaucaaccugcacacgcagguggucgacaugagcaugaccuacggccagcaguucggccccaccuaccuggacggggccgacgugaccaagaucaagccccacaacucccacgagggcaagacguucuacgugcucccgaacgacgacacccugcgcgucgaggccuucgaguacuaccacaccaccgaccccagcuuccuggggcgguacauguccgcccucaaccacacgaagaaguggaaguacccccaggugaacggccugaccagcaucaagugggccgacaacaacugcuaccuggcgaccgcccuccugacccugcagcagaucgagcucaaguucaaccccccggcccugcaggacgccuacuaccgcgcgcgggccggggaggccgccaacuucugcgcccugauccucgcguacugcaacaagacggugggcgagcugggcgacguccgcgagaccauguccuaccuguuccagcacgccaaccucgacagcugcaagcgggugcugaacgucgugugcaagaccugcgggcagcagcagaccacccugaagggcguggaggccgucauguacauggggacgcucuccuacgagcaguucaagaagggcgugcagauccccugcaccugcgggaagcaggccaccaaguaccuggugcagcaggagagccccuucgucaugauguccgcccccccggcgcaguacgagcugaagcacggcaccuucacgugcgccagcgaguacaccggcaacuaccagugcgggcacuacaagcacaucaccuccaaggagacccucuacugcaucgacggcgcccugcugacgaagagcagcgaguacaaggggcccaucaccgacguguucuacaaggagaacuccuacaccaccacgaucaagcccgugaccuacaagcucgacggcgucgugugcaccgagaucgaccccaagcuggacaacuacuacaagaaggacaacagcuacuucaccgagcagccgaucgaccuggugcccaaccagcccuaccccaacgccuccuucgacaacuucaaguucgucugcgacaacaucaaguucgccgacgaccucaaccagcugacgggguacaagaagccggcgagccgcgagcugaaggugaccuucuuccccgaccucaacggcgacguggucgccaucgacuacaagcacuacacccccuccuucaagaagggcgccaagcugcugcacaagcccaucguguggcacgugaacaacgccaccaacaaggcgacguacaagccgaacaccuggugcauccggugccucuggagcaccaagcccgucgagaccuccaacagcuucgacgugcugaaguccgaggacgcccaggggauggacaaccuggccugcgaggaccucaagcccgugagcgaggaggucguggagaaccccacgauccagaaggacgugcuggagugcaacgucaagaccaccgagguggugggcgacaucauccugaagccggccaacaacucccucaagaucaccgaggaggucgggcacacggaccugauggccgcguacguggacaacagcucccugaccaucaagaagcccaacgagcucagccgcgugcugggccugaagacccucgccacccacgggcuggccgccgucaacuccgugcccugggacacgaucgccaacuacgcgaagccguuccugaacaagguggucagcaccaccaccaacaucgugacgcgcugccucaaccgggugugcaccaacuacaugcccuacuucuucacccugcugcuccagcugugcaccuucacccgcuccacgaacagccggaucaaggccuccaugcccaccaccaucgccaagaacaccgucaagagcgugggcaaguucugccuggaggccagcuucaacuaccucaagucccccaacuucagcaagcugaucaacaucaucaucugguuccugcuccuguccgugugccugggcagccucaucuacuccacggccgcgcuggggguccugaugagcaaccucggcaugccguccuacugcaccggguaccgcgagggcuaccugaacagcaccaacgugaccaucgccacguacugcaccggcuucauccccugcuccgugugccugagcgggcucgacucccuggacaccuaccccagccuggagaccauccagaucacgaucuccagcuucaagugggaccucaccgccuucggccuggucgccgagugguuccuggccuacauccucuucacccgguucuucuacgugcuggggcuggcggccaucaugcagcucuucuucuccuacuucgccgugcacuucaucagcaacuccuggcugauguggcugaucaucaaccugguccagauggcccccaucagcgcgauggugcgcauguacaucuucuucgccuccuucuacuacguguggaagagcuacguccacgugguggacggcugcaacagcuccaccugcaugaugugcuacaagcggaaccgcgccacgcgggucgagugcaccaccaucgugaacgggguccgccggagcuucuacguguacgccaacggcggcaagggguucugcaagcuccacaacuggaacugcgugaacugcgacaccuucugcgccggcuccacguucaucagcgacgaggucgcgcgcgaccugucccugcaguucaagcggccgaucaaccccaccgaccagagcuccuacaucguggacagcgugaccgucaagaacggguccauccaccucuacuucgacaaggccggccagaagaccuacgagcgccacagccugucccacuucgugaaccuggacaaccuccgggccaacaacacgaaggggagccugcccaucaacgugaucgucuucgacggcaaguccaagugcgaggagagcuccgccaagagcgccuccguguacuacagccagcugaugugccagcccauccuccugcuggaccaggcgcucguguccgacgucggcgacagcgccgagguggccgugaagauguucgacgccuacgucaacaccuucagcuccaccuucaacgugccgauggagaagcugaagacccugguggccacggcggaggccgagcucgccaagaacgucagccuggacaacgugcuguccaccuucaucagcgccgcgcgccagggguucguggacuccgacgucgagaccaaggacgugguggagugccucaagcugagccaccaguccgacaucgaggucaccggcgacagcugcaacaacuacaugcugacguacaacaagguggagaacaugaccccccgggaccucggggccugcaucgacugcuccgcccgccacaucaacgcccagguggccaagagccacaacaucgcgcugaucuggaacgucaaggacuucaugucccugagcgagcagcuccggaagcagauccgcuccgccgccaagaagaacaaccugcccuucaagcugaccugcgccaccacgcgccagguggugaacgucgugaccaccaagaucgcccucaagggcgggugaggacuaguuauaagacugacuagcccgaugggccucccaacgggcccuccuccccuccuugcaccgagauuaauaaaaaaaaaaaaaaaaaaaaaaaaaaaaaaaaaaaaaaaaaaaaaaaaaaaaaaaaaaaaaaaaugcaucccccccccccccccccccccccccccccccaaaggcucuuuucagagccaccagaauu

SEQ ID NO: 21610 - RNA, 6058 nt, Artificial Sequence
  SARS-CoV-2__MT811244.1__non-structural protein 3 (NSP3) mRNA gc
aggagaaagcuuaccauggcccccaccaaggugaccuucggcgacgacacggucaucgaggugcagggguacaagagcgugaacaucaccuucgagcuggacgagcgcaucgacaagguccucaacgagaagugcuccgccuacaccguggagcugggcaccgaggugaacgaguucgcgugcgucguggccgacgccgugaucaagacgcugcagccggucagcgagcuccugaccccccuggggaucgaccucgacgagugguccauggccaccuacuaccuguucgacgagagcggcgaguucaagcuggccucccacauguacugcagcuucuacccccccgacgaggacgaggaggagggggacugcgaggaggaggaguucgagccguccacccaguacgaguacggcacggaggacgacuaccagggcaagccccucgaguucggggcgaccagcgccgcccugcagcccgaggaggagcaggaggaggacuggcuggacgacgacucccagcagaccgugggccagcaggacgggagcgaggacaaccagaccacgaccauccagaccaucguggagguccagccccagcucgagauggagcugaccccgguggugcagacgaucgaggucaacuccuucagcggcuaccugaagcucaccgacaacguguacaucaagaacgccgacaucguggaggaggcgaagaaggucaagcccaccgugguggucaacgccgccaacguguaccugaagcacgggggcggcguggccggggcccugaacaaggcgaccaacaacgccaugcaggucgaguccgacgacuacaucgccacgaacggcagccucaagguggggggcuccugcguccugagcggccacaaccuggccaagcacugccuccacgugguggggcccaacgucaacaagggcgaggacauccagcugcugaaguccgccuacgagaacuucaaccagcacgaggugcuccuggcgccccugcucagcgccgggaucuucggcgccgacccgauccacucccugcgggugugcgucgacaccgugcgcaccaacguguaccuggccgucuucgacaagaaccucuacgacaagcuggugagcagcuuccuggagaugaaguccgagaagcagguggagcagaagaucgccgagauccccaaggaggaggucaagcccuucaucaccgagagcaagcccuccguggagcagcggaagcaggacgacaagaagaucaaggcgugcguggaggaggucacgaccacccucgaggagaccaaguuccugacggagaaccugcuccuguacaucgacaucaacgggaaccugcacccggacagcgccacccucguguccgacaucgacaucaccuuccugaagaaggacgcccccuacaucgugggcgacgucgugcaggagggcgugcugaccgccgucgugauccccacgaagaaggccgggggcaccaccgagaugcucgcgaaggcccugcgcaaggugcccaccgacaacuacaucacgaccuacccggggcagggccugaacggguacaccgucgaggaggccaagaccgugcucaagaagugcaagagcgccuucuacauccugcccuccaucaucagcaacgagaagcaggagauccugggcaccguguccuggaaccuccgggagaugcuggcgcacgccgaggagacgcgcaagcugaugcccgucugcguggagaccaaggccaucgugagcaccauccagcggaaguacaagggcaucaagauccaggagggggucguggacuacggcgcccgcuucuacuucuacaccuccaagacgaccguggccagccugaucaacacccucaacgaccugaacgagacccuggucacgaugccccucggguacgugacccacggccugaaccuggaggaggcggcccgguacaugcgcucccucaaggugccggccaccgucagcguguccagccccgacgccgugaccgccuacaacggguaccugacguccagcuccaagacccccgaggagcacuucaucgagaccaucagccuggcgggcagcuacaaggacugguccuacagcggccaguccacccagcucgggaucgaguuccugaagcggggcgacaagagcgucuacuacacguccaaccccaccaccuuccaccuggacggggaggugaucaccuucgacaaccucaagacgcugcugagccuccgcgaggugcggaccaucaaggucuucaccaccguggacaacaucaaccugcacacgcagguggucgacauguccaugaccuacggccagcaguucggcccgaccuaccuggacggggccgacgugaccaagaucaagccccacaacagccacgagggcaagacguucuacgugcuccccaacgacgacacccugcgcgucgaggccuucgaguacuaccacaccaccgacccguccuuccuggggcgguacaugagcgcccucaaccacacgaagaaguggaaguacccccaggugaacggccugaccuccaucaagugggccgacaacaacugcuaccuggcgaccgcccuccugacccugcagcagaucgagcucaaguucaacccccccgcccugcaggacgccuacuaccgcgcgcgggccggggaggccgccaacuucugcgcccugauccucgcguacugcaacaagacggugggcgagcugggcgacguccgcgagaccaugagcuaccuguuccagcacgccaaccucgacuccugcaagcgggugcugaacgucgugugcaagaccugcgggcagcagcagaccacccugaagggcguggaggccgucauguacauggggacgcucagcuacgagcaguucaagaagggcgugcagaucccgugcaccugcgggaagcaggccaccaaguaccuggugcagcaggagucccccuucgucaugaugagcgccccccccgcgcaguacgagcugaagcacggcaccuucacgugcgccuccgaguacaccggcaacuaccagugcgggcacuacaagcacaucaccagcaaggagacccucuacugcaucgacggcgcccugcugacgaagagcuccgaguacaaggggccgaucaccgacguguucuacaaggagaacagcuacaccaccacgaucaagcccgugaccuacaagcucgacggcgucgugugcaccgagaucgaccccaagcuggacaacuacuacaagaaggacaacuccuacuucaccgagcagcccaucgaccuggugccgaaccagcccuaccccaacgccagcuucgacaacuucaaguucgucugcgacaacaucaaguucgccgacgaccucaaccagcugacgggguacaagaagcccgcgucccgcgagcugaaggugaccuucuucccggaccucaacggcgacguggucgccaucgacuacaagcacuacacccccagcuucaagaagggcgccaagcugcugcacaagcccaucguguggcacgugaacaacgccaccaacaaggcgacguacaagcccaacaccuggugcauccggugccucugguccaccaagccggucgagaccagcaacuccuucgacgugcugaagagcgaggacgcccaggggauggacaaccuggccugcgaggaccucaagcccguguccgaggaggucguggagaaccccacgauccagaaggacgugcuggagugcaacgucaagaccaccgagguggugggcgacaucauccugaagcccgccaacaacagccucaagaucaccgaggaggucgggcacacggaccugauggccgcguacguggacaacuccagccugaccaucaagaagccgaacgagcucucccgcgugcugggccugaagacccucgccacccacgggcuggccgccgucaacagcgugcccugggacacgaucgccaacuacgcgaagcccuuccugaacaagguggucuccaccaccaccaacaucgugacgcgcugccucaaccgggugugcaccaacuacaugccguacuucuucacccugcugcuccagcugugcaccuucacccgcagcacgaacucccggaucaaggccagcaugcccaccaccaucgccaagaacaccgucaagagcgugggcaaguucugccuggaggccuccuucaacuaccucaagagccccaacuucuccaagcugaucaacaucaucaucugguuccugcuccugagcgugugccugggcucccucaucuacagcacggccgcgcuggggguccugauguccaaccucggcaugcccagcuacugcaccggguaccgcgagggcuaccugaacuccaccaacgugaccaucgccacguacugcaccggcagcaucccgugcuccgugugccugagcgggcucgacucccuggacaccuaccccagccuggagaccauccagaucacgaucuccagcuucaagugggaccucaccgccuucggccuggucgccgagugguuccuggccuacauccucuucacccgguucuucuacgugcuggggcuggcggccaucaugcagcucuucuucuccuacuucgccgugcacuucaucagcaacuccuggcugauguggcugaucaucaaccugguccagauggcccccaucagcgcgauggugcgcauguacaucuucuucgccagcuucuacuacguguggaaguccuacguccacgugguggacggcugcaacagcuccaccugcaugaugugcuacaagcggaaccgcgccacgcgggucgagugcaccaccaucgugaacgggguccgccggagcuucuacguguacgccaacggcggcaagggguucugcaagcuccacaacuggaacugcgugaacugcgacaccuucugcgccggcuccacguucaucagcgacgaggucgcgcgcgaccugucccugcaguucaagcggcccaucaacccgaccgaccagagcuccuacaucguggacagcgugaccgucaagaacggguccauccaccucuacuucgacaaggccggccagaagaccuacgagcgccacagccugucccacuucgugaaccuggacaaccuccgggccaacaacacgaaggggagccugcccaucaacgugaucgucuucgacggcaaguccaagugcgaggagagcuccgccaagagcgccuccguguacuacagccagcugaugugccagcccauccuccugcuggaccaggcgcucgugagcgacgucggcgacuccgccgagguggccgugaagauguucgacgccuacgucaacaccuucagcuccaccuucaacgugcccauggagaagcugaagacccugguggccacggcggaggccgagcucgccaagaacgucagccuggacaacgugcuguccaccuucaucagcgccgcgcgccagggguucguggacuccgacgucgagaccaaggacgugguggagugccucaagcugagccaccaguccgacaucgaggucaccggcgacagcugcaacaacuacaugcugacguacaacaagguggagaacaugaccccgcgggaccucggggccugcaucgacugcuccgcccgccacaucaacgcccagguggccaagagccacaacaucgcgcugaucuggaacgucaaggacuucaugucccugagcgagcagcuccggaagcagauccgcuccgccgccaagaagaacaaccugcccuucaagcugaccugcgccaccacgcgccagguggugaacgucgugaccaccaagaucgcccucaagggcgggugaggacuaguuauaagacugacuagcccgaugggccucccaacgggcccuccuccccuccuugcaccgagauuaauaaaaaaaaaaaaaaaaaaaaaaaaaaaaaaaaaaaaaaaaaaaaaaaaaaaaaaaaaaaaaaaaugcaucccccccccccccccccccccccccccccccaaaggcucuuuucagagccaccagaauu

SEQ ID NO: 21611 - RNA, 6058 nt, Artificial Sequence
  SARS-CoV-2__MT811247.1__non-structural protein 3 (NSP3) mRNA gc
aggagaaagcuuaccauggcccccaccaaggugaccuucggcgacgacacggucaucgaggugcagggguacaagagcgugaacaucaccuucgagcuggacgagcgcaucgacaagguccucaacgagaagugcuccgccuacaccguggagcugggcaccgaggugaacgaguucgcgugcgucguggccgacgccgugaucaagacgcugcagccggucagcgagcuccugaccccccuggggaucgaccucgacgagugguccauggccaccuacuaccuguucgacgagagcggcgaguucaagcuggccucccacauguacugcagcuucuacccccccgacgaggacgaggaggagggggacugcgaggaggaggaguucgagccguccacccaguacgaguacggcacggaggacgacuaccagggcaagccccucgaguucggggcgaccagcgccgcccugcagcccgaggaggagcaggaggaggacuggcuggacgacgacucccagcagaccgugggccagcaggacgggagcgaggacaaccagaccacgaccauccagaccaucguggagguccagccccagcucgagauggagcugaccccgguggugcagacgaucgaggucaacuccuucagcggcuaccugaagcucaccgacaacguguacaucaagaacgccgacaucguggaggaggcgaagaaggucaagcccaccgugguggucaacgccgccaacguguaccugaagcacgggggcggcguggccggggcccugaacaaggcgaccaacaacgccaugcaggucgaguccgacgacuacaucgccacgaacggcccccucaagguggggggcagcugcguccuguccggccacaaccuggccaagcacugccuccacgugguggggcccaacgucaacaagggcgaggacauccagcugcugaagagcgccuacgagaacuucaaccagcacgaggugcuccuggcgccgcugcucuccgccgggaucuucggcgccgaccccauccacagccugcgggugugcgucgacaccgugcgcaccaacguguaccuggccgucuucgacaagaaccucuacgacaagcugguguccagcuuccuggagaugaagagcgagaagcagguggagcagaagaucgccgagauccccaaggaggaggucaagcccuucaucaccgaguccaagccgagcguggagcagcggaagcaggacgacaagaagaucaaggcgugcguggaggaggucacgaccacccucgaggagaccaaguuccugacggagaaccugcuccuguacaucgacaucaacgggaaccugcaccccgacuccgccacccucgugagcgacaucgacaucaccuuccugaagaaggacgcccccuacaucgugggcgacgucgugcaggagggcgugcugaccgccgucgugauccccacgaagaaggccgggggcaccaccgagaugcucgcgaaggcccugcgcaaggugccgaccgacaacuacaucacgaccuaccccgggcagggccugaacggguacaccgucgaggaggccaagaccgugcucaagaagugcaaguccgccuucuacauccugcccagcaucaucuccaacgagaagcaggagauccugggcaccgugagcuggaaccuccgggagaugcuggcgcacgccgaggagacgcgcaagcugaugcccgucugcguggagaccaaggccaucguguccaccauccagcggaaguacaagggcaucaagauccaggagggggucguggacuacggcgcccgcuucuacuucuacaccagcaagacgaccguggccucccugaucaacacccucaacgaccugaacgagacccuggucacgaugccgcucggguacgugacccacggccugaaccuggaggaggcggcccgguacaugcgcagccucaaggugcccgccaccgucuccgugagcucccccgacgccgugaccgccuacaacggguaccugacgagcuccagcaagacccccgaggagcacuucaucgagaccaucucccuggcgggcagcuacaaggacuggagcuacuccggccagagcacccagcucgggaucgaguuccugaagcggggcgacaaguccgucuacuacacgagcaacccgaccaccuuccaccuggacggggaggugaucaccuucgacaaccucaagacgcugcugucccuccgcgaggugcggaccaucaaggucuucaccaccguggacaacaucaaccugcacacgcagguggucgacaugagcaugaccuacggccagcaguucggccccaccuaccuggacggggccgacgugaccaagaucaagccccacaacucccacgagggcaagacguucuacgugcucccgaacgacgacacccugcgcgucgaggccuucgaguacuaccacaccaccgaccccagcuuccuggggcgguacauguccgcccucaaccacacgaagaaguggaaguacccccaggugaacggccugaccagcaucaagugggccgacaacaacugcuaccuggcgaccgcccuccugacccugcagcagaucgagcucaaguucaaccccccggcccugcaggacgccuacuaccgcgcgcgggccggggaggccgccaacuucugcgcccugauccucgcguacugcaacaagacggugggcgagcugggcgacguccgcgagaccauguccuaccuguuccagcacgccaaccucgacagcugcaagcgggugcugaacgucgugugcaagaccugcgggcagcagcagaccacccugaagggcguggaggccgucauguacauggggacgcucuccuacgagcaguucaagaagggcgugcagauccccugcaccugcgggaagcaggccaccaaguaccuggugcagcaggagagccccuucgucaugauguccgcccccccggcgcaguacgagcugaagcacggcaccuucacgugcgccagcgaguacaccggcaacuaccagugcgggcacuacaagcacaucaccuccaaggagacccucuacugcaucgacggcgcccugcugacgaagagcagcgaguacaaggggcccaucaccgacguguucuacaaggagaacuccuacaccaccacgaucaagcccgugaccuacaagcucgacggcgucgugugcaccgagaucgaccccaagcuggacaacuacuacaagaaggacaacagcuacuucaccgagcagccgaucgaccuggugcccaaccagcccuaccccaacgccuccuucgacaacuucaaguucgucugcgacaacaucaaguucgccgacgaccucaaccagcugacgggguacaagaagccggcgagccgcgagcugaaggugaccuucuuccccgaccucaacggcgacguggucgccaucgacuacaagcacuacacccccuccuucaagaagggcgccaagcugcugcacaagcccaucguguggcacgugaacaacgccaccaacaaggcgacguacaagccgaacaccuggugcauccggugccucuggagcaccaagcccgucgagaccuccaacagcuucgacgugcugaaguccgaggacgcccacgggauggacaaccuggccugcgaggaccucaagcccgugagcgaggaggucguggagaaccccacgauccagaaggacgugcuggagugcaacgucaagaccaccgagguggugggcgacaucauccugaagccggccaacaacucccucaagaucaccgaggaggucgggcacacggaccugauggccgcguacguggacaacagcucccugaccaucaagaagcccaacgagcucagccgcgugcugggccugaagacccucgccacccacgggcuggccgccgucaacuccgugcccugggacacgaucgccaacuacgcgaagccguuccugaacaagguggucagcaccaccaccaacaucgugacgcgcugccucaaccgggugugcaccaacuacaugcccuacuucuucacccugcugcuccagcugugcaccuucacccgcuccacgaacagccggaucaaggccuccaugcccaccaccaucgccaagaacaccgucaagagcgugggcaaguucugccuggaggccagcuucaacuaccucaagucccccaacuucagcaagcugaucaacaucaucaucugguuccugcuccuguccgugugccugggcagccucaucuacuccacggccgcgcuggggguccugaugagcaaccucggcaugccguccuacugcaccggguaccgcgagggcuaccugaacagcaccaacgugaccaucgccacguacugcaccggcuccauccccugcagcgugugccuguccgggcucgacagccuggacaccuaccccucccuggagaccauccagaucacgaucagcuccuucaagugggaccucaccgccuucggccuggucgccgagugguuccuggccuacauccucuucacccgguucuucuacgugcuggggcuggcggccaucaugcagcucuucuucagcuacuucgccgugcacuucaucuccaacagcuggcugauguggcugaucaucaaccugguccagauggcccccaucuccgcgauggugcgcauguacaucuucuucgccagcuucuacuacguguggaagagcuacguccacgugguggacggcugcaacuccagcaccugcaugaugugcuacaagcggaaccgcgccacgcgggucgagugcaccaccaucgugaacgggguccgccgguccuucuacguguacgccaacggcggcaagggguucugcaagcuccacaacuggaacugcgugaacugcgacaccuucugcgccggcagcacguucaucuccgacgaggucgcgcgcgaccugagccugcaguucaagcggccgaucaaccccaccgaccaguccagcuacaucguggacuccgugaccgucaagaacgggagcauccaccucuacuucgacaaggccggccagaagaccuacgagcgccacucccugagccacuucgugaaccuggacaaccuccgggccaacaacacgaaggggucccugcccaucaacgugaucgucuucgacggcaagagcaagugcgaggaguccagcgccaaguccgccagcguguacuacucccagcugaugugccagcccauccuccugcuggaccaggcgcucgugagcgacgucggcgacagcgccgagguggccgugaagauguucgacgccuacgucaacaccuucuccagcaccuucaacgugccgauggagaagcugaagacccugguggccacggcggaggccgagcucgccaagaacgucucccuggacaacgugcugagcaccuucaucuccgccgcgcgccagggguucguggacagcgacgucgagaccaaggacgugguggagugccucaagcugucccaccagagcgacaucgaggucaccggcgacuccugcaacaacuacaugcugacguacaacaagguggagaacaugaccccccgggaccucggggccugcaucgacugcagcgcccgccacaucaacgcccagguggccaagucccacaacaucgcgcugaucuggaacgucaaggacuucaugagccuguccgagcagcuccggaagcagauccgcagcgccgccaagaagaacaaccugcccuucaagcugaccugcgccaccacgcgccagguggugaacgucgugaccaccaagaucgcccucaagggcgggugaggacuaguuauaagacugacuagcccgaugggccucccaacgggcccuccuccccuccuugcaccgagauuaauaaaaaaaaaaaaaaaaaaaaaaaaaaaaaaaaaaaaaaaaaaaaaaaaaaaaaaaaaaaaaaaaugcaucccccccccccccccccccccccccccccccaaaggcucuuuucagagccaccagaauu

SEQ ID NO: 21612 - RNA, 6058 nt, Artificial Sequence
  SARS-CoV-2__MT811254.1__non-structural protein 3 (NSP3) mRNA gc
aggagaaagcuuaccauggcccccaccaaggugaccuucggcgacgacacggucaucgaggugcagggguacaagagcgugaacaucaccuucgagcuggacgagcgcaucgacaagguccucaacgagaagugcuccgccuacaccguggagcugggcaccgaggugaacgaguucgcgugcgucguggccgacgccgugaucaagacgcugcagccggucagcgagcuccugaccccccuggggaucgaccucgacgagugguccauggccaccuacuaccuguucgacgagagcggcgaguucaagcuggccucccacauguacugcagcuucuacccccccgacgaggacgaggaggagggggacugcgaggaggaggaguucgagccguccacccaguacgaguacggcacggaggacgacuaccagggcaagccccucgaguucggggcgaccagcgccgcccugcagcccgaggaggagcaggaggaggacuggcuggacgacgacucccagcagaccgugggccagcaggacgggagcgaggacaaccagaccacgaccauccagaccaucguggagguccagccccagcucgagauggagcugaccccgguggugcagacgaucgaggucaacuccuucagcggcuaccugaagcucaccgacaacguguacaucaagaacgccgacaucguggaggaggcgaagaaggucaagcccaccgugguggucaacgccgccaacguguaccugaagcacgggggcggcguggccggggcccugaacaaggcgaccaacaacgccaugcaggucgaguccgacgacuacaucgccacgaacggcccccucaagguggggggcagcugcguccuguccggccacaaccuggccaagcacugccuccacgugguggggcccaacgucaacaagggcgaggacauccagcugcugaagagcgccuacgagaacuucaaccagcacgaggugcuccuggcgccgcugcucuccgccgggaucuucggcgccgaccccauccacagccugcgggugugcgucgacaccgugcgcaccaacguguaccuggccgucuucgacaagaaccucuacgacaagcugguguccagcuuccuggagaugaagagcgagaagcagguggagcagaagaucgccgagauccccaaggaggaggucaagcccuucaucaccgaguccaagccgagcguggagcagcggaagcaggacgacaagaagaucaaggcgugcguggaggaggucacgaccacccucgaggagaccaaguuccugacggagaaccugcuccuguacaucgacaucaacgggaaccugcaccccgacuccgccacccucgugagcgacaucgacaucaccuuccugaagaaggacgcccccuacaucgugggcgacgucgugcaggagggcgugcugaccgccgucgugauccccacgaagaaggccgggggcaccaccgagaugcucgcgaaggcccugcgcaaggugccgaccgacaacuacaucacgaccuaccccgggcagggccugaacggguacaccgucgaggaggccaagaccgugcucaagaagugcaaguccgccuucuacauccugcccagcaucaucuccaacgagaagcaggagauccugggcaccgugagcuggaaccuccgggagaugcuggcgcacgccgaggagacgcgcaagcugaugcccgucugcguggagaccaaggccaucguguccaccauccagcggaaguacaagggcaucaagauccaggagggggucguggacuacggcgcccgcuucuacuucuacaccagcaagacgaccguggccucccugaucaacacccucaacgaccugaacgagacccuggucacgaugccgcucggguacgugacccacggccugaaccuggaggaggcggcccgguacaugcgcagccucaaggugcccgccaccgucuccgugagcucccccgacgccgugaccgccuacaacggguaccugacgagcuccagcaagaccuccgaggagcacuucaucgagaccaucagccuggcgggcagcuacaaggacugguccuacagcggccaguccacccagcucgggaucgaguuccugaagcggggcgacaagagcgucuacuacacguccaaccccaccaccuuccaccuggacggggaggugaucaccuucgacaaccucaagacgcugcugagccuccgcgaggugcggaccaucaaggucuucaccaccguggacaacaucaaccugcacacgcagguggucgacauguccaugaccuacggccagcaguucggcccgaccuaccuggacggggccgacgugaccaagaucaagccccacaacagccacgagggcaagacguucuacgugcuccccaacgacgacacccugcgcgucgaggccuucgaguacuaccacaccaccgacccguccuuccuggggcgguacaugagcgcccucaaccacacgaagaaguggaaguacccccaggugaacggccugaccuccaucaagugggccgacaacaacugcuaccuggcgaccgcccuccugacccugcagcagaucgagcucaaguucaacccccccgcccugcaggacgccuacuaccgcgcgcgggccggggaggccgccaacuucugcgcccugauccucgcguacugcaacaagacggugggcgagcugggcgacguccgcgagaccaugagcuaccuguuccagcacgccaaccucgacuccugcaagcgggugcugaacgucgugugcaagaccugcgggcagcagcagaccacccugaagggcguggaggccgucauguacauggggacgcucagcuacgagcaguucaagaagggcgugcagaucccgugcaccugcgggaagcaggccaccaaguaccuggugcagcaggagucccccuucgucaugaugagcgccccccccgcgcaguacgagcugaagcacggcaccuucacgugcgccuccgaguacaccggcaacuaccagugcgggcacuacaagcacaucaccagcaaggagacccucuacugcaucgacggcgcccugcugacgaagagcuccgaguacaaggggccgaucaccgacguguucuacaaggagaacagcuacaccaccacgaucaagcccgugaccuacaagcucgacggcgucgugugcaccgagaucgaccccaagcuggacaacuacuacaagaaggacaacuccuacuucaccgagcagcccaucgaccuggugccgaaccagcccuaccccaacgccagcuucgacaacuucaaguucgucugcgacaacaucaaguucgccgacgaccucaaccagcugacgggguacaagaagcccgcgucccgcgagcugaaggugaccuucuucccggaccucaacggcgacguggucgccaucgacuacaagcacuacacccccagcuucaagaagggcgccaagcugcugcacaagcccaucguguggcacgugaacaacgccaccaacaaggcgacguacaagcccaacaccuggugcauccggugccucugguccaccaagccggucgagaccagcaacuccuucgacgugcugaagagcgaggacgcccaggggauggacaaccuggccugcgaggaccucaagcccguguccgaggaggucguggagaaccccacgauccagaaggacgugcuggagugcaacgucaagaccaccgagguggugggcgacaucauccugaagcccgccaacaacagccucaagaucaccgaggaggucgggcacacggaccugauggccgcguacguggacaacuccagccugaccaucaagaagccgaacgagcucucccgcgugcugggccugaagacccucgccacccacgggcuggccgccgucaacagcgugcccugggacacgaucgccaacuacgcgaagcccuuccugaacaagguggucuccaccaccaccaacaucgugacgcgcugccucaaccgggugugcaccaacuacaugccguacuucuucacccugcugcuccagcugugcaccuucacccgcagcacgaacucccggaucaaggccagcaugcccaccaccaucgccaagaacaccgucaagagcgugggcaaguucugccuggaggccuccuucaacuaccucaagagccccaacuucuccaagcugaucaacaucaucaucugguuccugcuccugagcgugugccugggcucccucaucuacagcacggccgcgcuggggguccugauguccaaccucggcaugcccagcuacugcaccggguaccgcgagggcuaccugaacuccaccaacgugaccaucgccacguacugcaccggcagcaucccgugcuccgugugccugagcgggcucgacucccuggacaccuaccccagccuggagaccauccagaucacgaucuccagcuucaagugggaccucaccgccuucggccuggucgccgagugguuccuggccuacauccucuucacccgguucuucuacgugcuggggcuggcggccaucaugcagcucuucuucuccuacuucgccgugcacuucaucagcaacuccuggcugauguggcugaucaucaaccugguccagauggcccccaucagcgcgauggugcgcauguacaucuucuucgccagcuucuacuacguguggaaguccuacguccacgugguggacggcugcaacagcuccaccugcaugaugugcuacaagcggaaccgcgccacgcgggucgagugcaccaccaucgugaacgggguccgccggagcuucuacguguacgccaacggcggcaagggguucugcaagcuccacaacuggaacugcgugaacugcgacaccuucugcgccggcuccacguucaucagcgacgaggucgcgcgcgaccugucccugcaguucaagcggcccaucaacccgaccgaccagagcuccuacaucguggacagcgugaccgucaagaacggguccauccaccucuacuucgacaaggccggccagaagaccuacgagcgccacagccugucccacuucgugaaccuggacaaccuccgggccaacaacacgaaggggagccugcccaucaacgugaucgucuucgacggcaaguccaagugcgaggagagcuccgccaagagcgccuccguguacuacagccagcugaugugccagcccauccuccugcuggaccaggcgcucgugagcgacgucggcgacuccgccgagguggccgugaagauguucgacgccuacgucaacaccuucagcuccaccuucaacgugcccauggagaagcugaagacccugguggccacggcggaggccgagcucgccaagaacgucagccuggacaacgugcuguccaccuucaucagcgccgcgcgccagggguucguggacuccgacgucgagaccaaggacgugguggagugccucaagcugagccaccaguccgacaucgaggucaccggcgacagcugcaacaacuacaugcugacguacaacaagguggagaacaugaccccgcgggaccucggggccugcaucgacugcuccgcccgccacaucaacgcccagguggccaagagccacaacaucgcgcugaucuggaacgucaaggacuucaugucccugagcgagcagcuccggaagcagauccgcuccgccgccaagaagaacaaccugcccuucaagcugaccugcgccaccacgcgccagguggugaacgucgugaccaccaagaucgcccucaagggcgggugaggacuaguuauaagacugacuagcccgaugggccucccaacgggcccuccuccccuccuugcaccgagauuaauaaaaaaaaaaaaaaaaaaaaaaaaaaaaaaaaaaaaaaaaaaaaaaaaaaaaaaaaaaaaaaaaugcaucccccccccccccccccccccccccccccccaaaggcucuuuucagagccaccagaauu

SEQ ID NO: 21613 - RNA, 6058 nt, Artificial Sequence
  SARS-CoV-2__MT811262.1__non-structural protein 3 (NSP3) mRNA gc
aggagaaagcuuaccauggcccccaccaaggugaccuucggcgacgacacggucaucgaggugcagggguacaagagcgugaacaucaccuucgagcuggacgagcgcaucgacaagguccucaacgagaagugcuccgccuacaccguggagcugggcaccgaggugaacgaguucgcgugcgucguggccgacgccgugaucaagacgcugcagccggucagcgagcuccugaccccccuggggaucgaccucgacgagugguccauggccaccuacuaccuguucgacgagagcggcgaguucaagcuggccucccacauguacugcagcuucuacccccccgacgaggacgaggaggagggggacugcgaggaggaggaguucgagccguccacccaguacgaguacggcacggaggacgacuaccagggcaagccccucgaguucggggcgaccagcgccgcccugcagcccgaggaggagcaggaggaggacuggcuggacgacgacucccagcagaccgugggccagcaggacgggagcgaggacaaccagaccacgaccauccagaccaucguggagguccagccccagcucgagauggagcugaccccgguggugcagacgaucgaggucaacuccuucagcggcuaccugaagcucaccgacaacguguacaucaagaacgccgacaucguggaggaggcgaagaaggucaagcccaccgugguggucaacgccgccaacguguaccugaagcacgggggcggcguggccggggcccugaacaaggcgaccaacaacgccaugcaggucgaguccgacgacuacaucgccacgaacggcccccucaagguggggggcagcugcguccuguccggccacaaccuggccaagcacugccuccacgugguggggcccaacgucaacaagggcgaggacauccagcugcugaagagcgccuacgagaacuucaaccagcacgaggugcuccuggcgccgcugcucuccgccgggaucuucggcgccgaccccauccacagccugcgggugugcgucgacaccgugcgcaccaacguguaccuggccgucuucgacaagaaccucuacgacaagcugguguccagcuuccuggagaugaagagcgagaagcagguggagcagaagaucgccgagauccccaaggaggaggucaagcccuucaucaccgaguccaagccgagcguggagcagcggaagcaggacgacaagaagaucaaggcgugcguggaggaggucacgaccacccucgaggagaccaaguuccugacggagaaccugcuccuguacaucgacaucaacgggaaccugcaccccgacuccgccacccucgugagcgacaucgacaucaccuuccugaagaaggacgcccccuacaucgugggcgacgucgugcaggagggcgugcugaccgccgucgugauccccacgaagaaggccgggggcaccaccgagaugcucgcgaaggcccugcgcaaggugccgaccgacaacuacaucacgaccuaccccgggcagggccugaacggguacaccgucgaggaggccaagaccgugcucaagaagugcaaguccgccuucuacauccugcccagcaucaucuccaacgagaagcaggagauccugggcaccgugagcuggaaccuccgggagaugcuggcgcacgccgaggagacgcgcaagcugaugcccgucugcguggagaccaaggccaucguguccaccauccagcggaaguacaagggcaucaagauccaggagggggucguggacuacggcgcccgcuucuacuucuacaccagcaagacgaccguggccucccugaucaacacccucaacgaccugaacgagacccuggucacgaugccgcucggguacgugacccacggccugaaccuggaggaggcggcccgguacaugcgcagccucaaggugcccgccaccgucuccgugagcucccccgacgccgugaccgccuacaacggguaccugacgagcuccagcaagacccccgaggagcacuucaucgagaccaucucccuggcgggcagcuacaaggacuggagcuacuccggccagagcacccagcucgggaucgaguuccugaagcggggcgacaaguccgucuacuacacgagcaacccgaccaccuuccaccuggacggggaggugaucaccuucgacaaccucaagacgcugcugucccuccgcgaggugcggaccaucaaggucuucaccaccguggacaacaucaaccugcacacgcagguggucgacaugagcaugaccuacggccagcaguucggccccaccuaccuggacggggccgacgugaccaagaucaagccccacaacucccacgagggcaagacguucuacgugcucccgaacgacgacacccugcgcgucgaggccuucgaguacuaccacaccaccgaccccagcuuccuggggcgguacauguccgcccucaaccacacgaagaaguggaaguacccccaggugaacggccugaccagcaucaagugggccgacaacaacugcuaccuggcgaccgcccuccugacccugcagcagaucgagcucaaguucaaccccccggcccugcaggacgccuacuaccgcgcgcgggccggggaggccgccaacuucugcgcccugauccucgcguacugcaacaagacggugggcgagcugggcgacguccgcgagaccauguccuaccuguuccagcacgccaaccucgacagcugcaagcgggugcugaacgucgugugcaagaccugcgggcagcagcagaccacccugaagggcguggaggccgucauguacauggggacgcucuccuacgagcaguucaagaagggcgugcagauccccugcaccugcgggaagcaggccaccaaguaccuggugcagcaggagagccccuucgucaugauguccgcccccccggcgcaguacgagcugaagcacggcaccuucacgugcgccagcgaguacaccggcaacuaccagugcgggcacuacaagcacaucaccuccaaggagacccucuacugcaucgacggcgcccugcugacgaagagcagcgaguacaaggggcccaucaccgacguguucuacaaggagaacuccuacaccaccacgaucaagcccgugaccuacaagcucgacggcgucgugugcaccgagaucgaccccaagcuggacaacuacuacaagaaggacaacagcuacuucaccgagcagccgaucgaccuggugcccaaccagcccuaccccaacgccuccuucgacaacuucaaguucgucugcgacaacaucaaguucgccgacgaccucaaccagcugacgggguacaagaagccggcgagccgcgagcugaaggugaccuucuuccccgaccucaacggcgacguggucgccaucgacuacaagcacuacacccccuccuucaagaagggcgccaagcugcugcacaagcccaucguguggcacgugaacaacgccaccaacaaggcgacguacaagccgaacaccuggugcauccggugccucuggagcaccaagcccgucgagaccuccaacagcuucgacgugcugaaguccgaggacgcccaggggauggacaaccuggccugcgaggaccucaagcccgugagcgaggaggucguggagaaccccacgauccagaaggacgugcuggagugcaacgucaagaccaccgagguggugggcgacaucauccugaagccggccaacaacucccucaagaucaccgaggaggucgggcacacggaccugauggccgcguacguggacaacagcucccugaccaucaagaagcccaacgagcucagccgcgugcugggccugaagacccucgccacccacgggcuggccgccgucaacuccgugcccugggacacgaucgccaacuacgcgaagccguuccugaacaagguggucagcaccaccaccaacaucgugacgcgcugccucaaccgggugugcaccaacuacaugcccuacuucuucacccugcugcuccagcugugcaccuucacccgcuccacgaacagccggaucaaggccuccaugcccaccaccaucgccaagaacaccgucaagagcgugggcaaguucugccuggaggccagcuucaacuaccucaagucccccaacuucagcaagcugaucaacaucaucaucugguuccugcuccuguccgugugccugggcagccucaucuacuccacggccgcgcuggggguccugaugagcaaccucggcauguccagcuacugcaccggguaccgcgagggcuaccugaacuccaccaacgugaccaucgccacguacugcaccggcagcaucccgugcuccgugugccugagcgggcucgacucccuggacaccuaccccagccuggagaccauccagaucacgaucuccagcuucaagugggaccucaccgccuucggccuggucgccgagugguuccuggccuacauccucuucacccgguucuucuacgugcuggggcuggcggccaucaugcagcucuucuucuccuacuucgccgugcacuucaucagcaacuccuggcugauguggcugaucaucaaccugguccagauggcccccaucagcgcgauggugcgcauguacaucuucuucgccagcuucuacuacguguggaaguccuacguccacgugguggacggcugcaacagcuccaccugcaugaugugcuacaagcggaaccgcgccacgcgggucgagugcaccaccaucgugaacgggguccgccggagcuucuacguguacgccaacggcggcaagggguucugcaagcuccacaacuggaacugcgugaacugcgacaccuucugcgccggcuccacguucaucagcgacgaggucgcgcgcgaccugucccugcaguucaagcggcccaucaacccgaccgaccagagcuccuacaucguggacagcgugaccgucaagaacggguccauccaccucuacuucgacaaggccggccagaagaccuacgagcgccacagccugucccacuucgugaaccuggacaaccuccgggccaacaacacgaaggggagccugcccaucaacgugaucgucuucgacggcaaguccaagugcgaggagagcuccgccaagagcgccuccguguacuacagccagcugaugugccagcccauccuccugcuggaccaggcgcucgugagcgacgucggcgacuccgccgagguggccgugaagauguucgacgccuacgucaacaccuucagcuccaccuucaacgugcccauggagaagcugaagacccugguggccacggcggaggccgagcucgccaagaacgucagccuggacaacgugcuguccaccuucaucagcgccgcgcgccagggguucguggacuccgacgucgagaccaaggacgugguggagugccucaagcugagccaccaguccgacaucgaggucaccggcgacagcugcaacaacuacaugcugacguacaacaagguggagaacaugaccccgcgggaccucggggccugcaucgacugcuccgcccgccacaucaacgcccagguggccaagagccacaacaucgcgcugaucuggaacgucaaggacuucaugucccugagcgagcagcuccggaagcagauccgcuccgccgccaagaagaacaaccugcccuucaagcugaccugcgccaccacgcgccagguggugaacgucgugaccaccaagaucgcccucaagggcgggugaggacuaguuauaagacugacuagcccgaugggccucccaacgggcccuccuccccuccuugcaccgagauuaauaaaaaaaaaaaaaaaaaaaaaaaaaaaaaaaaaaaaaaaaaaaaaaaaaaaaaaaaaaaaaaaaugcaucccccccccccccccccccccccccccccccaaaggcucuuuucagagccaccagaauu

SEQ ID NO: 21614 - RNA, 6058 nt, Artificial Sequence
  SARS-CoV-2__MT811279.1__non-structural protein 3 (NSP3) mRNA gc
aggagaaagcuuaccauggcccccaccaaggugaccuucggcgacgacacggucaucgaggugcagggguacaagagcgugaacaucaccuucgagcuggacgagcgcaucgacaagguccucaacgagaagugcuccgccuacaccguggagcugggcaccgaggugaacgaguucgcgugcgucguggccgacgccgugaucaagacgcugcagccggucagcgagcuccugaccccccuggggaucgaccucgacgagugguccauggccaccuacuaccuguucgacgagagcggcgaguucaagcuggccucccacauguacugcagcuucuacccccccgacgaggacgaggaggagggggacugcgaggaggaggaguucgagccguccacccaguacgaguacggcacggaggacgacuaccagggcaagccccucgaguucggggcgaccagcgccgcccugcagcccgaggaggagcaggaggaggacuggcuggacgacgacucccagcagaccgugggccagcaggacgggagcgaggacaaccagaccacgaccauccagaccaucguggagguccagccccagcucgagauggagcugaccccgguggugcagacgaucgaggucaacuccuucagcggcuaccugaagcucaccgacaacguguacaucaagaacgccgacaucguggaggaggcgaagaaggucaagcccaccgugguggucaacgccgccaacguguaccugaagcacgggggcggcguggccggggcccugaacaaggcgaccaacaacgccaugcaggucgaguccgacgacuacaucgccacgaacggcccccucaagguggggggcagcugcguccuguccggccacaaccuggccaagcacugccuccacgugguggggcccaacgucaacaagggcgaggacauccagcugcugaagagcgccuacgagaacuucaaccagcacgaggugcuccuggcgccgcugcucuccgccgggaucuucggcgccgaccccauccacagccugcgggugugcgucgacaccgugcgcaccaacguguaccuggccgucuucgacaagaaccucuacgacaagcugguguccagcuuccuggagaugaagagcgagaagcagguggagcagaagaucgccgagauccccaaggaggaggucaagcccuucaucaccgaguccaagccgagcguggagcagcggaagcaggacgacaagaagaucaaggcgugcguggaggaggucacgaccacccucgaggagaccaaguuccugacggagaaccugcuccuguacaucgacaucaacgggaaccugcaccccgacuccgccacccucgugagcgacaucgacaucaccuuccugaagaaggacgcccccuacaucgugggcgacgucgugcaggagggcgugcugaccgccgucgugauccccacgaagaaggccgggggcaccaccgagaugcucgcgaaggcccugcgcaaggugccgaccgacaacuacaucacgaccuaccccgggcagggccugaacggguacaccgucgaggaggccaagaccgugcucaagaagugcaaguccgccuucuacauccugcccagcaucaucuccaacgagaagcaggagauccugggcaccgugagcuggaaccuccgggagaugcuggcgcacgccgaggagacgcgcaagcugaugcccgucugcguggagaccaaggccaucguguccaccauccagcggaaguacaagggcaucaagauccaggagggggucguggacuacggcgcccgcuucuacuucuacaccagcaagacgaccguggccucccugaucaacacccucaacgaccugaacgagacccuggucacgaugccgcucggguacgugacccacggccugaaccuggaggaggcggcccgguacaugcgcagccucaaggugcccgccaccgucuccgugagcucccccgacgccgugaccgccuacaacggguaccugacgagcuccagcaagacccccgaggagcacuucaucgagaccaucucccuggcgggcagcuacaaggacuggagcuacuccggccagagcacccagcucgggaucgaguuccugaagcggggcgacaaguccgucuacuacacgagcaacccgaccaccuuccaccuggacggggaggugaucaccuucgacaaccucaagacgcugcugucccuccgcgaggugcggaucaucaaggucuucaccaccguggacaacaucaaccugcacacccagguggucgacaugagcaugacguacggccagcaguucggccccaccuaccuggacggggccgacgugaccaagaucaagccccacaacucccacgagggcaagaccuucuacgugcucccgaacgacgacacgcugcgcgucgaggccuucgaguacuaccacaccaccgaccccagcuuccuggggcgguacauguccgcccucaaccacaccaagaaguggaaguacccccaggugaacggccugacgagcaucaagugggccgacaacaacugcuaccuggcgaccgcccuccugacccugcagcagaucgagcucaaguucaaccccccggcccugcaggacgccuacuaccgcgcgcgggccggggaggccgccaacuucugcgcccugauccucgcguacugcaacaagaccgugggcgagcugggcgacguccgcgagacgauguccuaccuguuccagcacgccaaccucgacagcugcaagcgggugcugaacgucgugugcaagaccugcgggcagcagcagaccacccugaagggcguggaggccgucauguacauggggacccucuccuacgagcaguucaagaagggcgugcagauccccugcacgugcgggaagcaggccaccaaguaccuggugcagcaggagagccccuucgucaugauguccgcccccccggcgcaguacgagcugaagcacggcaccuucaccugcgccagcgaguacacgggcaacuaccagugcgggcacuacaagcacaucaccuccaaggagacccucuacugcaucgacggcgcccugcugaccaagagcagcgaguacaaggggcccaucacggacguguucuacaaggagaacuccuacaccaccaccaucaagcccgugacguacaagcucgacggcgucgugugcaccgagaucgaccccaagcuggacaacuacuacaagaaggacaacagcuacuucaccgagcagccgaucgaccuggugcccaaccagcccuaccccaacgccuccuucgacaacuucaaguucgucugcgacaacaucaaguucgccgacgaccucaaccagcugaccggguacaagaagccggcgagccgcgagcugaaggugacguucuuccccgaccucaacggcgacguggucgccaucgacuacaagcacuacacccccuccuucaagaagggcgccaagcugcugcacaagcccaucguguggcacgugaacaacgccaccaacaaggcgaccuacaagccgaacacguggugcauccggugccucuggagcaccaagcccgucgagaccuccaacagcuucgacgugcugaaguccgaggacgcccaggggauggacaaccuggccugcgaggaccucaagcccgugagcgaggaggucguggagaaccccaccauccagaaggacgugcuggagugcaacgucaagacgaccgagguggugggcgacaucauccugaagccggccaacaacucccucaagaucaccgaggaggucgggcacaccgaccugauggccgcguacguggacaacagcucccugacgaucaagaagcccaacgagcucagccgcgugcugggccugaagacccucgccacccacgggcuggccgccgucaacuccgugcccugggacaccaucgccaacuacgcgaagccguuccugaacaagguggucagcacgaccaccaacaucgugacccgcugccucaaccgggugugcacgaacuacaugcccuacuucuucacccugcugcuccagcugugcaccuucacccgcuccaccaacagccggaucaaggccuccaugcccacgaccaucgccaagaacaccgucaagagcgugggcaaguucugccuggaggccagcuucaacuaccucaagucccccaacuucagcaagcugaucaacaucaucaucugguuccugcuccuguccgugugccugggcagccucaucuacuccaccgccgcgcuggggguccugaugagcaaccucggcaugccguccuacugcacgggguaccgcgagggcuaccugaacagcaccaacgugaccaucgccaccuacugcacgggcuccauccccugcagcgugugccuguccgggcucgacagccuggacaccuaccccucccuggagaccauccagaucaccaucagcuccuucaagugggaccucacggccuucggccuggucgccgagugguuccuggccuacauccucuucacccgguucuucuacgugcuggggcuggcggccaucaugcagcucuucuucagcuacuucgccgugcacuucaucuccaacagcuggcugauguggcugaucaucaaccugguccagauggcccccaucuccgcgauggugcgcauguacaucuucuucgccagcuucuacuacguguggaagagcuacguccacgugguggacggcugcaacuccagcaccugcaugaugugcuacaagcggaaccgcgccacccgggucgagugcacgaccaucgugaacgggguccgccgguccuucuacguguacgccaacggcggcaagggguucugcaagcuccacaacuggaacugcgugaacugcgacaccuucugcgccggcagcaccuucaucuccgacgaggucgcgcgcgaccugagccugcaguucaagcggccgaucaaccccacggaccaguccagcuacaucguggacuccgugaccgucaagaacgggagcauccaccucuacuucgacaaggccggccagaagaccuacgagcgccacucccugagccacuucgugaaccuggacaaccuccgggccaacaacaccaaggggucccugcccaucaacgugaucgucuucgacggcaagagcaagugcgaggaguccagcgccaaguccgccagcguguacuacucccagcugaugugccagcccauccuccugcuggaccaggcgcucgugagcgacgucggcgacagcgccgagguggccgugaagauguucgacgccuacgucaacacguucuccagcaccuucaacgugccgauggagaagcugaagacccugguggccaccgcggaggccgagcucgccaagaacgucucccuggacaacgugcugagcacguucaucuccgccgcgcgccagggguucguggacagcgacgucgagaccaaggacgugguggagugccucaagcugucccaccagagcgacaucgaggucaccggcgacuccugcaacaacuacaugcugaccuacaacaagguggagaacaugacgccccgggaccucggggccugcaucgacugcagcgcccgccacaucaacgcccagguggccaagucccacaacaucgcgcugaucuggaacgucaaggacuucaugagccuguccgagcagcuccggaagcagauccgcagcgccgccaagaagaacaaccugcccuucaagcugaccugcgccaccacccgccagguggugaacgucgugacgaccaagaucgcccucaagggcgggugaggacuaguuauaagacugacuagcccgaugggccucccaacgggcccuccuccccuccuugcaccgagauuaauaaaaaaaaaaaaaaaaaaaaaaaaaaaaaaaaaaaaaaaaaaaaaaaaaaaaaaaaaaaaaaaaugcaucccccccccccccccccccccccccccccccaaaggcucuuuucagagccaccagaauu

SEQ ID NO: 21615 - RNA, 6058 nt, Artificial Sequence
  SARS-CoV-2__MT811281.1__non-structural protein 3 (NSP3) mRNA gc
aggagaaagcuuaccauggcccccaccaaggugaccuucggcgacgacacggucaucgaggugcagggguacaagagcgugaacaucaccuucgagcuggacgagcgcaucgacaagguccucaacgagaagugcuccgccuacaccguggagcugggcaccgaggugaacgaguucgcgugcgucguggccgacgccgugaucaagacgcugcagccggucagcgagcuccugaccccccuggggaucgaccucgacgagugguccauggccaccuacuaccuguucgacgagagcggcgaguucaagcuggccucccacauguacugcagcuucuacccccccgacgaggacgaggaggagggggacugcgaggaggaggaguucgagccguccacccaguacgaguacggcacggaggacgacuaccagggcaagccccucgaguucggggcgaccagcgccgcccugcagcccgaggaggagcaggaggaggacuggcuggacgacgacucccagcagaccgugggccagcaggacagcuccgaggacaaccagaccacgaccauccagaccaucguggagguccagccccagcucgagauggagcugaccccgguggugcagacgaucgaggucaacagcuucuccggguaccugaagcucaccgacaacguguacaucaagaacgccgacaucguggaggaggcgaagaaggucaagcccaccgugguggucaacgccgccaacguguaccugaagcacggcgggggcguggccggcgcccugaacaaggcgaccaacaacgccaugcaggucgagagcgacgacuacaucgccacgaacgggccccucaaggugggcggguccugcguccugagcggccacaaccuggccaagcacugccuccacguggugggccccaacgucaacaagggggaggacauccagcugcugaaguccgccuacgagaacuucaaccagcacgaggugcuccuggcgccgcugcucagcgccggcaucuucggggccgaccccauccacucccugcgggugugcgucgacaccgugcgcaccaacguguaccuggccgucuucgacaagaaccucuacgacaagcuggugagcagcuuccuggagaugaaguccgagaagcagguggagcagaagaucgccgagauccccaaggaggaggucaagcccuucaucaccgagagcaagccguccguggagcagcggaagcaggacgacaagaagaucaaggcgugcguggaggaggucacgaccacccucgaggagaccaaguuccugacggagaaccugcuccuguacaucgacaucaacggcaaccugcaccccgacagcgccacccucguguccgacaucgacaucaccuuccugaagaaggacgcccccuacaucgugggggacgucgugcaggagggcgugcugaccgccgucgugauccccacgaagaaggccggcgggaccaccgagaugcucgcgaaggcccugcgcaaggugccgaccgacaacuacaucacgaccuaccccggccaggggcugaacggcuacaccgucgaggaggccaagaccgugcucaagaagugcaagagcgccuucuacauccugcccuccaucaucagcaacgagaagcaggagauccuggggaccguguccuggaaccuccgggagaugcuggcgcacgccgaggagacgcgcaagcugaugcccgucugcguggagaccaaggccaucgugagcaccauccagcggaaguacaagggcaucaagauccaggagggcgucguggacuacggggcccgcuucuacuucuacaccuccaagacgaccguggccagccugaucaacacccucaacgaccugaacgagacccuggucacgaugccgcucggcuacgugacccacgggcugaaccuggaggaggcggcccgguacaugcgcucccucaaggugcccgccaccgucagcguguccagccccgacgccgugaccgccuacaacggcuaccugacguccagcuccaagacccccgaggagcacuucaucgagaccaucagccuggcggggagcuacaaggacugguccuacagcggccaguccacccagcucggcaucgaguuccugaagcggggggacaagagcgucuacuacacguccaacccgaccaccuuccaccuggacggcgaggugaucaccuucgacaaccucaagacgcugcugagccuccgcgaggugcggaccaucaaggucuucaccaccguggacaacaucaaccugcacacgcagguggucgacauguccaugaccuacgggcagcaguucggccccaccuaccuggacggcgccgacgugaccaagaucaagccccacaacagccacgaggggaagacguucuacgugcucccgaacgacgacacccugcgcgucgaggccuucgaguacuaccacaccaccgaccccuccuuccugggccgguacaugagcgcccucaaccacacgaagaaguggaaguacccccaggugaacgggcugaccuccaucaagugggccgacaacaacugcuaccuggcgaccgcccuccugacccugcagcagaucgagcucaaguucaaccccccggcccugcaggacgccuacuaccgcgcgcgggccggcgaggccgccaacuucugcgcccugauccucgcguacugcaacaagacggugggggagcugggcgacguccgcgagaccaugagcuaccuguuccagcacgccaaccucgacuccugcaagcgggugcugaacgucgugugcaagaccugcggccagcagcagaccacccugaaggggguggaggccgucauguacaugggcacgcucagcuacgagcaguucaagaagggggugcagauccccugcaccugcggcaagcaggccaccaaguaccuggugcagcaggagucccccuucgucaugaugagcgcccccccggcgcaguacgagcugaagcacgggaccuucacgugcgccuccgaguacaccggcaacuaccagugcggccacuacaagcacaucaccagcaaggagacccucuacugcaucgacggggcccugcugacgaagagcuccgaguacaagggccccaucaccgacguguucuacaaggagaacagcuacaccaccacgaucaagcccgugaccuacaagcucgacggggucgugugcaccgagaucgaccccaagcuggacaacuacuacaagaaggacaacuccuacuucaccgagcagccgaucgaccuggugcccaaccagcccuaccccaacgccagcuucgacaacuucaaguucgucugcgacaacaucaaguucgccgacgaccucaaccagcugacgggcuacaagaagccggcgucccgcgagcugaaggugaccuucuuccccgaccucaacggggacguggucgccaucgacuacaagcacuacacccccagcuucaagaagggcgccaagcugcugcacaagcccaucguguggcacgugaacaacgccaccaacaaggcgacguacaagccgaacaccuggugcauccggugccucugguccaccaagcccgucgagaccagcaacuccuucgacgugcugaagagcgaggacgcccagggcauggacaaccuggccugcgaggaccucaagcccguguccgaggaggucguggagaaccccacgauccagaaggacgugcuggagugcaacgucaagaccaccgagguggugggggacaucauccugaagccggccaacaacagccucaagaucaccgaggaggucggccacacggaccugauggccgcguacguggacaacuccagccugaccaucaagaagcccaacgagcucucccgcgugcuggggcugaagacccucgccacccacggccuggccgccgucaacagcgugcccugggacacgaucgccaacuacgcgaagccguuccugaacaagguggucuccaccaccaccaacaucgugacgcgcugccucaaccgggugugcaccaacuacaugcccuacuucuucacccugcugcuccagcugugcaccuucacccgcagcacgaacucccggaucaaggccagcaugcccaccaccaucgccaagaacaccgucaagagcguggggaaguucugccuggaggccuccuucaacuaccucaagagccccaacuucuccaagcugaucaacaucaucaucugguuccugcuccugagcgugugccugggcucccucaucuacagcacggccgcgcugggcguccugauguccaaccucgggaugccgagcuacugcaccggcuaccgcgagggguaccugaacuccaccaacgugaccaucgccacguacugcaccggcagcauccccugcuccgugugccugagcggccucgacucccuggacaccuaccccagccuggagaccauccagaucacgaucuccagcuucaagugggaccucaccgccuucgggcuggucgccgagugguuccuggccuacauccucuucacccgguucuucuacgugcugggccuggcggccaucaugcagcucuucuucuccuacuucgccgugcacuucaucagcaacuccuggcugauguggcugaucaucaaccugguccagauggcccccaucagcgcgauggugcgcauguacaucuucuucgccagcuucuacuacguguggaaguccuacguccacgugguggacgggugcaacagcuccaccugcaugaugugcuacaagcggaaccgcgccacgcgggucgagugcaccaccaucgugaacggcguccgccggagcuucuacguguacgccaacgggggcaagggcuucugcaagcuccacaacuggaacugcgugaacugcgacaccuucugcgccggguccacguucaucagcgacgaggucgcgcgcgaccugucccugcaguucaagcggccgaucaaccccaccgaccagagcuccuacaucguggacagcgugaccgucaagaacggcuccauccaccucuacuucgacaaggccgggcagaagaccuacgagcgccacagccugucccacuucgugaaccuggacaaccuccgggccaacaacacgaagggcagccugcccaucaacgugaucgucuucgacgggaaguccaagugcgaggagagcuccgccaagagcgccuccguguacuacagccagcugaugugccagcccauccuccugcuggaccaggcgcucgugagcgacgucggcgacuccgccgagguggccgugaagauguucgacgccuacgucaacaccuucagcuccaccuucaacgugccgauggagaagcugaagacccugguggccacggcggaggccgagcucgccaagaacgucagccuggacaacgugcuguccaccuucaucagcgccgugcgccagggcuucgucgacuccgacguggagaccaaggacguggucgagugccucaagcugagccaccaguccgacaucgaggugaccggggacagcugcaacaacuacaugcugacguacaacaagguggagaacaugaccccccgggaccucggcgcgugcaucgacugcuccgcccgccacaucaacgcccaggucgccaagagccacaacaucgcccugaucuggaacgugaaggacuucaugucccugagcgagcagcuccggaagcagauccgcuccgcggccaagaagaacaaccugcccuucaagcugaccugcgccaccacgcgccagguggucaacguggugaccaccaagaucgcccucaaggggggcugaggacuaguuauaagacugacuagcccgaugggccucccaacgggcccuccuccccuccuugcaccgagauuaauaaaaaaaaaaaaaaaaaaaaaaaaaaaaaaaaaaaaaaaaaaaaaaaaaaaaaaaaaaaaaaaaugcaucccccccccccccccccccccccccccccccaaaggcucuuuucagagccaccagaauu

SEQ ID NO: 21616 - RNA, 6058 nt, Artificial Sequence
  SARS-CoV-2__MT811297.1__non-structural protein 3 (NSP3) mRNA gc
aggagaaagcuuaccauggcccccaccaaggugaccuucggcgacgacacggucaucgaggugcagggguacaagagcgugaacaucaccuucgagcuggacgagcgcaucgacaagguccucaacgagaagugcuccgccuacaccguggagcugggcaccgaggugaacgaguucgcgugcgucguggccgacgccgugaucaagacgcugcagccggucagcgagcuccugaccccccuggggaucgaccucgacgagugguccauggccaccuacuaccuguucgacgagagcggcgaguucaagcuggccucccacauguacugcagcuucuacccccccgacgaggacgaggaggagggggacugcgaggaggaggaguucgagccguccacccaguacgaguacggcacggaggacgacuaccagggcaagccccucgaguucggggcgaccagcgccgcccugcagcccgaggaggagcaggaggaggacuggcuggacgacgacucccagcagaccgugggccagcaggacgggagcgaggacaaccagaccacgaccauccagaccaucguggagguccagccccagcucgagauggagcugaccccgguggugcagacgaucgaggucaacuccuucagcggcuaccugaagcucaccgacaacguguacaucaagaacgccgacaucguggaggaggcgaagaaggucaagcccaccgugguggucaacgccgccaacguguaccugaagcacgggggcggcguggcccgggcccugaacaaggcgaccaacaacgccaugcaggucgaguccgacgacuacaucgccacgaacgggccccucaaggugggcgggagcugcguccuguccggccacaaccuggccaagcacugccuccacguggugggccccaacgucaacaagggggaggacauccagcugcugaagagcgccuacgagaacuucaaccagcacgaggugcuccuggcgccgcugcucuccgccggcaucuucggggccgaccccauccacagccugcgcgugugcgucgacaccgugcggaccaacguguaccuggccgucuucgacaagaaccucuacgacaagcugguguccagcuuccuggagaugaagagcgagaagcagguggagcagaagaucgccgagauccccaaggaggaggucaagcccuucaucaccgaguccaagccgagcguggagcagcgcaagcaggacgacaagaagaucaaggcgugcguggaggaggucacgaccacccucgaggagaccaaguuccugacggagaaccugcuccuguacaucgacaucaacggcaaccugcaccccgacuccgccacccucgugagcgacaucgacaucaccuuccugaagaaggacgcccccuacaucgugggggacgucgugcaggagggcgugcugaccgccgucgugauccccacgaagaaggccggcgggaccaccgagaugcucgcgaaggcccugcggaaggugccgaccgacaacuacaucacgaccuaccccggccaggggcugaacggcuacaccgucgaggaggccaagaccgugcucaagaagugcaaguccgccuucuacauccugcccagcaucaucuccaacgagaagcaggagauccuggggaccgugagcuggaaccuccgcgagaugcuggcgcacgccgaggagacgcggaagcugaugcccgucugcguggagaccaaggccaucguguccaccauccagcgcaaguacaagggcaucaagauccaggagggcgucguggacuacggggcccgguucuacuucuacaccagcaagacgaccguggccucccugaucaacacccucaacgaccugaacgagacccuggucacgaugccgcucggcuacgugacccacgggcugaaccuggaggaggcggcccgcuacaugcggagccucaaggugcccgccaccgucuccgugagcucccccgacgccgugaccgccuacaacggcuaccugacgagcuccagcaagacccccgaggagcacuucaucgagaccaucucccuggcggggagcuacaaggacuggagcuacuccggccagagcacccagcucggcaucgaguuccugaagcgcggggacaaguccgucuacuacacgagcaacccgaccaccuuccaccuggacggcgaggugaucaccuucgacaaccucaagacgcugcugucccuccgggaggugcgcaccaucaaggucuucaccaccguggacaacaucaaccugcacacgcagguggucgacaugagcaugaccuacgggcagcaguucggccccaccuaccuggacggcgccgacgugaccaagaucaagccccacaacucccacgaggggaagacguucuacgugcucccgaacgacgacacccugcgggucgaggccuucgaguacuaccacaccaccgaccccagcuuccugggccgcuacauguccgcccucaaccacacgaagaaguggaaguacccccaggugaacgggcugaccagcaucaagugggccgacaacaacugcuaccuggcgaccgcccuccugacccugcagcagaucgagcucaaguucaaccccccggcccugcaggacgccuacuaccgggcgcgcgccggcgaggccgccaacuucugcgcccugauccucgcguacugcaacaagacggugggggagcugggcgacguccgggagaccauguccuaccuguuccagcacgccaaccucgacagcugcaagcgcgugcugaacgucgugugcaagaccugcggccagcagcagaccacccugaaggggguggaggccgucauguacaugggcacgcucuccuacgagcaguucaagaagggggugcagauccccugcaccugcggcaagcaggccaccaaguaccuggugcagcaggagagccccuucgucaugauguccgcccccccggcgcaguacgagcugaagcacgggaccuucacgugcgccagcgaguacaccggcaacuaccagugcggccacuacaagcacaucaccuccaaggagacccucuacugcaucgacggggcccugcugacgaagagcagcgaguacaagggccccaucaccgacguguucuacaaggagaacuccuacaccaccacgaucaagcccgugaccuacaagcucgacggggucgugugcaccgagaucgaccccaagcuggacaacuacuacaagaaggacaacagcuacuucaccgagcagccgaucgaccuggugcccaaccagcccuaccccaacgccuccuucgacaacuucaaguucgucugcgacaacaucaaguucgccgacgaccucaaccagcugacgggcuacaagaagccggcgagccgggagcugaaggugaccuucuuccccgaccucaacggggacguggucgccaucgacuacaagcacuacacccccuccuucaagaagggcgccaagcugcugcacaagcccaucguguggcacgugaacaacgccaccaacaaggcgacguacaagccgaacaccuggugcauccgcugccucuggagcaccaagcccgucgagaccuccaacagcuucgacgugcugaaguccgaggacgcccagggcauggacaaccuggccugcgaggaccucaagcccgugagcgaggaggucguggagaaccccacgauccagaaggacgugcuggagugcaacgucaagaccaccgagguggugggggacaucauccugaagccggccaacaacucccucaagaucaccgaggaggucggccacacggaccugauggccgcguacguggacaacagcucccugaccaucaagaagcccaacgagcucagccgcgugcuggggcugaagacccucgccacccacggccuggccgccgucaacuccgugcccugggacacgaucgccaacuacgcgaagccguuccugaacaagguggucagcaccaccaccaacaucgugacgcggugccucaaccgcgugugcaccaacuacaugcccuacuucuucacccugcugcuccagcugugcaccuucacccgguccacgaacagccgcaucaaggccuccaugcccaccaccaucgccaagaacaccgucaagagcguggggaaguucugccuggaggccagcuucaacuaccucaagucccccaacuucagcaagcugaucaacaucaucaucugguuccugcuccuguccgugugccugggcagccucaucuacuccacggccgcgcugggcguccugaugagcaaccucgggaugccguccuacugcaccggcuaccgggagggguaccugaacagcaccaacgugaccaucgccacguacugcaccggcuccauccccugcagcgugugccuguccggccucgacagccuggacaccuaccccucccuggagaccauccagaucacgaucagcuccuucaagugggaccucaccgccuucgggcuggucgccgagugguuccuggccuacauccucuucacccgcuucuucuacgugcugggccuggcggccaucaugcagcucuucuucagcuacuucgccgugcacuucaucuccaacagcuggcugauguggcugaucaucaaccugguccagauggcccccaucuccgcgauggugcggauguacaucuucuucgccagcuucuacuacguguggaagagcuacguccacgugguggacgggugcaacuccagcaccugcaugaugugcuacaagcgcaaccgggccacgcgcgucgagugcaccaccaucgugaacggcguccggcgcuccuucuacguguacgccaacgggggcaagggcuucugcaagcuccacaacuggaacugcgugaacugcgacaccuucugcgccgggagcacguucaucuccgacgaggucgcgcgggaccugagccugcaguucaagcgcccgaucaaccccaccgaccaguccagcuacaucguggacuccgugaccgucaagaacggcagcauccaccucuacuucgacaaggccgggcagaagaccuacgagcggcacucccugagccacuucgugaaccuggacaaccuccgcgccaacaacacgaagggcucccugcccaucaacgugaucgucuucgacgggaagagcaagugcgaggaguccagcgccaaguccgccagcguguacuacucccagcugaugugccagcccauccuccugcuggaccaggcgcucgugagcgacgucggcgacagcgccgagguggccgugaagauguucgacgccuacgucaacaccuucuccagcaccuucaacgugccgauggagaagcugaagacccugguggccacggcggaggccgagcucgccaagaacgucucccuggacaacgugcugagcaccuucaucuccgccgcgcggcagggcuucguggacagcgacgucgagaccaaggacgugguggagugccucaagcugucccaccagagcgacaucgaggucaccggggacuccugcaacaacuacaugcugacguacaacaagguggagaacaugaccccccgcgaccucggcgccugcaucgacugcagcgcccggcacaucaacgcccagguggccaagucccacaacaucgcgcugaucuggaacgucaaggacuucaugagccuguccgagcagcuccgcaagcagauccgcagcgccgccaagaagaacaaccugcccuucaagcugaccugcgccaccacgcggcagguggugaacgucgugaccaccaagaucgcccucaaggggggcugaggacuaguuauaagacugacuagcccgaugggccucccaacgggcccuccuccccuccuugcaccgagauuaauaaaaaaaaaaaaaaaaaaaaaaaaaaaaaaaaaaaaaaaaaaaaaaaaaaaaaaaaaaaaaaaaugcaucccccccccccccccccccccccccccccccaaaggcucuuuucagagccaccagaauu

SEQ ID NO: 21617 - RNA, 6058 nt, Artificial Sequence
  SARS-CoV-2__MT811322.1__non-structural protein 3 (NSP3) mRNA gc
aggagaaagcuuaccauggcccccaccaaggugaccuucggcgacgacacggucaucgaggugcagggguacaagagcgugaacaucaccuucgagcuggacgagcgcaucgacaagguccucaacgagaagugcuccgccuacaccguggagcugggcaccgaggugaacgaguucgcgugcgucguggccgacgccgugaucaagacgcugcagccggucagcgagcuccugaccccccuggggaucgaccucgacgagugguccauggccaccuacuaccuguucgacgagagcggcgaguucaagcuggccucccacauguacugcagcuucuacccccccgacgaggacgaggaggagggggacugcgaggaggaggaguucgagccguccacccaguacgaguacggcacggaggacgacuaccagggcaagccccucgaguucggggcgaccagcgccgcccugcagcccgaggaggagcaggaggaggacuggcuggacgacgacucccagcagaccgugggccagcaggacgggagcgaggacaaccagaccacgaccauccagaccaucguggagguccagccccagcucgagauggagcugaccccgguggugcagacgaucgaggucaacuccuucagcggcuaccugaagcucaccgacaacguguacaucaagaacgccgacaucguggaggaggcgaagaaggucaagcccaccgugguggucaacgccgccaacguguaccugaagcacgggggcggcguggccggggcccugaacaaggcgaccaacaacgccaugcaggucgaguccgacgacuacaucgccacgaacggcccccucaagguggggggcagcugcguccuguccggccacaaccuggccaagcacugccuccacgugguggggcccaacgucaacaagggcgaggacauccagcugcugaagagcgccuacgagaacuucaaccagcacgaggugcuccuggcgccgcugcucuccgccgggaucuucggcgccgaccccauccacagccugcgggugugcgucgacaccgugcgcaccaacguguaccuggccgucuucgacaagaaccucuacgacaagcugguguccagcuuccuggagaugaagagcgagaagcagguggagcagaagaucgccgagauccccaaggaggaggucaagcccuucaucaccgaguccaagccgagcguggagcagcggaagcaggacgacaagaagaucaaggcgugcguggaggaggucacgaccacccucgaggagaccaaguuccugacggagaaccugcuccuguacaucgacaucaacgggaaccugcaccccgacuccgccacccucgugagcgacaucgacaucaccuuccugaagaaggacgcccccuacaucgugggcgacgucgugcaggagggcgugcugaccgccgucgugauccccacgaagaaggccgggggcaccaccgagaugcucgcgaaggcccugcgcaaggugccgaccgacaacuacaucacgaccuaccccgggcagggccugaacggguacaccgucgaggaggccaagaccgugcucaagaagugcaaguccgccuucuacauccugcccagcaucaucuccaacgagaagcaggagauccugggcaccgugagcuggaaccuccgggagaugcuggcgcacgccgaggagacgcgcaagcugaugcccgucugcguggagaccaaggccaucguguccaccauccagcggaaguacaagggcaucaagauccaggagggggucguggacuacggcgcccgcuucuacuucuacaccagcaagacgaccguggccucccugaucaacacccucaacgaccugaacgagacccuggucacgaugccgcucggguacgugacccacggccugaaccuggaggaggcggcccgguacaugcgcagccucaaggugcccgccaccgucuccgugagcucccccgacgccgugaccgccuacaacggguaccugacgagcuccagcaagacccccgaggagcacuucaucgagaccaucucccuggcgggcagcuacaaggacuggagcuacuccggccagagcacccagcucgggaucgaguuccugaagcggggcgacaaguccgucuacuacacgagcaacccgaccaccuuccaccuggacggggaggugaucaccuucgacaaccucaagacgcugcugucccuccgcgaggugcggaccaucaaggucuucaccaccguggacaacaucaaccugcacacgcagguggucgacaugagcaugaccuacggccagcaguucggccccaccuaccuggacggggccgacgugaccaagaucaagccccacaacucccacgagggcaagacguucuacgugcucccgaacgacgacacccugcgcgucgaggccuucgaguacuaccacaccaccgaccccagcuuccuggggcgguacauguccgcccucaaccacacgaagaaguggaaguacccccaggugaacggccugaccagcaucaagugggccgacaacaacugcuaccuggcgaccgcccuccugacccugcagcagaucgagcucaaguucaaccccccggcccugcaggacgccuacuaccgcgcgcgggccggggaggccgccaacuucugcgcccugauccucgcguacugcaacaagacggugggcgagcugggcgacguccgcgagaccauguccuaccuguuccagcacgccaaccucgacagcugcaagcgggugcugaacgucgugugcaagaccugcgggcagcagcagaccacccugaagggcguggaggccgucauguacauggggacgcucuccuacgagcaguucaagaagggcgugcagauccccugcaccugcgggaagcaggccaccaaguaccuggugcagcaggagagccccuucgucaugauguccgcccccccggcgcaguacgagcugaagcacggcaccuucacgugcgccagcgaguacaccggcaacuaccagugcgggcacuacaagcacaucaccuccaaggagacccucuacugcaucgacggcgcccugcugacgaagagcagcgaguacaaggggcccaucaccgacguguucuacaaggagaacuccuacaccaccacgaucaagcccgugaccuacaagcucgacggcgucgugugcaccgagaucgaccccaagcuggacaacuacuacaagaaggacaacagcuacuucaccgagcagccgaucgaccuggugcccaaccagcccuaccccaacgccuccuucgggaacuucaaguucgucugcgacaacaucaaguucgccgacgaccucaaccagcugacgggcuacaagaagccggcgagccgcgagcugaaggugaccuucuuccccgaccucaacggcgacguggucgccaucgacuacaagcacuacacccccuccuucaagaagggggccaagcugcugcacaagcccaucguguggcacgugaacaacgccaccaacaaggcgacguacaagccgaacaccuggugcauccggugccucuggagcaccaagcccgucgagaccuccaacagcuucgacgugcugaaguccgaggacgcccagggcauggacaaccuggccugcgaggaccucaagcccgugagcgaggaggucguggagaaccccacgauccagaaggacgugcuggagugcaacgucaagaccaccgagguggugggggacaucauccugaagccggccaacaacucccucaagaucaccgaggaggucggccacacggaccugauggccgcguacguggacaacagcucccugaccaucaagaagcccaacgagcucagccgcgugcuggggcugaagacccucgccacccacggccuggccgccgucaacuccgugcccugggacacgaucgccaacuacgcgaagccguuccugaacaagguggucagcaccaccaccaacaucgugacgcgcugccucaaccgggugugcaccaacuacaugcccuacuucuucacccugcugcuccagcugugcaccuucacccgcuccacgaacagccggaucaaggccuccaugcccaccaccaucgccaagaacaccgucaagagcgugggcaaguucugccuggaggccagcuucaacuaccucaagucccccaacuucagcaagcugaucaacaucaucaucugguuccugcuccuguccgugugccuggggagccucaucuacuccacggccgcgcugggcguccugaugagcaaccucgggaugccguccuacugcaccggcuaccgcgagggcuaccugaacagcaccaacgugaccaucgccacguacugcaccggguccauccccugcagcgugugccuguccggccucgacagccuggacaccuaccccucccuggagaccauccagaucacgaucagcuccuucaagugggaccucaccgccuucgggcuggucgccgagugguuccuggccuacauccucuucacccgguucuucuacgugcugggccuggcggccaucaugcagcucuucuucagcuacuucgccgugcacuucaucuccaacagcuggcugauguggcugaucaucaaccugguccagauggcccccaucuccgcgauggugcgcauguacaucuucuucgccagcuucuacuacguguggaagagcuacguccacgugguggacgggugcaacuccagcaccugcaugaugugcuacaagcggaaccgcgccacgcgggucgagugcaccaccaucgugaacggcguccgccgguccuucuacguguacgccaacggcgggaagggcuucugcaagcuccacaacuggaacugcgugaacugcgacaccuucugcgccgggagcacguucaucuccgacgaggucgcgcgcgaccugagccugcaguucaagcggccgaucaaccccaccgaccaguccagcuacaucguggacuccgugaccgucaagaacggcagcauccaccucuacuucgacaaggccgggcagaagaccuacgagcgccacucccugagccacuucgugaaccuggacaaccuccgggccaacaacacgaagggcucccugcccaucaacgugaucgucuucgacggcaagagcaagugcgaggaguccagcgccaaguccgccagcguguacuacucccagcugaugugccagcccauccuccugcuggaccaggcgcucgugagcgacgucggggacagcgccgagguggccgugaagauguucgacgccuacgucaacaccuucuccagcaccuucaacgugccgauggagaagcugaagacccugguggccacggcggaggccgagcucgccaagaacgucucccuggacaacgugcugagcaccuucaucuccgccgcgcgccagggcuucguggacagcgacgucgagaccaaggacgugguggagugccucaagcugucccaccagagcgacaucgaggucaccggggacuccugcaacaacuacaugcugacguacaacaagguggagaacaugaccccccgggaccucggcgccugcaucgacugcagcgcccgccacaucaacgcccagguggccaagucccacaacaucgcgcugaucuggaacgucaaggacuucaugagccuguccgagcagcuccggaagcagauccgcagcgccgccaagaagaacaaccugcccuucaagcugaccugcgccaccacgcgccagguggugaacgucgugaccaccaagaucgcccucaaggggggcugaggacuaguuauaagacugacuagcccgaugggccucccaacgggcccuccuccccuccuugcaccgagauuaauaaaaaaaaaaaaaaaaaaaaaaaaaaaaaaaaaaaaaaaaaaaaaaaaaaaaaaaaaaaaaaaaugcaucccccccccccccccccccccccccccccccaaaggcucuuuucagagccaccagaauu

SEQ ID NO: 21618 - RNA, 6058 nt, Artificial Sequence
  SARS-CoV-2__MT811341.1__non-structural protein 3 (NSP3) mRNA gc
aggagaaagcuuaccauggcccccaccaaggugaccuucggcgacgacacggucaucgaggugcagggguacaagagcgugaacaucaccuucgagcuggacgagcgcaucgacaagguccucaacgagaagugcuccgccuacaccguggagcugggcaccgaggugaacgaguucgcgugcgucguggccgacgccgugaucaagacgcugcagccggucagcgagcuccugaccccccuggggaucgaccucgacgagugguccauggccaccuacuaccuguucgacgagagcggcgaguucaagcuggccucccacauguacugcagcuucuacccccccgacgaggacgaggaggagggggacugcgaggaggaggaguucgagccguccacccaguacgaguacggcacggaggacgacuaccagggcaagccccucgaguucggggcgaccagcgccgcccugcagcccgaggaggagcaggaggaggacuggcuggacgacgacucccagcagaccgugggccagcaggacgggagcgaggacaaccagaccacgaccauccagaccaucguggagguccagccccagcucgagauggagcugaccccgguggugcagacgaucgaggucaacuccuucagcggcuaccugaagcucaccgacaacguguacaucaagaacgccgacaucguggaggaggcgaagaaggucaagcccaccgugguggucaacgccgccaacguguaccugaagcacgggggcggcguggccggggcccugaacaaggcgaccaacaacgccaugcaggucgaguccgacgacuacaucgccacgaacggcccccucaaggugagcggguccugcguccugagcggccacaaccuggccaagcacugccuccacguggugggccccaacgucaacaagggggaggacauccagcugcugaaguccgccuacgagaacuucaaccagcacgaggugcuccuggcgccgcugcucagcgccggcaucuucggggccgaccccauccacucccugcgggugugcgucgacaccgugcgcaccaacguguaccuggccgucuucgacaagaaccucuacgacaagcuggugagcagcuuccuggagaugaaguccgagaagcagguggagcagaagaucgccgagauccccaaggaggaggucaagcccuucaucaccgagagcaagccguccguggagcagcggaagcaggacgacaagaagaucaaggcgugcguggaggaggucacgaccacccucgaggagaccaaguuccugacggagaaccugcuccuguacaucgacaucaacggcaaccugcaccccgacagcgccacccucguguccgacaucgacaucaccuuccugaagaaggacgcccccuacaucgugggggacgucgugcaggagggcgugcugaccgccgucgugauccccacgaagaaggccggcgggaccaccgagaugcucgcgaaggcccugcgcaaggugccgaccgacaacuacaucacgaccuaccccggccaggggcugaacggcuacaccgucgaggaggccaagaccgugcucaagaagugcaagagcgccuucuacauccugcccuccaucaucagcaacgagaagcaggagauccuggggaccguguccuggaaccuccgggagaugcuggcgcacgccgaggagacgcgcaagcugaugcccgucugcguggagaccaaggccaucgugagcaccauccagcggaaguacaagggcaucaagauccaggagggcgucguggacuacggggcccgcuucuacuucuacaccuccaagacgaccguggccagccugaucaacauccucaacgaccugaacgagacccuggucaccaugccgcucggcuacgugacgcacgggcugaaccuggaggaggcggcccgguacaugcgcucccucaaggugcccgccaccgucagcguguccagccccgacgccgugaccgccuacaacggcuaccugaccuccagcuccaagacgcccgaggagcacuucaucgagaccaucagccuggcggggagcuacaaggacugguccuacagcggccaguccacccagcucggcaucgaguuccugaagcggggggacaagagcgucuacuacaccuccaacccgacgaccuuccaccuggacggcgaggugaucaccuucgacaaccucaagacccugcugagccuccgcgaggugcggacgaucaaggucuucaccaccguggacaacaucaaccugcacacccagguggucgacauguccaugacguacgggcagcaguucggccccaccuaccuggacggcgccgacgugaccaagaucaagccccacaacagccacgaggggaagaccuucuacgugcucccgaacgacgacacgcugcgcgucgaggccuucgaguacuaccacaccaccgaccccuccuuccugggccgguacaugagcgcccucaaccacaccaagaaguggaaguacccccaggugaacgggcugacguccaucaagugggccgacaacaacugcuaccuggcgaccgcccuccugacccugcagcagaucgagcucaaguucaaccccccggcccugcaggacgccuacuaccgcgcgcgggccggcgaggccgccaacuucugcgcccugauccucgcguacugcaacaagaccgugggggagcugggcgacguccgcgagacgaugagcuaccuguuccagcacgccaaccucgacuccugcaagcgggugcugaacgucgugugcaagaccugcggccagcagcagaccacccugaaggggguggaggccgucauguacaugggcacccucagcuacgagcaguucaagaagggggugcagauccccugcacgugcggcaagcaggccaccaaguaccuggugcagcaggagucccccuucgucaugaugagcgcccccccggcgcaguacgagcugaagcacgggaccuucaccugcgccuccgaguacacgggcaacuaccagugcggccacuacaagcacaucaccagcaaggagacccucuacugcaucgacggggcccugcugaccaagagcuccgaguacaagggccccaucacggacguguucuacaaggagaacagcuacaccaccaccaucaagcccgugacguacaagcucgacggggucgugugcaccgagaucgaccccaagcuggacaacuacuacaagaaggacaacuccuacuucaccgagcagccgaucgaccuggugcccaaccagcccuaccccaacgccagcuucgacaacuucaaguucgucugcgacaacaucaaguucgccgacgaccucaaccagcugaccggcuacaagaagccggcgucccgcgagcugaaggugacguucuuccccgaccucaacggggacguggucgccaucgacuacaagcacuacacccccagcuucaagaagggcgccaagcugcugcacaagcccaucguguggcacgugaacaacgccaccaacaaggcgaccuacaagccgaacacguggugcauccggugccucugguccaccaagcccgucgagaccagcaacuccuucgacgugcugaagagcgaggacgcccagggcauggacaaccuggccugcgaggaccucaagcccguguccgaggaggucguggagaaccccaccauccagaaggacgugcuggagugcaacgucaagacgaccgagguggugggggacaucauccugaagccggccaacaacagccucaagaucaccgaggaggucggccacaccgaccugauggccgcguacguggacaacuccagccugacgaucaagaagcccaacgagcucucccgcgugcuggggcugaagacccucgccacccacggccuggccgccgucaacagcgugcccugggacaccaucgccaacuacgcgaagccguuccugaacaagguggucuccacgaccaccaacaucgugacccgcugccucaaccgggugugcacgaacuacaugcccuacuucuucacccugcugcuccagcugugcaccuucacccgcagcaccaacucccggaucaaggccagcaugcccacgaccaucgccaagaacaccgucaagagcguggggaaguucugccuggaggccuccuucaacuaccucaagagccccaacuucuccaagcugaucaacaucaucaucugguuccugcuccugagcgugugccugggcucccucaucuacagcaccgccgcgcugggcguccugauguccaaccucgggaugccgagcuacugcacgggcuaccgcgagggguaccugaacuccaccaacgugaccaucgccaccuacugcacgggcagcauccccugcuccgugugccugagcggccucgacucccuggacaccuaccccagccuggagaccauccagaucaccaucuccagcuucaagugggaccucacggccuucgggcuggucgccgagugguuccuggccuacauccucuucacccgguucuucuacgugcugggccuggcggccaucaugcagcucuucuucuccuacuucgccgugcacuucaucagcaacuccuggcugauguggcugaucaucaaccugguccagauggcccccaucagcgcgauggugcgcauguacaucuucuucgccagcuucuacuacguguggaaguccuacguccacgugguggacgggugcaacagcuccaccugcaugaugugcuacaagcggaaccgcgccacccgggucgagugcacgaccaucgugaacggcguccgccggagcuucuacguguacgccaacgggggcaagggcuucugcaagcuccacaacuggaacugcgugaacugcgacaccuucugcgccggguccaccuucaucagcgacgaggucgcgcgcgaccugucccugcaguucaagcggccgaucaaccccacggaccagagcuccuacaucguggacagcgugaccgucaagaacggcuccauccaccucuacuucgacaaggccgggcagaagaccuacgagcgccacagccugucccacuucgugaaccuggacaaccuccgggccaacaacaccaagggcagccugcccaucaacgugaucgucuucgacgggaaguccaagugcgaggagagcuccgccaagagcgccuccguguacuacagccagcugaugugccagcccauccuccugcuggaccaggcgcucgugagcgacgucggcgacuccgccgagguggccgugaagauguucgacgccuacgucaacacguucagcuccaccuucaacgugccgauggagaagcugaagacccugguggccaccgcggaggccgagcucgccaagaacgucagccuggacaacgugcuguccacguucaucagcgccgcgcgccagggcuucguggacuccgacgucgagaccaaggacgugguggagugccucaagcugagccaccaguccgacaucgaggucaccggggacagcugcaacaacuacaugcugaccuacaacaagguggagaacaugacgccccgggaccucggcgccugcaucgacugcuccgcccgccacaucaacgcccagguggccaagagccacaacaucgcgcugaucuggaacgucaaggacuucaugucccugagcgagcagcuccggaagcagauccgcuccgccgccaagaagaacaaccugcccuucaagcugaccugcgccaccacccgccagguggugaacgucgugacgaccaagaucgcccucaaggggggcugaggacuaguuauaagacugacuagcccgaugggccucccaacgggcccuccuccccuccuugcaccgagauuaauaaaaaaaaaaaaaaaaaaaaaaaaaaaaaaaaaaaaaaaaaaaaaaaaaaaaaaaaaaaaaaaaugcaucccccccccccccccccccccccccccccccaaaggcucuuuucagagccaccagaauu

SEQ ID NO: 21619 - RNA, 6058 nt, Artificial Sequence
  SARS-CoV-2__MT811344.1__non-structural protein 3 (NSP3) mRNA gc
aggagaaagcuuaccauggcccccaccaaggugaccuucggcgacgacacggucaucgaggugcagggguacaagagcgugaacaucaccuucgagcuggacgagcgcaucgacaagguccucaacgagaagugcuccgccuacaccguggagcugggcaccgaggugaacgaguucgcgugcgucguggccgacgccgugaucaagacgcugcagccggucagcgagcuccugaccccccuggggaucgaccucgacgagugguccauggccaccuacuaccuguucgacgagagcggcgaguucaagcuggccucccacauguacugcagcuucuacccccccgacgaggacgaggaggagggggacugcgaggaggaggaguucgagccguccacccaguacgaguacggcacggaggacgacuaccagggcaagccccucgaguucggggcgaccagcgccgcccugcagcccgaggaggagcaggaggaggacuggcuggacgacgacucccagcagaccgugggccagcaggacgggagcgaggacaaccagaccacgaccauccagaccaucguggagguccagccccagcucgagauggagcugaccccgguggugcagacgaucgaggucaacuccuucagcggcuaccugaagcucaccgacaacguguacaucaagaacgccgacaucguggaggaggcgaagaaggucaagcccaccgugguggucaacgccgccaacguguaccugaagcacgggggcggcguggccggggcccugaacaaggcgaccaacaacgccaugcaggucgaguccgacgacuacaucgccacgaacggcccccucaagguggggggcagcugcguccuguccggccacaaccuggccaagcacugccuccacgugguggggcccaacgucaacaagggcgaggacauccagcugcugaagagcgccuacgagaacuucaaccagcacgaggugcuccuggcgccgcugcucuccgccgggaucuucggcgccgaccccauccacagccugcgggugugcgucgacaccgugcgcaccaacguguaccuggccgucuucgacaagaaccucuacgacaagcugguguccagcuuccuggagaugaagagcgagaagcagguggagcagaagaucgccgagauccccaaggaggaggucaagcccuucaucaccgaguccaagccgagcguggagcagcggaagcaggacgacaagaagaucaaggcgugcguggaggaggucacgaccacccucgaggagaccaaguuccugacggagaaccugcuccuguacaucgacaucaacgggaaccugcaccccgacuccgccacccucgugagcgacaucgacaucaccuuccugaagaaggacgcccccuacaucgugggcgacgucgugcaggagggcgugcugaccgccgucgugauccccacgaagaaggccgggggcaccaccgagaugcucgcgaaggcccugcgcaaggugccgaccgacaacuacaucacgaccuaccccgggcagggccugaacggguacaccgucgaggaggccaagaccgugcucaagaagugcaaguccaccuucuacauccugcccagcaucaucuccaacgagaagcaggagauccugggcacggugagcuggaaccuccgggagaugcuggcccacgcggaggagacccgcaagcugaugcccgucugcguggagaccaaggccaucguguccaccauccagcggaaguacaagggcaucaagauccaggagggggucguggacuacggcgcccgcuucuacuucuacacgagcaagaccaccguggccucccugaucaacacccucaacgaccugaacgagacgcuggucaccaugccgcucggguacgugacccacggccugaaccuggaggaggccgcgcgguacaugcgcagccucaaggugcccgccaccgucuccgugagcucccccgacgccgugacggccuacaacggguaccugaccagcuccagcaagacccccgaggagcacuucaucgagaccaucucccuggccggcagcuacaaggacuggagcuacuccggccagagcacgcagcucgggaucgaguuccugaagcggggcgacaaguccgucuacuacaccagcaacccgaccaccuuccaccuggacggggaggugaucacguucgacaaccucaagacccugcugucccuccgcgaggugcggaccaucaaggucuucaccacgguggacaacaucaaccugcacacccagguggucgacaugagcaugaccuacggccagcaguucggccccaccuaccuggacggggcggacgugacgaagaucaagccccacaacucccacgagggcaagaccuucuacgugcucccgaacgacgacacccugcgcgucgaggccuucgaguacuaccacaccacggaccccagcuuccuggggcgguacauguccgcccucaaccacaccaagaaguggaaguacccccaggugaacggccugaccagcaucaagugggccgacaacaacugcuaccuggccaccgcgcuccugacgcugcagcagaucgagcucaaguucaaccccccggcccugcaggacgccuacuaccgcgcccgggcgggggaggccgccaacuucugcgcccugauccucgccuacugcaacaagaccgugggcgagcugggcgacguccgcgagaccauguccuaccuguuccagcacgcgaaccucgacagcugcaagcgggugcugaacgucgugugcaagaccugcgggcagcagcagaccacgcugaagggcguggaggccgucauguacauggggacccucuccuacgagcaguucaagaagggcgugcagauccccugcaccugcgggaagcaggccaccaaguaccuggugcagcaggagagccccuucgucaugauguccgcccccccggcccaguacgagcugaagcacggcacguucaccugcgcgagcgaguacaccggcaacuaccagugcgggcacuacaagcacaucaccuccaaggagacgcucuacugcaucgacggcgcccugcugaccaagagcagcgaguacaaggggcccaucaccgacguguucuacaaggagaacuccuacaccacgaccaucaagcccgugaccuacaagcucgacggcgucgugugcaccgagaucgaccccaagcuggacaacuacuacaagaaggacaacagcuacuucacggagcagccgaucgaccuggugcccaaccagcccuaccccaacgccuccuucgacaacuucaaguucgucugcgacaacaucaaguucgccgacgaccucaaccagcugaccggguacaagaagccggccagccgcgagcugaaggugaccuucuuccccgaccucaacggcgacguggucgcgaucgacuacaagcacuacacccccuccuucaagaagggcgccaagcugcugcacaagcccaucguguggcacgugaacaacgccacgaacaaggccaccuacaagccgaacaccuggugcauccggugccucuggagcaccaagcccgucgagacguccaacagcuucgacgugcugaaguccgaggacgcgcaggggauggacaaccuggccugcgaggaccucaagcccgugagcgaggaggucguggagaaccccaccauccagaaggacgugcuggagugcaacgucaagaccaccgagguggugggcgacaucauccugaagccggccaacaacucccucaagaucacggaggaggucgggcacaccgaccugauggccgccuacguggacaacagcucccugaccaucaagaagcccaacgagcucagccgcgugcugggccugaagacccucgcgacgcacgggcuggccgccgucaacuccgugcccugggacaccaucgccaacuacgccaagccguuccugaacaagguggucagcaccaccacgaacaucgugacccgcugccucaaccgggugugcaccaacuacaugcccuacuucuucacccugcugcuccagcugugcaccuucacgcgcuccaccaacagccggaucaaggcguccaugcccaccaccaucgccaagaacacggucaagagcgugggcaaguucugccuggaggccagcuucaacuaccucaagucccccaacuucagcaagcugaucaacaucaucaucugguuccugcuccuguccgugugccugggcagccucaucuacuccaccgccgcccuggggguccugaugagcaaccucggcaugccguccuacugcaccggguaccgcgagggcuaccugaacagcaccaacgugacgaucgcgaccuacugcaccggcuccauccccugcagcgugugccuguccgggcucgacagccuggacaccuaccccucccuggagacgauccagaucaccaucagcuccuucaagugggaccucaccgccuucggccuggucgccgagugguuccuggccuacauccucuucacccgguucuucuacgugcuggggcuggccgcgaucaugcagcucuucuucagcuacuucgccgugcacuucaucuccaacagcuggcugauguggcugaucaucaaccugguccagauggcccccaucuccgccauggugcgcauguacaucuucuucgcgagcuucuacuacguguggaagagcuacguccacgugguggacggcugcaacuccagcacgugcaugaugugcuacaagcggaaccgcgccacccgggucgagugcaccaccaucgugaacgggguccgccgguccuucuacguguacgccaacggcggcaagggguucugcaagcuccacaacuggaacugcgugaacugcgacacguucugcgccggcagcaccuucaucuccgacgaggucgcccgcgaccugagccugcaguucaagcggccgaucaaccccaccgaccaguccagcuacaucguggacuccgugaccgucaagaacgggagcauccaccucuacuucgacaaggcgggccagaagacguacgagcgccacucccugagccacuucgugaaccuggacaaccuccgggccaacaacaccaaggggucccugcccaucaacgugaucgucuucgacggcaagagcaagugcgaggaguccagcgccaaguccgccagcguguacuacucccagcugaugugccagcccauccuccugcuggaccaggcccucgugagcgacgucggcgacagcgcggagguggccgugaagauguucgacgccuacgucaacaccuucuccagcaccuucaacgugccgauggagaagcugaagacgcugguggccaccgccgaggcggagcucgccaagaacgucucccuggacaacgugcugagcaccuucaucuccgccgcccgccagggguucguggacagcgacgucgagaccaaggacgugguggagugccucaagcugucccaccagagcgacaucgaggucacgggcgacuccugcaacaacuacaugcugaccuacaacaagguggagaacaugaccccccgggaccucggggcgugcaucgacugcagcgcccgccacaucaacgcccagguggccaagucccacaacaucgcccugaucuggaacgucaaggacuucaugagccuguccgagcagcuccggaagcagauccgcagcgcggccaagaagaacaaccugcccuucaagcugaccugcgccacgacccgccagguggugaacgucgugaccaccaagaucgcccucaagggcgggugaggacuaguuauaagacugacuagcccgaugggccucccaacgggcccuccuccccuccuugcaccgagauuaauaaaaaaaaaaaaaaaaaaaaaaaaaaaaaaaaaaaaaaaaaaaaaaaaaaaaaaaaaaaaaaaaugcaucccccccccccccccccccccccccccccccaaaggcucuuuucagagccaccagaauu

SEQ ID NO: 21620 - RNA, 6058 nt, Artificial Sequence
  SARS-CoV-2__MT811365.1__non-structural protein 3 (NSP3) mRNA gc
aggagaaagcuuaccauggcccccaccaaggugaccuucggcgacgacacggucaucgaggugcagggguacaagagcgugaacaucaccuucgagcuggacgagcgcaucgacaagguccucaacgagaagugcuccgccuacaccguggagcugggcaccgaggugaacgaguucgcgugcgucguggccgacgccgugaucaagacgcugcagccggucagcgagcuccugaccccccuggggaucgaccucgacgagugguccauggccaccuacuaccuguucgacgagagcggcgaguucaagcuggccucccacauguacugcagcuucuacccccccgacgaggacgaggaggagggggacugcgaggaggaggaguucgagccguccacccaguacgaguacggcacggaggacgacuaccagggcaagccccucgaguucggggcgaccagcgccgcccugcagcccgaggaggagcaggaggaggacuggcuggacgacgacucccagcagaccgugggccagcaggacgggagcgaggacaaccagaccacgaccauccagaccaucguggagguccagccccagcucgagauggagcugaccccgguggugcagacgaucgaggucaacuccuucagcggcuaccugaagcucaccgacaacguguacaucaagaacgccgacaucguggaggaggcgaagaaggucaagcccaccgugguggucaacgccgccaacguguaccugaagcacgggggcggcguggccggggcccugaacaaggcgaccaacaacgccaugcaggucgaguccgacgacuacaucgccacgaacggcccccucaagguggggggcagcugcguccuguccggccacaaccuggccaagcacugccuccacgugguggggcccaacgucaacaagggcgaggacauccagcugcugaagagcgccuacgagaacuucaaccagcacgaggugcuccuggcgccgcugcucuccgccgggaucuucggcgccgaccccauccacagccugcgggugugcgucgacaccgugcgcaccaacguguaccuggccgucuucgacaagaaccucuacgacaagcugguguccagcuuccuggagaugaagagcgagaagcagguggagcagaagaucgccgagauccccaaggaggaggucaagcccuucaucaccgaguccaagccgagcguggagcagcggaagcaggacgacaagaagaucaaggcgugcguggaggaggucacgaccacccucgaggagaccaaguuccugacggagaaccugcuccuguacaucgacaucaacgggaaccugcaccccgacuccgccacccucgugagcgacaucgacaucaccuuccugaagaaggacgcccccuacaucgugggcgacgucgugcaggagggcgugcugaccgccgucgugauccccacgaagaaggccgggggcaccaccgagaugcucgcgaaggcccugcgcaaggugccgaccgacaacuacaucacgaccuaccccgggcagggccugaacggguacaccgucgaggaggccaagaccgugcucaagaagugcaaguccgccuucuacauccugcccagcaucaucuccaacgagaagcaggagauccugggcaccgugagcuggaaccuccgggagaugcuggcgcacgccgaggagacgcgcaagcugaugcccgucugcguggagaccaaggccaucguguccaccauccagcggaaguacaagggcaucaagauccaggagggggucguggacuacggcgcccgcuucuacuucuacaccagcaagacgaccguggccucccugaucaacacccucaacgaccugaacgagacccuggucacgaugccgcucggguacgugacccacggccugaaccuggaggaggcggcccgguacaugcgcagccucaaggugcccgccaccgucuccgugagcucccccgacgccgugaccgccuacaacggguaccugacgagcuccagcaagacccccgaggagcacuucaucgagaccaucucccuggcgggcagcuacaaggacuggagcuacuccggccagagcacccagcucgggaucgaguuccugaagcggggcgacaaguccgucuacuacacgagcaacccgaccaccuuccaccuggacggggaggugaucaccuucgacaaccucaagacgcugcugucccuccgcgaggugcggaccaucaaggucuucaccaccguggacaacaucaaccugcacacgcagguggucgacaugagcaugaccuacggccagcaguucggccccaccuaccuggacggggccgacgugaccaagaucaagccccacaacucccacgagggcaagacguucuacgugcucccgaacgacgacacccugcgcgucgaggccuucgaguacuaccacaccaccgaccccagcuuccuggggcgguacauguccgcccucaaccacacgaagaaguggaaguacccccaggugaacggccugaccagcaucaagugggccgacaacaacugcuaccuggcgaccgcccuccugacccugcagcagaucgagcucaaguucaaccccccggcccugcaggacgccuacuaccgcgcgcgggccggggaggccgccaacuucugcgcccugauccucgcguacugcaacaagacggugggcgagcugggcgacguccgcgagaccauguccuaccuguuccagcacgccaaccucgacagcugcaagcgggugcugaacgucgugugcaagaccugcgggcagcagcagaccacccugaagggcguggaggccgucauguacauggggacgcucuccuacgagcaguucaagaagggcgugcagauccccugcaccugcgggaagcaggccaccaaguaccuggugcagcaggagagccccuucgucaugauguccgcccccccggcgcaguacgagcugaagcacggcaccuucacgugcgccagcgaguacaccggcaacuaccagugcgggcacuacaagcacaucaccuccaaggagacccucuacugcaucgacggcgcccugcugacgaagagcagcgaguacaaggggcccaucaccgacguguucuacaaggagaacuccuacaccaccacgaucaagcccgugaccuacaagcucgacggcgucgugugcaccgagaucgaccccaagcuggacaacuacuacaagaaggacaacagcuacuucaccgagcagccgaucgaccuggugcccaaccagcccuaccccaacgccuccuucgacaacuucaaguucgucugcgacaacaucaaguucgccgacgaccucaaccagcugacgggguacaagaagccggcgagccgcgagcugaaggugaccuucuuccccgaccucaacggcgacguggucgccaucgacuacaagcacuacacccccuccuucaagaagggcgccaagcugcugcacaagcccaucguguggcacgugaacaacgccaccaacaaggcgacguacaagccgaacaccuggugcauccggugccucuggagcaccaagcccgucgagaccuccaacagcuucgacgugcugaaguccgaggacgcccaggggauggacaaccuggccugcgaggaccucaagcccgugagcgaggaggucguggagaaccccacgauccagaaggacgugcuggagugcaacgucaagaccaccgagguggugggcgacaucauccugaagccggccaacaacucccucaagaucaccgaggaggucgggcacacggaccugauggccgcguacguggacaacagcucccugaccaucaagaagcccaacgagcucagccgcgugcugggccugaagacccucgccacccacgggcuggccgccgucaacuccgugcccugggacacgaucgccaacuacgcgaagccguuccugaacaagguggucagcaccaccaccaacaucgugacgcgcugccucaaccgggugugcaccaacuacaugcccuacuucuucacccugcugcuccagcugugcaccuucauccgcuccaccaacagccggaucaaggccuccaugcccacgaccaucgccaagaacaccgucaagagcgugggcaaguucugccuggaggccagcuucaacuaccucaagucccccaacuucagcaagcugaucaacaucaucaucugguuccugcuccuguccgugugccugggcagccucaucuacuccaccgccgcgcuggggguccugaugagcaaccucggcaugccguccuacugcacgggguaccgcgagggcuaccugaacagcaccaacgugaccaucgccaccuacugcacgggcuccauccccugcagcgugugccuguccgggcucgacagccuggacaccuaccccucccuggagaccauccagaucaccaucagcuccuucaagugggaccucacggccuucggccuggucgccgagugguuccuggccuacauccucuucacccgguucuucuacgugcuggggcuggcggccaucaugcagcucuucuucagcuacuucgccgugcacuucaucuccaacagcuggcugauguggcugaucaucaaccugguccagauggcccccaucuccgcgauggugcgcauguacaucuucuucgccagcuucuacuacguguggaagagcuacguccacgugguggacggcugcaacuccagcaccugcaugaugugcuacaagcggaaccgcgccacccgggucgagugcacgaccaucgugaacgggguccgccgguccuucuacguguacgccaacggcggcaagggguucugcaagcuccacaacuggaacugcgugaacugcgacaccuucugcgccggcagcaccuucaucuccgacgaggucgcgcgcgaccugagccugcaguucaagcggccgaucaaccccacggaccaguccagcuacaucguggacuccgugaccgucaagaacgggagcauccaccucuacuucgacaaggccggccagaagaccuacgagcgccacucccugagccacuucgugaaccuggacaaccuccgggccaacaacaccaaggggucccugcccaucaacgugaucgucuucgacggcaagagcaagugcgaggaguccagcgccaaguccgccagcguguacuacucccagcugaugugccagcccauccuccugcuggaccaggcgcucgugagcgacgucggcgacagcgccgagguggccgugaagauguucgacgccuacgucaacacguucuccagcaccuucaacgugccgauggagaagcugaagacccugguggccaccgcggaggccgagcucgccaagaacgucucccuggacaacgugcugagcacguucaucuccgccgcgcgccagggguucguggacagcgacgucgagaccaaggacgugguggagugccucaagcugucccaccagagcgacaucgaggucaccggcgacuccugcaacaacuacaugcugaccuacaacaagguggagaacaugacgccccgggaccucggggccugcaucgacugcagcgcccgccacaucaacgcccagguggccaagucccacaacaucgcgcugaucuggaacgucaaggacuucaugagccuguccgagcagcuccggaagcagauccgcagcgccgccaagaagaacaaccugcccuucaagcugaccugcgccaccacccgccagguggugaacgucgugacgaccaagaucgcccucaagggcgggugaggacuaguuauaagacugacuagcccgaugggccucccaacgggcccuccuccccuccuugcaccgagauuaauaaaaaaaaaaaaaaaaaaaaaaaaaaaaaaaaaaaaaaaaaaaaaaaaaaaaaaaaaaaaaaaaugcaucccccccccccccccccccccccccccccccaaaggcucuuuucagagccaccagaauu

SEQ ID NO: 21621 - RNA, 6058 nt, Artificial Sequence
  SARS-CoV-2__MT811405.1__non-structural protein 3 (NSP3) mRNA gc
aggagaaagcuuaccauggcccccaccaaggugaccuucggcgacgacacggucaucgaggugcagggguacaagagcgugaacaucaccuucgagcuggacgagcgcaucgacaagguccucaacgagaagugcuccgccuacaccguggagcugggcaccgaggugaacgaguucgcgugcgucguggccgacgccgugaucaagacgcugcagccggucagcgagcuccugaccccccuggggaucgaccucgacgagugguccauggccaccuacuaccuguucgacgagagcggcgaguucaagcuggccucccacauguacugcagcuucuacccccccgacgaggacgaggaggagggggacugcgaggaggaggaguucgagccguccacccaguacgaguacggcacggaggacgacuaccagggcaagccccucgaguucggggcgaccagcgccgcccugcagcccgaggaggagcaggaggaggacuggcuggacgacgacucccagcagaccgugggccagcaggacgggagcgaggacaaccagaccacgaccauccagaccaucguggagguccagccccagcucgagauggagcugaccccgguggugcagacgaucgaggucaacuccuucagcggcuaccugaagcucaccgacaacguguacaucaagaacgccgacaucguggaggaggcgaagaaggucaagcccaccgugguggucaacgccgccaacguguaccugaagcacgggggcggcguggccggggcccugaacaaggcgaccaacaacgccaugcaggucgaguccgacgacuacaucgccacgaacggcccccucaagguggggggcagcugcguccuguccggccacaaccuggccaagcacugccuccacgugguggggcccaacgucaacaagggcgaggacauccagcugcugaagagcgccuacgagaacuucaaccagcacgaggugcuccuggcgccgcugcucuccgccgggaucuucggcgccgaccccauccacagccugcgggugugcgucgacaccgugcgcaccaacguguaccuggccgucuucgacaagaaccucuacgacaagcugguguccagcuuccuggagaugaagagcgagaagcagguggagcagaagaucgccgagauccccaaggaggaggucaagcccuucaucaccgaguccaagccgagcguggagcagcggaagcaggacgacaagaagaucaaggcgugcguggaggaggucacgaccacccucgaggagaccaaguuccugacggagaaccugcuccuguacaucgacaucaacgggaaccugcaccccgacuccgccacccucgugagcgacaucgacaucaccuuccugaagaaggacgcccccuacaucgugggcgacgucgugcaggagggcgugcugaccgccgucgugauccccacgaagaaggccgggggcaccaccgagaugcucgcgaaggcccugcgcaaggugccgaccgacaacuacaucacgaccuaccccgggcagggccugaacggguacaccgucgaggaggccaagaccgugcucaagaagugcaaguccgccuucuacauccugcccagcaucaucuccaacgagaagcaggagauccugggcaccgugagcuggaaccuccgggagaugcuggcgcacgccgaggagacgcgcaagcugaugcccgucugcguggagaccaaggccaucguguccaccauccagcggaaguacaagggcaucaagauccaggagggggucguggacuacggcgcccgcuucuacuucuacaccagcaagacgaccguggccucccugaucaacacccucaacgaccugaacgagacccuggucacgaugccgcucggguacgugacccacggccugaaccuggaggaggcggcccgguacaugcgcagccucaaggugcccgccaccgucuccgugagcucccccgacgccgugaccgccuacaacggguaccugacgagcuccagcaagacccccgaggagcacuucaucgagaccaucucccuggcgggcagcuacaaggacuggagcuacuccggccagagcacccagcucgggaucgaguuccugaagcggggcgacaaguccgucuacuacacgagcaacccgaccaccuuccaccuggacggggaggugaucaccuucgacaaccucaagacgcugcugucccuccgcgaggugcggaccaucaaggucuucaccaccguggacaacaucaaccugcacacgcagguggucgacaugagcaugaccuacggccagcaguucggccccaccuaccuggacggggccgacgugaccaagaucaagccccacaacucccacgagggcaagacguucuacgugcucccgaacgacgacacccugcgcgucgaggccuucgaguacuaccacaccaccgaccccagcuuccuggggcgguacauguccgcccucaaccacacgaagaaguggaaguacccccaggugaacggccugaccagcaucaagugggccgacaacaacugcuaccuggcgaccgcccuccugacccugcagcagaucgagcucaaguucaaccccccggcccugcaggacgccuacuaccgcgcgcgggccggggaggccgccaacuucugcgcccugauccucgcguacugcaacaagacggugggcgagcugggcgacguccgcgagaccauguccuaccuguuccagcacgccaaccucgacagcugcaagcgggugcugaacgucgugugcaagaccugcgggcagcagcagaccacccgcaagggcguggaggccgucauguacauggggacgcuguccuacgagcaguucaagaagggcgugcagauccccugcaccugcgggaagcaggccaccaaguaccucgugcagcaggagagccccuucgucaugauguccgcccccccggcgcaguacgagcugaagcacggcaccuucacgugcgccagcgaguacaccggcaacuaccagugcgggcacuacaagcacaucaccuccaaggagacccuguacugcaucgacggcgcccuccugacgaagagcagcgaguacaaggggcccaucaccgacguguucuacaaggagaacuccuacaccaccacgaucaagcccgugaccuacaagcuggacggcgucgugugcaccgagaucgaccccaagcucgacaacuacuacaagaaggacaacagcuacuucaccgagcagccgaucgaccuggugcccaaccagcccuaccccaacgccuccuucgacaacuucaaguucgucugcgacaacaucaaguucgccgacgaccugaaccagcucacgggguacaagaagccggcgagccgggagcugaaggugaccuucuuccccgaccugaacggcgacguggucgccaucgacuacaagcacuacacccccuccuucaagaagggcgccaagcuccugcacaagcccaucguguggcacgugaacaacgccaccaacaaggcgacguacaagccgaacaccuggugcauccgcugccuguggagcaccaagcccgucgagaccuccaacagcuucgacgugcucaaguccgaggacgcccaggggauggacaaccuggccugcgaggaccugaagcccgugagcgaggaggucguggagaaccccacgauccagaaggacgugcucgagugcaacgucaagaccaccgagguggugggcgacaucauccugaagccggccaacaacucccugaagaucaccgaggaggucgggcacacggaccucauggccgcguacguggacaacagcucccugaccaucaagaagcccaacgagcugagccgcgugcucggccugaagacccuggccacccacgggcucgccgccgucaacuccgugcccugggacacgaucgccaacuacgcgaagccguuccugaacaagguggucagcaccaccaccaacaucgugacgcggugccugaaccgcgugugcaccaacuacaugcccuacuucuucacccuccugcugcagcucugcaccuucacccgguccacgaacagccgcaucaaggccuccaugcccaccaccaucgccaagaacaccgucaagagcgugggcaaguucugccuggaggccagcuucaacuaccugaagucccccaacuucagcaagcucaucaacaucaucaucugguuccugcugcucuccgugugccugggcagccugaucuacuccacggccgcgcucgggguccugaugagcaaccugggcaugccguccuacugcaccggguaccgggagggcuaccucaacagcaccaacgugaccaucgccacguacugcaccggcuccauccccugcagcgugugccuguccgggcuggacagccucgacaccuaccccucccuggagaccauccagaucacgaucagcuccuucaagugggaccugaccgccuucggccucgucgccgagugguuccuggccuacauccuguucacccgcuucuucuacgugcucgggcuggcggccaucaugcagcuguucuucagcuacuucgccgugcacuucaucuccaacagcuggcucauguggcugaucaucaaccugguccagauggcccccaucuccgcgauggugcggauguacaucuucuucgccagcuucuacuacguguggaagagcuacguccacgugguggacggcugcaacuccagcaccugcaugaugugcuacaagcgcaaccgggccacgcgcgucgagugcaccaccaucgugaacgggguccggcgcuccuucuacguguacgccaacggcggcaagggguucugcaagcugcacaacuggaacugcgugaacugcgacaccuucugcgccggcagcacguucaucuccgacgaggucgcgcgggaccucagccugcaguucaagcgcccgaucaaccccaccgaccaguccagcuacaucguggacuccgugaccgucaagaacgggagcauccaccuguacuucgacaaggccggccagaagaccuacgagcggcacucccucagccacuucgugaaccuggacaaccugcgcgccaacaacacgaaggggucccuccccaucaacgugaucgucuucgacggcaagagcaagugcgaggaguccagcgccaaguccgccagcguguacuacucccagcugaugugccagcccauccugcuccuggaccaggcgcuggugagcgacgucggcgacagcgccgagguggccgugaagauguucgacgccuacgucaacaccuucuccagcaccuucaacgugccgauggagaagcucaagacccugguggccacggcggaggccgagcuggccaagaacgucucccucgacaacgugcugagcaccuucaucuccgccgcgcggcagggguucguggacagcgacgucgagaccaaggacgugguggagugccugaagcucucccaccagagcgacaucgaggucaccggcgacuccugcaacaacuacaugcugacguacaacaagguggagaacaugaccccccgcgaccugggggccugcaucgacugcagcgcccggcacaucaacgcccagguggccaagucccacaacaucgcgcucaucuggaacgucaaggacuucaugagccuguccgagcagcugcgcaagcagauccgcagcgccgccaagaagaacaaccuccccuucaagcugaccugcgccaccacgcggcagguggugaacgucgugaccaccaagaucgcccugaagggcgggugaggacuaguuauaagacugacuagcccgaugggccucccaacgggcccuccuccccuccuugcaccgagauuaauaaaaaaaaaaaaaaaaaaaaaaaaaaaaaaaaaaaaaaaaaaaaaaaaaaaaaaaaaaaaaaaaugcaucccccccccccccccccccccccccccccccaaaggcucuuuucagagccaccagaauu

SEQ ID NO: 21622 - RNA, 6058 nt, Artificial Sequence
  SARS-CoV-2__MT811407.1__non-structural protein 3 (NSP3) mRNA gc
aggagaaagcuuaccauggcccccaccaaggugaccuucggcgacgacacggucaucgaggugcagggguacaagagcgugaacaucaccuucgagcuggacgagcgcaucgacaagguccucaacgagaagugcuccgccuacaccguggagcugggcaccgaggugaacgaguucgcgugcgucguggccgacgccgugaucaagacgcugcagccggucagcgagcuccugaccccccuggggaucgaccucgacgagugguccauggccaccuacuaccuguucgacgagagcggcgaguucaagcuggccucccacauguacugcagcuucuacccccccgacgaggacgaggaggagggggacugcgaggaggaggaguucgagccguccacccaguacgaguacggcacggaggacgacuaccagggcaagccccucgaguucggggcgaccagcgccgcccugcagcccgaggaggagcaggaggaggacuggcuggacgacgacucccagcagaccgugggccagcaggacgggagcgaggacaaccagaccacgaccauccagaccaucguggagguccagccccagcucgagauggagcugaccccgguggugcagacgaucgaggucaacuccuucagcggcuaccugaagcucaccgacaacguguacaucaagaacgccgacaucguggaggaggcgaagaaggucaagcccaccgugguggucaacgccgccaacguguaccugaagcacgggggcggcguggccggggcccugaacaaggcgaccaacaacgccaugcaggucgaguccgacgacuacaucgccacgaacggcccccucaagguggggggcagcugcguccuguccggccacaaccuggccaagcacugccuccacgugguggggcccaacgucaacaagggcgaggacauccagcugcugaagagcgccuacgagaacuucaaccagcacgaggugcuccuggcgccgcugcucuccgccgggaucuucggcgccgaccccauccacagccugcgggugugcgucgacaccgugcgcaccaacguguaccuggccgucuucgacaagaaccucuacgacaagcugguguccagcuuccuggagaugaagagcgagaagcagguggagcagaagaucgccgagauccccaaggaggaggucaagcccuucaucaccgaguccaagccgagcguggagcagcggaagcaggacgacaagaagaucaaggcgugcguggaggaggucacgaccacccucgaggagaccaaguuccugacggagaaccugcuccuguacaucgacaucaacgggaaccugcaccccgacuccgccacccucgugagcgacaucgacaucaccuuccugaagaaggacgcccccuacaucgugggcgacgucgugcaggagggcgugcugaccgccgucgugauccccacgaagaaggccgggggcaccaccgagaugcucgcgaaggcccugcgcaaggugccgaccgacaacuacaucacgaccuaccccgggcagggccugaacggguacaccgucgaggaggccaagaccgugcucaagaagugcaaguccgccuucuacauccugcccagcaucaucuccaacgagaagcaggagauccugggcaccgugagcuggaaccuccgggagaugcuggcgcacgccgaggagacgcgcaagcugaugcccgucugcguggagaccaaggccaucguguccaccauccagcggaaguacaagggcaucaagauccaggagggggucguggacuacggcgcccgcuucuacuucuacaccagcaagacgaccguggccucccugaucaacacccucaacgaccugaacgagacccuggucacgaugccgcucggguacgugacccacggccugaaccuggaggaggcggcccgguacaugcgcagccucaaggugcccgccaccgucuccgugagcucccccgacgccgugaccgccuacaacggguaccugacgagcuccagcaagacccccgaggagcacuucaucgagaccaucucccuggcgggcagcuacaaggacuggagcuacuccggccagagcacccagcucgggaucgaguuccugaagcggggcgacaaguccgucuacuacacgagcaacccgaccaccuuccaccuggacggggaggugaucaccuucgacaaccucaagacgcugcugucccuccgcgaggugcggaccaucaaggucuucaccaccguggacaacaucaaccugcacacgcagguggucgacaugagcaugaccuacggccagcaguucggccccaccuaccuggacggggccgacgugaccaagaucaagccccacaacucccacgagggcaagacguucuacgugcucccgaacgacgacacccugcgcgucgaggccuucgaguacuaccacaccaccgaccccagcuuccuggggcgguacauguccgcccucaaccacacgaagaaguggaaguacccccaggugaacggccugaccagcaucaagugggccgacaacaacugcuaccuggcgaccgcccuccugacccugcagcagaucgagcucaaguucaaccccccggcccugcaggacgccuacuaccgcgcgcgggccggggaggccgccaacuucugcgcccugauccucgcguacugcaacaagacggugggcgagcugggcgacguccgcgagaccauguccuaccuguuccagcacgccaaccucgacagcugcaagcgggugcugaacgucgugugcaagaccugcgggcagcagcagaccacccugaagggcguggaggccgucauguacauggggacgcucuccuacgagcaguucaagaagggcgugcagauccccugcaccugcgggaagcaggccaccaaguaccuggugcagcaggagagccccuucgucaugauguccgcccccccggcgcaguacgagcugaagcacggcaccuucacgugcgccagcgaguacaccggcaacuaccagugcgggcacuacaagcacaucaccuccaaggagacccucuacugcaucgacggcgcccugcugacgaagagcagcgaguacaaggggcccaucaccgacguguucuacaaggagaacuccuacaccaccacgaucaagcccgugaccuacaagcucgacggcgucgugugcaccgagaucgaccccaagcuggacaacuacuacaagaaggacaacagcuacuucaccgagcagccgaucgaccuggugcccaaccagcccuaccccaacgccuccagcgacaacuucaaguucgucugcgacaacaucaaguucgccgacgaccucaaccagcugacgggguacaagaagccggcgucccgcgagcugaaggugaccuucuuccccgaccucaacggcgacguggucgccaucgacuacaagcacuacacccccagcuucaagaagggcgccaagcugcugcacaagcccaucguguggcacgugaacaacgccaccaacaaggcgacguacaagccgaacaccuggugcauccggugccucugguccaccaagcccgucgagaccagcaacuccuucgacgugcugaagagcgaggacgcccaggggauggacaaccuggccugcgaggaccucaagcccguguccgaggaggucguggagaaccccacgauccagaaggacgugcuggagugcaacgucaagaccaccgagguggugggcgacaucauccugaagccggccaacaacagccucaagaucaccgaggaggucgggcacacggaccugauggccgcguacguggacaacuccagccugaccaucaagaagcccaacgagcucucccgcgugcugggccugaagacccucgccacccacgggcuggccgccgucaacagcgugcccugggacacgaucgccaacuacgcgaagccguuccugaacaagguggucuccaccaccaccaacaucgugacgcgcugccucaaccgggugugcaccaacuacaugcccuacuucuucacccugcugcuccagcugugcaccuucacccgcagcacgaacucccggaucaaggccagcaugcccaccaccaucgccaagaacaccgucaagagcgugggcaaguucugccuggaggccuccuucaacuaccucaagagccccaacuucuccaagcugaucaacaucaucaucugguuccugcuccugagcgugugccugggcucccucaucuacagcacggccgcgcuggggguccugauguccaaccucggcaugccgagcuacugcaccggguaccgcgagggcuaccugaacuccaccaacgugaccaucgccacguacugcaccggcagcauccccugcuccgugugccugagcgggcucgacucccuggacaccuaccccagccuggagaccauccagaucacgaucuccagcuucaagugggaccucaccgccuucggccuggucgccgagugguuccuggccuacauccucuucacccgguucuucuacgugcuggggcuggcggccaucaugcagcucuucuucuccuacuucgccgugcacuucaucagcaacuccuggcugauguggcugaucaucaaccugguccagauggcccccaucagcgcgauggugcgcauguacaucuucuucgccagcuucuacuacguguggaaguccuacguccacgugguggacggcugcaacagcuccaccugcaugaugugcuacaagcggaaccgcgccacgcgggucgagugcaccaccaucgugaacgggguccgccggagcuucuacguguacgccaacggcggcaagggguucugcaagcuccacaacuggaacugcgugaacugcgacaccuucugcgccggcuccacguucaucagcgacgaggucgcgcgcgaccugucccugcaguucaagcggccgaucaaccccaccgaccagagcuccuacaucguggacagcgugaccgucaagaacggguccauccaccucuacuucgacaaggccggccagaagaccuacgagcgccacagccugucccacuucgugaaccuggacaaccuccgggccaacaacacgaaggggagccugcccaucaacgugaucgucuucgacggcaaguccaagugcgaggagagcuccgccaagagcgccuccguguacuacagccagcugaugugccagcccauccuccugcuggaccaggcgcucgugagcgacgucggcgacuccgccgagguggccgugaagauguucgacgccuacgucaacaccuucagcuccaccuucaacgugccgauggagaagcugaagacccugguggccacggcggaggccgagcucgccaagaacgucagccuggacaacgugcuguccaccuucaucagcgccgcgcgccagggguucguggacuccgacgucgagaccaaggacgugguggagugccucaagcugagccaccaguccgacaucgaggucaccggcgacagcugcaacaacuacaugcugacguacaacaagguggagaacaugaccccccgggaccucggggccugcaucgacugcuccgcccgccacaucaacgcccagguggccaagagccacaacaucgcgcugaucuggaacgucaaggacuucaugucccugagcgagcagcuccggaagcagauccgcuccgccgccaagaagaacaaccugcccuucaagcugaccugcgccaccacgcgccagguggugaacgucgugaccaccaagaucgcccucaagggcgggugaggacuaguuauaagacugacuagcccgaugggccucccaacgggcccuccuccccuccuugcaccgagauuaauaaaaaaaaaaaaaaaaaaaaaaaaaaaaaaaaaaaaaaaaaaaaaaaaaaaaaaaaaaaaaaaaugcaucccccccccccccccccccccccccccccccaaaggcucuuuucagagccaccagaauu

SEQ ID NO: 21623 - RNA, 6058 nt, Artificial Sequence
  SARS-CoV-2__MT811483.1__non-structural protein 3 (NSP3) mRNA gc
aggagaaagcuuaccauggcccccaccaaggugaccuucggcgacgacacggucaucgaggugcagggguacaagagcgugaacaucaccuucgagcuggacgagcgcaucgacaagguccucaacgagaagugcuccgccuacaccguggagcugggcaccgaggugaacgaguucgcgugcgucguggccgacgccgugaucaagacgcugcagccggucagcgagcuccugaccccccuggggaucgaccucgacgagugguccauggccaccuacuaccuguucgacgagagcggcgaguucaagcuggccucccacauguacugcagcuucuacccccccgacgaggacgaggaggagggggacugcgaggaggaggaguucgagccguccacccaguacgaguacggcacggaggacgacuaccagggcaagccccucgaguucggggcgaccagcgccgcccugcagcccgaggaggagcaggaggaggacuggcuggacgacgacucccagcagaccgugggccagcaggacgggagcgaggacaaccagaccacgaccauccagaccaucguggagguccagccccagcucgagauggagcugaccccgguggugcagacgaucgaggucaacuccuucagcggcuaccugaagcucaccgacaacguguacaucaagaacgccgacaucguggaggaggcgaagaaggucaagcccaccgugguggucaacgccgccaacguguaccugaagcacgggggcggcguggccggggcccugaacaaggcgaccaacaacgccaugcaggucgaguccgacgacuacaucgccacgaacggcccccucaagguggggggcagcugcguccuguccggccacaaccuggccaagcacugccuccacgugguggggcccaacgucaacaagggcgaggacauccagcugcugaagagcgccuacgagaacuucaaccagcacgaggugcuccuggcgccgcugcucuccgccgggaucuucggcgccgaccccauccacagccugcgggugugcgucgacaccgugcgcaccaacguguaccuggccgucuucgacaagaaccucuacgacaagcugguguccagcuuccuggagaugaagagcgagaagcagguggagcagaagaucgccgagauccccaaggaggaggucaagcccuucaucaccgaguccaagccgagcguggagcagcggaagcaggacgacaagaagaucaaggcgugcguggaggaggucacgaccacccucgaggagaccaaguuccugacggagaaccugcuccuguacaucgacaucaacgggaaccugcaccccgacuccgccacccucgugagcgacaucgacaucaccuuccugaagaaggacgcccccuacaucgugggcgacgucgugcaggagggcgugcugaccgccgucgugauccccacgaagaaggccgggggcaccaccgagaugcucgcgaaggcccugcgcaaggugccgaccgacaacuacaucacgaccuaccccgggcagggccugaacggguacaccgucgaggaggccaagaccgugcucaagaagugcaaguccgccuucuacauccugcccagcaucaucuccaacgagaagcaggagauccugggcaccgugagcuggaaccuccgggagaugcuggcgcacgccgaggagacgcgcaagcugaugcccgucugcguggagaccaaggccaucguguccaccauccagcggaaguacaagggcaucaagauccaggagggggucguggacuacggcgcccgcuucuacuucuacaccagcaagacgaccguggccucccugaucaacacccucaacgaccugaacgagacccuggucacgaugccgcucggguacgugacccacggccugaaccuggaggaggcggcccgguacaugcgcagccucaaggugcccgccaccgucuccgugagcucccccgacgccgugaccgccuacaacggguaccugacgagcuccagcaagacccccgaggagcacuucaucgagaccaucucccuggcgggcagcuacaaggacuggagcuacuccggccagagcacccagcucgggaucgaguuccugaagcggggcgacaaguccgucuacuacacgagcaacccgaccaccuuccaccuggacggggaggugaucaccuucuacaaccucaagacgcugcugucccuccgcgaggugcggaccaucaaggucuucaccaccguggacaacaucaaccugcacacgcagguggucgacaugagcaugaccuacggccagcaguucggccccaccuaccuggacggggccgacgugaccaagaucaagccccacaacucccacgagggcaagacguucuacgugcucccgaacgacgacacccugcgcgucgaggccuucgaguacuaccacaccaccgaccccagcuuccuggggcgguacauguccgcccucaaccacacgaagaaguggaaguacccccaggugaacggccugaccagcaucaagugggccgacaacaacugcuaccuggcgaccgcccuccugacccugcagcagaucgagcucaaguucaaccccccggcccugcaggacgccuacuaccgcgcgcgggccggggaggccgccaacuucugcgcccugauccucgcguacugcaacaagacggugggcgagcugggcgacguccgcgagaccauguccuaccuguuccagcacgccaaccucgacagcugcaagcgggugcugaacgucgugugcaagaccugcgggcagcagcagaccacccugaagggcguggaggccgucauguacauggggacgcucuccuacgagcaguucaagaagggcgugcagauccccugcaccugcgggaagcaggccaccaaguaccuggugcagcaggagagccccuucgucaugauguccgcccccccggcgcaguacgagcugaagcacggcaccuucacgugcgccagcgaguacaccggcaacuaccagugcgggcacuacaagcacaucaccuccaaggagacccucuacugcaucgacggcgcccugcugacgaagagcagcgaguacaaggggcccaucaccgacguguucuacaaggagaacuccuacaccaccacgaucaagcccgugaccuacaagcucgacggcgucgugugcaccgagaucgaccccaagcuggacaacuacuacaagaaggacaacagcuacuucaccgagcagccgaucgaccuggugcccaaccagcccuaccccaacgccuccuucgacaacuucaaguucgucugcgacaacaucaaguucgccgacgaccucaaccagcugacgggguacaagaagccggcgagccgcgagcugaaggugaccuucuuccccgaccucaacggcgacguggucgccaucgacuacaagcacuacacccccuccuucaagaagggcgccaagcugcugcacaagcccaucguguggcacgugaacaacgccaccaacaaggcgacguacaagccgaacaccuggugcauccggugccucuggagcaccaagcccgucgagaccuccaacagcuucgacgugcugaaguccgaggacgcccaggggauggacaaccuggccugcgaggaccucaagcccgugagcgaggaggucguggagaaccccacgauccagaaggacgugcuggagugcaacgucaagaccaccgagguggugggcgacaucauccugaagccggccaacaacucccucaagaucaccgaggaggucgggcacacggaccugauggccgcguacguggacaacagcucccugaccaucaagaagcccaacgagcucagccgcgugcugggccugaagacccucgccacccacgggcuggccgccgucaacuccgugcccugggacacgaucgccaacuacgcgaagccguuccugaacaagguggucagcaccaccaccaacaucgugacgcgcugccucaaccgggugugcaccaacuacaugcccuacuucuucacccugcugcuccagcugugcaccuucacccgcuccacgaacagccggaucaaggccuccaugcccaccaccaucgccaagaacaccgucaagagcgugggcaaguucugccuggaggccagcuucaacuaccucaagucccccaacuucagcaagcugaucaacaucaucaucugguuccugcuccuguccgugugccugggcagccucaucuacuccacggccgcgcuggggguccugaugagcaaccucggcaugccguccuacugcaccggguaccgcgagggcuaccugaacagcaccaacgugaccaucgccacguacugcaccggcuccauccccugcagcgugugccuguccgggcucgacagccuggacaccuaccccucccuggagaccauccagaucacgaucagcuccuucaagugggaccucaccgccuucggccuggucgccgagugguuccuggccuacauccucuucacccgguucuucuacgugcuggggcuggcggccaucaugcagcucuucuucagcuacuucgccgugcacuucaucuccaacagcuggcugauguggcugaucaucaaccugguccagauggcccccaucuccgcgauggugcgcauguacaucuucuucgccagcuucuacuacguguggaagagcuacguccacgugguggacggcugcaacuccagcaccugcaugaugugcuacaagcggaaccgcgccacgcgggucgagugcaccaccaucgugaacgggguccgccgguccuucuacguguacgccaacggcggcaagggguucugcaagcuccacaacuggaacugcgugaacugcgacaccuucugcgccggcagcacguucaucuccgacgaggucgcgcgcgaccugagccugcaguucaagcggccgaucaaccccaccgaccaguccagcuacaucguggacuccgugaccgucaagaacgggagcauccaccucuacuucgacaaggccggccagaagaccuacgagcgccacucccugagccacuucgugaaccuggacaaccuccgggccaacaacacgaaggggucccugcccaucaacgugaucgucuucgacggcaagagcaagugcgaggaguccagcgccaaguccgccagcguguacuacucccagcugaugugccagcccauccuccugcuggaccaggcgcucgugagcgacgucggcgacagcgccgagguggccgugaagauguucgacgccuacgucaacaccuucuccagcaccuucaacgugccgauggagaagcugaagacccugguggccacggcggaggccgagcucgccaagaacgucucccuggacaacgugcugagcaccuucaucuccgccgcgcgccagggguucguggacagcgacgucgagaccaaggacgugguggagugccucaagcugucccaccagagcgacaucgaggucaccggcgacuccugcaacaacuacaugcugacguacaacaagguggagaacaugaccccccgggaccucggggccugcaucgacugcagcgcccgccacaucaacgcccagguggccaagucccacaacaucgcgcugaucuggaacgucaaggacuucaugagccuguccgagcagcuccggaagcagauccgcagcgccgccaagaagaacaaccugcccuucaagcugaccugcgccaccacgcgccagguggugaacgucgugaccaccaagaucgcccucaagggcgggugaggacuaguuauaagacugacuagcccgaugggccucccaacgggcccuccuccccuccuugcaccgagauuaauaaaaaaaaaaaaaaaaaaaaaaaaaaaaaaaaaaaaaaaaaaaaaaaaaaaaaaaaaaaaaaaaugcaucccccccccccccccccccccccccccccccaaaggcucuuuucagagccaccagaauu

SEQ ID NO: 21624 - RNA, 6058 nt, Artificial Sequence
  SARS-CoV-2__MT811485.1__non-structural protein 3 (NSP3) mRNA gc
aggagaaagcuuaccauggcccccaccaaggugaccuucggcgacgacacggucaucgaggugcagggguacaagagcgugaacaucaccuucgagcuggacgagcgcaucgacaagguccucaacgagaagugcuccgccuacaccguggagcugggcaccgaggugaacgaguucgcgugcgucguggccgacgccgugaucaagacgcugcagccggucagcgagcuccugaccccccuggggaucgaccucgacgagugguccauggccaccuacuaccuguucgacgagagcggcgaguucaagcuggccucccacauguacugcagcuucuacccccccgacgaggacgaggaggagggggacugcgaggaggaggaguucgagccguccacccaguacgaguacggcacggaggacgacuaccagggcaagccccucgaguucggggcgaccagcgccgcccugcagcccgaggaggagcaggaggaggacuggcuggacgacgacucccagcagaccgugggccagcaggacgggagcgaggacaaccagaccacgaccauccagaccaucguggagguccagccccagcucgagauggagcugaccccgguggugcagacgaucgaggucaacuccuucagcggcuaccugaagcucaccgacaacguguacaucaagaacgccgacaucguggaggaggcgaagaaggucaagcccaccgugguggucaacgccgccaacguguaccugaagcacgggggcggcguggccggggcccugaacaaggcgaccaacaacgccaugcaggucgaguccgacgacuacaucgccacgaacggcccccucaagguggggggcagcugcguccuguccggccacaaccuggccaagcacugccuccacgugguggggcccaacgucaacaagggcgaggacauccagcugcugaagagcgccuacgagaacuucaaccagcacgaggugcuccuggcgccgcugcucuccgccgggaucuucggcgccgaccccauccacagccugcgggugugcgucgacaccgugcgcaccaacguguaccuggccgucuucgacaagaaccucuacgacaagcugguguccagcuuccuggagaugaagagcgagaagcagguggagcagaagaucgccgagauccccaaggaggaggucaagcccuucaucaccgaguccaagccgagcguggagcagcggaagcaggacgacaagaagaucaaggcgugcguggaggaggucacgaccacccucgaggagaccaaguuccugacggagaaccugcuccuguacaucgacaucaacgggaaccugcaccccgacuccgccacccucgugagcgacaucgacaucaccuuccugaagaaggacgcccccuacaucgugggcgacgucgugcaggagggcgugcugaccgccgucgugauccccacgaagaaggccgggggcaccaccgagaugcucgcgaaggcccugcgcaaggugccgaccgacaacuacaucacgaccuaccccgggcagggccugaacggguacaccgucgaggaggccaagaccgugcucaagaagugcaaguccgccuucuacauccugcccagcaucaucuccaacgagaagcaggagauccugggcaccgugagcuggaaccuccgggagaugcuggcgcacgccgaggagacgcgcaagcugaugcccgucugcguggagaccaaggccaucguguccaccauccagcggaaguacaagggcaucaagauccaggagggggucguggacuacggcgcccgcuucuacuucuacaccagcaagacgaccguggccucccugaucaacacccucaacgaccugaacgagacccuggucacgaugccgcucggguacgugacccacggccugaaccuggaggaggcggcccgguacaugcgcagccucaaggugcccgccaccgucuccgugagcucccccgacgccgugaccgccuacaacggguaccugacgagcuccagcaagacccccgaggagcacuucaucgagaccaucucccuggcgggcagcuacaaggacuggagcuacuccggccagagcacccagcucgggaucgaguuccugaagcggggcgacaaguccgucuacuacacgagcaacccgaccaccuuccaccuggacggggaggugaucaccuucgacaaccucaagacgcugcugucccuccgcgaggugcggaccaucaaggucuucaccaccguggacaacaucaaccugcacacgcagguggucgacaugagcaugaccuacggccagcaguucggccccaccuaccuggacggggccgacgugaccaagaucaagccccacaacucccacgagggcaagacguucuacgugcucccgaacgacgacacccugcgcgucgaggccuucgaguacuaccacaccaccgaccccagcuuccuggggcgguacauguccgcccucaaccacacgaagaaguggaaguacccccaggugaacggccugaccagcaucaagugggccgacaacaacugcuaccuggcgaccgcccuccugacccugcagcagaucgagcucaaguucaaccccccggcccugcaggacgccuacuaccgcgcgcgggccggggaggccgccaacuucugcgcccugauccucgcguacugcaacaagacggugggcgagcugggcgacguccgcgagaccauguccuaccuguuccagcacgccaaccucgacagcugcaagcgggugcugaacgucgugugcaagaccugcgggcagcagcagaccacccugaagggcguggaggccgucauguacauggggacgcucuccuacgagcaguucaagaagggcgugcagauccccugcaccugcgggaagcaggccaccaaguaccuggugcagcaggagagccccuucgucaugauguccgcccccccggcgcaguacgagcugaagcacggcaccuucacgugcgccagcgaguacaccggcaacuaccagugcgggcacuacaagcacaucaccuccaaggagacccucuacugcaucgacggcgcccugcugacgaagagcagcgaguacaaggggcccaucaccgacguguucuacaaggagaacuccuacaccaccacgaucaagcccgugaccuacaagcucgacggcgucgugugcaccgagaucgaccccaagcuggacaacuacuacaagaaggacaacagcuacuucaccgagcagccgaucgaccuggugcccaaccagcccuaccccaacgccuccuucgacaacuucaaguucgucugcgacaacaucaaguucgccgacgaccucaaccagcugacgggguacaagaagccggcgagccgcgagcugaaggugaccuucuuccccgaccucaacggcgacguggucgccaucgacuacaagcacuacacccccuccuucaagaagggcgccaagcugcugcacaagcccaucguguggcacgugaacaacgccaccaacaaggcgacguacaagccgaacaccuggugcauccggugccucuggagcaccaagcccgucgagaccuccaacagcuucgacgugcugaaguccgaggacgcccaggggauggacaaccuggccugcgaggaccucaagcccgugagcgaggaggucgugaagaaccccacgauccagaaggacgugcuggagugcaacgucaagaccaccgagguggugggcgacaucauccugaagccggccaacaacucccucaagaucaccgaggaggucgggcacacggaccugauggccgcguacguggacaacagcucccugaccaucaagaagcccaacgagcucagccgcgugcugggccugaagacccucgccacccacgggcuggccgccgucaacuccgugcccugggacacgaucgccaacuacgcgaagccguuccugaacaagguggucagcaccaccaccaacaucgugacgcgcugccucaaccgggugugcaccaacuacaugcccuacuucuucacccugcugcuccagcugugcaccuucacccgcuccacgaacagccggaucaaggccuccaugcccaccaccaucgccaagaacaccgucaagagcgugggcaaguucugccuggaggccagcuucaacuaccucaagucccccaacuucagcaagcugaucaacaucaucaucugguuccugcuccuguccgugugccugggcagccucaucuacuccacggccgcgcuggggguccugaugagcaaccucggcaugccguccuacugcaccggguaccgcgagggcuaccugaacagcaccaacgugaccaucgccacguacugcaccggcuccauccccugcagcgugugccuguccgggcucgacagccuggacaccuaccccucccuggagaccauccagaucacgaucagcuccuucaagugggaccucaccgccuucggccuggucgccgagugguuccuggccuacauccucuucacccgguucuucuacgugcuggggcuggcggccaucaugcagcucuucuucagcuacuucgccgugcacuucaucuccaacagcuggcugauguggcugaucaucaaccugguccagauggcccccaucuccgcgauggugcgcauguacaucuucuucgccagcuucuacuacguguggaagagcuacguccacgugguggacggcugcaacuccagcaccugcaugaugugcuacaagcggaaccgcgccacgcgggucgagugcaccaccaucgugaacgggguccgccgguccuucuacguguacgccaacggcggcaagggguucugcaagcuccacaacuggaacugcgugaacugcgacaccuucugcgccggcagcacguucaucuccgacgaggucgcgcgcgaccugagccugcaguucaagcggccgaucaaccccaccgaccaguccagcuacaucguggacuccgugaccgucaagaacgggagcauccaccucuacuucgacaaggccggccagaagaccuacgagcgccacucccugagccacuucgugaaccuggacaaccuccgggccaacaacacgaaggggucccugcccaucaacgugaucgucuucgacggcaagagcaagugcgaggaguccagcgccaaguccgccagcguguacuacucccagcugaugugccagcccauccuccugcuggaccaggcgcucgugagcgacgucggcgacagcgccgagguggccgugaagauguucgacgccuacgucaacaccuucuccagcaccuucaacgugccgauggagaagcugaagacccugguggccacggcggaggccgagcucgccaagaacgucucccuggacaacgugcugagcaccuucaucuccgccgcgcgccagggguucguggacagcgacgucgagaccaaggacgugguggagugccucaagcugucccaccagagcgacaucgaggucaccggcgacuccugcaacaacuacaugcugacguacaacaagguggagaacaugaccccccgggaccucggggccugcaucgacugcagcgcccgccacaucaacgcccagguggccaagucccacaacaucgcgcugaucuggaacgucaaggacuucaugagccuguccgagcagcuccggaagcagauccgcagcgccgccaagaagaacaaccugcccuucaagcugaccugcgccaccacgcgccagguggugaacgucgugaccaccaagaucgcccucaagggcgggugaggacuaguuauaagacugacuagcccgaugggccucccaacgggcccuccuccccuccuugcaccgagauuaauaaaaaaaaaaaaaaaaaaaaaaaaaaaaaaaaaaaaaaaaaaaaaaaaaaaaaaaaaaaaaaaaugcaucccccccccccccccccccccccccccccccaaaggcucuuuucagagccaccagaauu

SEQ ID NO: 21625 - RNA, 6058 nt, Artificial Sequence
  SARS-CoV-2__MT811487.1__non-structural protein 3 (NSP3) mRNA gc
aggagaaagcuuaccauggcccccaccaaggugaccuucggcgacgacacggucaucgaggugcagggguacaagagcgugaacaucaccuucgagcuggacgagcgcaucgacaagguccucaacgagaagugcuccgccuacaccguggagcugggcaccgaggugaacgaguucgcgugcgucguggccgacgccgugaucaagacgcugcagccggucagcgagcuccugaccccccuggggaucgaccucgacgagugguccauggccaccuacuaccuguucgacgagagcggcgaguucaagcuggccucccacauguacugcagcuucuacccccccgacgaggacgaggaggagggggacugcgaggaggaggaguucgagccguccacccaguacgaguacggcacggaggacgacuaccagggcaagcccagcgaguucggggcgaccuccgccgcccuccagcccgaggaggagcaggaggaggacuggcuggacgacgacagccagcagaccgugggccagcaggacggguccgaggacaaccagaccacgaccauccagaccaucguggagguccagccccagcuggagauggagcucaccccgguggugcagacgaucgaggucaacagcuucuccggcuaccugaagcugaccgacaacguguacaucaagaacgccgacaucguggaggaggcgaagaaggucaagcccaccgugguggucaacgccgccaacguguaccucaagcacgggggcggcguggccggggcccugaacaaggcgaccaacaacgccaugcaggucgagagcgacgacuacaucgccacgaacggcccccugaagguggggggcuccugcguccucagcggccacaaccuggccaagcacugccugcacgugguggggcccaacgucaacaagggcgaggacauccagcuccugaaguccgccuacgagaacuucaaccagcacgaggugcugcucgcgccgcugcugagcgccgggaucuucggcgccgaccccauccacucccuccgggugugcgucgacaccgugcgcaccaacguguaccuggccgucuucgacaagaaccuguacgacaagcucgugagcagcuuccuggagaugaaguccgagaagcagguggagcagaagaucgccgagauccccaaggaggaggucaagcccuucaucaccgagagcaagccguccguggagcagcggaagcaggacgacaagaagaucaaggcgugcguggaggaggucacgaccacccuggaggagaccaaguuccucacggagaaccugcugcucuacaucgacaucaacgggaaccugcaccccgacagcgccacccugguguccgacaucgacaucaccuuccucaagaaggacgcccccuacaucgugggcgacgucgugcaggagggcgugcugaccgccgucgugauccccacgaagaaggccgggggcaccaccgagaugcuggcgaaggcccuccgcaaggugccgaccgacaacuacaucacgaccuaccccgggcagggccugaacggguacaccgucgaggaggccaagaccgugcugaagaagugcaagagcgccuucuacauccuccccuccaucaucagcaacgagaagcaggagauccugggcaccguguccuggaaccugcgggagaugcucgcgcacgccgaggagacgcgcaagcugaugcccgucugcguggagaccaaggccaucgugagcaccauccagcggaaguacaagggcaucaagauccaggagggggucguggacuacggcgcccgcuucuacuucuacaccuccaagacgaccguggccagccugaucaacacccugaacgaccucaacgagacccuggucacgaugccgcugggguacgugacccacggccucaaccuggaggaggcggcccgguacaugcgcucccugaaggugcccgccaccgucagcguguccagccccgacgccgugaccgccuacaacggguaccucacguccagcuccaagacccccgaggagcacuucaucgagaccaucagccuggcgggcagcuacaaggacugguccuacagcggccaguccacccagcuggggaucgaguuccucaagcggggcgacaagagcgucuacuacacguccaacccgaccaccuuccaccuggacggggaggugaucaccuucgacaaccugaagacgcuccugagccugcgcgaggugcggaccaucaaggucuucaccaccguggacaacaucaaccuccacacgcagguggucgacauguccaugaccuacggccagcaguucggccccaccuaccuggacggggccgacgugaccaagaucaagccccacaacagccacgagggcaagacguucuacgugcugccgaacgacgacacccuccgcgucgaggccuucgaguacuaccacaccaccgaccccuccuuccuggggcgguacaugagcgcccugaaccacacgaagaaguggaaguacccccaggugaacggccucaccuccaucaagugggccgacaacaacugcuaccuggcgaccgcccugcucacccugcagcagaucgagcugaaguucaaccccccggcccuccaggacgccuacuaccgcgcgcgggccggggaggccgccaacuucugcgcccugauccuggcguacugcaacaagacggugggcgagcucggcgacguccgcgagaccaugagcuaccuguuccagcacgccaaccuggacuccugcaagcgggugcucaacgucgugugcaagaccugcgggcagcagcagaccacccugaagggcguggaggccgucauguacauggggacgcugagcuacgagcaguucaagaagggcgugcagauccccugcaccugcgggaagcaggccaccaaguaccucgugcagcaggagucccccuucgucaugaugagcgcccccccggcgcaguacgagcugaagcacggcaccuucacgugcgccuccgaguacaccggcaacuaccagugcgggcacuacaagcacaucaccagcaaggagacccuguacugcaucgacggcgcccuccugacgaagagcuccgaguacaaggggcccaucaccgacguguucuacaaggagaacagcuacaccaccacgaucaagcccgugaccuacaagcuggacggcgucgugugcaccgagaucgaccccaagcucgacaacuacuacaagaaggacaacuccuacuucaccgagcagccgaucgaccuggugcccaaccagcccuaccccaacgccagcuucgacaacuucaaguucgucugcgacaacaucaaguucgccgacgaccugaaccagcucacgggguacaagaagccggcgucccgcgagcugaaggugaccuucuuccccgaccugaacggcgacguggucgccaucgacuacaagcacuacacccccagcuucaagaagggcgccaagcuccugcacaagcccaucguguggcacgugaacaacgccaccaacaaggcgacguacaagccgaacaccuggugcauccggugccugugguccaccaagcccgucgagaccagcaacuccuucgacgugcucaagagcgaggacgcccaggggauggacaaccuggccugcgaggaccugaagcccguguccgaggaggucguggagaaccccacgauccagaaggacgugcucgagugcaacgucaagaccaccgagguggugggcgacaucauccugaagccggccaacaacagccugaagaucaccgaggaggucgggcacacggaccucauggccgcguacguggacaacuccagccugaccaucaagaagcccaacgagcugucccgcgugcucggccugaagacccuggccacccacgggcucgccgccgucaacagcgugcccugggacacgaucgccaacuacgcgaagccguuccugaacaagguggucuccaccaccaccaacaucgugacgcgcugccugaaccgggugugcaccaacuacaugcccuacuucuucacccuccugcugcagcucugcaccuucacccgcagcacgaacucccggaucaaggccagcaugcccaccaccaucgccaagaacaccgucaagagcgugggcaaguucugccuggaggccuccuucaacuaccugaagagccccaacuucuccaagcucaucaacaucaucaucugguuccugcugcucagcgugugccugggcucccugaucuacagcacggccgcgcucgggguccugauguccaaccugggcaugccgagcuacugcaccggguaccgcgagggcuaccucaacuccaccaacgugaccaucgccacguacugcaccggcagcauccccugcuccgugugccugagcgggcuggacucccucgacaccuaccccagccuggagaccauccagaucacgaucuccagcuucaagugggaccugaccgccuucggccucgucgccgagugguuccuggccuacauccuguucacccgguucuucuacgugcucgggcuggcggccaucaugcagcuguucuucuccuacuucgccgugcacuucaucagcaacuccuggcucauguggcugaucaucaaccugguccagauggcccccaucagcgcgauggugcgcauguacaucuucuucgccagcuucuacuacguguggaaguccuacguccacgugguggacggcugcaacagcuccaccugcaugaugugcuacaagcggaaccgcgccacgcgggucgagugcaccaccaucgugaacgggguccgccggagcuucuacguguacgccaacggcggcaagggguucugcaagcugcacaacuggaacugcgugaacugcgacaccuucugcgccggcuccacguucaucagcgacgaggucgcgcgcgaccucucccugcaguucaagcggccgaucaaccccaccgaccagagcuccuacaucguggacagcgugaccgucaagaacggguccauccaccuguacuucgacaaggccggccagaagaccuacgagcgccacagccucucccacuucgugaaccuggacaaccugcgggccaacaacacgaaggggagccuccccaucaacgugaucgucuucgacggcaaguccaagugcgaggagagcuccgccaagagcgccuccguguacuacagccagcugaugugccagcccauccugcuccuggaccaggcgcuggugagcgacgucggcgacuccgccgagguggccgugaagauguucgacgccuacgucaacaccuucagcuccaccuucaacgugccgauggagaagcucaagacccugguggccacggcggaggccgagcuggccaagaacgucagccucgacaacgugcuguccaccuucaucagcgccgcgcgccagggguucguggacuccgacgucgagaccaaggacgugguggagugccugaagcucagccaccaguccgacaucgaggucaccggcgacagcugcaacaacuacaugcugacguacaacaagguggagaacaugaccccccgggaccugggggccugcaucgacugcuccgcccgccacaucaacgcccagguggccaagagccacaacaucgcgcucaucuggaacgucaaggacuucaugucccugagcgagcagcugcggaagcagauccgcuccgccgccaagaagaacaaccuccccuucaagcugaccugcgccaccacgcgccagguggugaacgucgugaccaccaagaucgcccugaagggcgggugaggacuaguuauaagacugacuagcccgaugggccucccaacgggcccuccuccccuccuugcaccgagauuaauaaaaaaaaaaaaaaaaaaaaaaaaaaaaaaaaaaaaaaaaaaaaaaaaaaaaaaaaaaaaaaaaugcaucccccccccccccccccccccccccccccccaaaggcucuuuucagagccaccagaauu

SEQ ID NO: 21626 - RNA, 6058 nt, Artificial Sequence
  SARS-CoV-2__MT811489.1__non-structural protein 3 (NSP3) mRNA gc
aggagaaagcuuaccauggcccccaccaaggugaccuucggcgacgacacggucaucgaggugcagggguacaagagcgugaacaucaccuucgagcuggacgagcgcaucgacaagguccucaacgagaagugcuccgccuacaccguggagcugggcaccgaggugaacgaguucgcgugcgucguggccgacgccgugaucaagacgcugcagccggucagcgagcuccugaccccccuggggaucgaccucgacgagugguccauggccaccuacuaccuguucgacgagagcggcgaguucaagcuggccucccacauguacugcagcuucuacccccccgacgaggacgaggaggagggggacugcgaggaggaggaguucgagccguccacccaguacgaguacggcacggaggacgacuaccagggcaagccccucgaguucggggcgaccagcgccgcccugcagcccgaggaggagcaggaggaggacuggcuggacgacgacucccagcagaccgugggccagcaggacgggagcgaggacaaccagaccacgaccauccagaccaucguggagguccagccccagcucgagauggagcugaccccgguggugcagacgaucgaggucaacuccuucagcggcuaccugaagcucaccgacaacguguacaucaagaacgccgacaucguggaggaggcgaagaaggucaagcccaccgugguggucaacgccgccaacguguaccugaagcacgggggcggcguggccggggcccugaacaaggcgaccaacaacgccaugcaggucgaguccgacgacuacaucgccacgaacggcccccucaagguggggggcagcugcguccuguccggccacaaccuggccaagcacugccuccacgugguggggcccaacgucaacaagggcgaggacauccagcugcugaagagcgccuacgagaacuucaaccagcacgaggugcuccuggcgccgcugcucuccgccgggaucuucggcgccgaccccauccacagccugcgggugugcgucgacaccgugcgcaccaacguguaccuggccgucuucgacaagaaccucuacgacaagcugguguccagcuuccuggagaugaagagcgagaagcagguggagcagaagaucgccgagauccccaaggaggaggucaagcccuucaucaccgaguccaagccgagcguggagcagcggaagcaggacgacaagaagaucaaggcgugcguggaggaggucacgaccacccucgaggagaccaaguuccugacggagaaccugcuccuguacaucgacaucaacgggaaccugcaccccgacuccgccacccucgugagcgacaucgacaucaccuuccugaagaaggacgcccccuacaucgugggcgacgucgugcaggagggcgugcugaccgccgucgugauccccacgaagaaggccgggggcaccaccgagaugcucgcgaaggcccugcgcaaggugccgaccgacaacuacaucacgaccuaccccgggcagggccugaacggguacaccgucgaggaggccaagaccgugcucaagaagugcaaguccgccuucuacauccugcccagcaucaucuccaacgagaagcaggagauccugggcaccgugagcuggaaccuccgggagaugcuggcgcacgccgaggagacgcgcaagcugaugcccgucugcguggagaccaaggccaucguguccaccauccagcggaaguacaagggcaucaagauccaggagggggucguggacuacggcgcccgcuucuacuucuacaccagcaagacgaccguggccucccugaucaacacccucaacgaccugaacgagacccuggucacgaugccgcucggguacgugacccacggccugaaccuggaggaggcggcccgguacaugcgcagccucaaggugcccgccaccgucuccgugagcucccccgacgccgugaccgccuacaacggguaccugacgagcuccagcaagacccccgaggagcacuucaucgagaccaucucccuggcgggcagcuacaaggacuggagcuacuccggccagagcacccagcucgggaucgaguuccugaagcggggcgacaaguccgucuacuacacgagcaacccgaccaccuuccaccuggacggggaggugaucaccuucgacaaccucaagacgcugcugucccuccgcgaggugcggaccaucaaggucuucaccaccguggacaacaucaaccugcacacgcagguggucgacaugagcaugaccuacggccagcaguucggccccaccuaccuggacggggccgacgugaccaagaucaagccccacaacucccacgagggcaagacguucuacgugcucccgaacgacgacacccugcgcgucgaggccuucgaguacuaccacaccaccgaccccagcuuccuggggcgguacauguccgcccucaaccacacgaagaaguggaaguacccccaggugaacggccugaccagcaucaagugggccgacaacaacugcuaccuggcgaccgcccuccugacccugcagcagaucgagcucaaguucaaccccccggcccugcaggacgccuacuaccgcgcgcgggccggggaggccgccaacuucugcgcccugauccucgcguacugcaacaagacggugggcgagcugggcgacguccgcgagaccauguccuaccuguuccagcacgccaaccucgacagcugcaagcgggugcugaacgucgugugcaagaccugcgggcagcagcagaccacccugaagggcguggaggccgucauguacauggggacgcucuccuacgagcaguucaagaagggcgugcagauccccugcaccugcgggaagcaggccaccaaguaccuggugcagcaggagagccccuucgucaugauguccgcccccccggcgcaguacgagcugaagcacggcaccuucacgugcgccagcgaguacaccggcaacuaccagugcgggcacuacaagcacaucaccuccaaggagacccucuacugcaucgacggcgcccugcugacgaagagcagcgaguacaaggggcccaucaccgacguguucuacaaggagaacuccuacaccaccacgaucaagcccgugaccuacaagcucgacggcgucgugugcaccgagaucgaccccaagcuggacaacuacuacaagaaggacaacagcuacuucaccgagcagccgaucgaccuggugcccaaccagcccuaccccaacgccuccuucgacaacuucaaguucgucugcgacaacaucaaguucgccgacgaccucaaccagcugacgggguacaagaagccggcgagccgcgagcugaaggugaccuucuuccccgaccucaacggcgacguggucgccaucgacuacaagcacuacacccccuccuucaagaagggcgccaagcugcugcacaagcccaucguguggcacgugaacaacgccaccaacaaggcgacguacaagccgaacaccuggugcauccggugccucuggagcaccaagcccgucgagaccuccaacagcuucgacgugcugaaguccgagggggcccagggcauggacaaccuggccugcgaggaccucaagcccgugagcgaggaggucguggagaaccccacgauccagaaggacgugcuggagugcaacgucaagaccaccgagguggugggggacaucauccugaagccggccaacaacucccucaagaucaccgaggaggucggccacacggaccugauggccgcguacguggacaacagcucccugaccaucaagaagcccaacgagcucagccgcgugcuggggcugaagacccucgccacccacggccuggccgccgucaacuccgugcccugggacacgaucgccaacuacgcgaagccguuccugaacaagguggucagcaccaccaccaacaucgugacgcgcugccucaaccgggugugcaccaacuacaugcccuacuucuucacccugcugcuccagcugugcaccuucacccgcuccacgaacagccggaucaaggccuccaugcccaccaccaucgccaagaacaccgucaagagcgugggcaaguucugccuggaggccagcuucaacuaccucaagucccccaacuucagcaagcugaucaacaucaucaucugguuccugcuccuguccgugugccuggggagccucaucuacuccacggccgcgcugggcguccugaugagcaaccucgggaugccguccuacugcaccggcuaccgcgagggcuaccugaacagcaccaacgugaccaucgccacguacugcaccggguccauccccugcagcgugugccuguccggccucgacagccuggacaccuaccccucccuggagaccauccagaucacgaucagcuccuucaagugggaccucaccgccuucgggcuggucgccgagugguuccuggccuacauccucuucacccgguucuucuacgugcugggccuggcggccaucaugcagcucuucuucagcuacuucgccgugcacuucaucuccaacagcuggcugauguggcugaucaucaaccugguccagauggcccccaucuccgcgauggugcgcauguacaucuucuucgccagcuucuacuacguguggaagagcuacguccacgugguggacgggugcaacuccagcaccugcaugaugugcuacaagcggaaccgcgccacgcgggucgagugcaccaccaucgugaacggcguccgccgguccuucuacguguacgccaacggcgggaagggcuucugcaagcuccacaacuggaacugcgugaacugcgacaccuucugcgccgggagcacguucaucuccgacgaggucgcgcgcgaccugagccugcaguucaagcggccgaucaaccccaccgaccaguccagcuacaucguggacuccgugaccgucaagaacggcagcauccaccucuacuucgacaaggccgggcagaagaccuacgagcgccacucccugagccacuucgugaaccuggacaaccuccgggccaacaacacgaagggcucccugcccaucaacgugaucgucuucgacggcaagagcaagugcgaggaguccagcgccaaguccgccagcguguacuacucccagcugaugugccagcccauccuccugcuggaccaggcgcucgugagcgacgucggggacagcgccgagguggccgugaagauguucgacgccuacgucaacaccuucuccagcaccuucaacgugccgauggagaagcugaagacccugguggccacggcggaggccgagcucgccaagaacgucucccuggacaacgugcugagcaccuucaucuccgccgcgcgccagggcuucguggacagcgacgucgagaccaaggacgugguggagugccucaagcugucccaccagagcgacaucgaggucaccggggacuccugcaacaacuacaugcugacguacaacaagguggagaacaugaccccccgggaccucggcgccugcaucgacugcagcgcccgccacaucaacgcccagguggccaagucccacaacaucgcgcugaucuggaacgucaaggacuucaugagccuguccgagcagcuccggaagcagauccgcagcgccgccaagaagaacaaccugcccuucaagcugaccugcgccaccacgcgccagguggugaacgucgugaccaccaagaucgcccucaaggggggcugaggacuaguuauaagacugacuagcccgaugggccucccaacgggcccuccuccccuccuugcaccgagauuaauaaaaaaaaaaaaaaaaaaaaaaaaaaaaaaaaaaaaaaaaaaaaaaaaaaaaaaaaaaaaaaaaugcaucccccccccccccccccccccccccccccccaaaggcucuuuucagagccaccagaauu

SEQ ID NO: 21627 - RNA, 6058 nt, Artificial Sequence
  SARS-CoV-2__MT811494.1__non-structural protein 3 (NSP3) mRNA gc
aggagaaagcuuaccauggcccccaccaaggugaccuucggcgacgacacggucaucgaggugcagggguacaagagcgugaacaucaccuucgagcuggacgagcgcaucgacaagguccucaacgagaagugcuccgccuacaccguggagcugggcaccgaggugaacgaguucgcgugcgucguggccgacgccgugaucaagacgcugcagccggucagcgagcuccugaccccccuggggaucgaccucgacgagugguccauggccaccuacuaccuguucgacgagagcggcgaguucaagcuggccucccacauguacugcagcuucuacccccccgacgaggacgaggaggagggggacugcgaggaggaggaguucgagccguccacccaguacgaguacggcacggaggacgacuaccagggcaagccccucgaguucggggcgaccagcgccgcccugcagcccgaggaggagcaggaggaggacuggcuggacgacgacucccagcagaccgugggccagcaggacgggagcgaggacaaccagaccacgaccauccagaccaucguggagguccagccccagcucgagauggagcugaccccgguggugcagacgaucgaggucaacuccuucagcggcuaccugaagcucaccgacaacguguacaucaagaacgccgacaucguggaggaggcgaagaaggucaagcccaccgugguggucaacgccgccaacguguaccugaagcacgggggcggcguggccggggcccugaacaaggcgaccaacaacgccaugcaggucgaguccgacgacuacaucgccacgaacggcccccucaagguggggggcagcugcguccuguccggccacaaccuggccaagcacugccuccacgugguggggcccaacgucaacaagggcgaggacauccagcugcugaagagcgccuacgagaacuucaaccagcacgaggugcuccuggcgccgcugcucuccgccgggaucuucggcgccgaccccauccacagccugcgggugugcgucgacaccgugcgcaccaacguguaccuggccgucuucgacaagaaccucuacgacaagcugguguccagcuuccuggagaugaagagcgagaagcagguggagcagaagaucgccgagauccccaaggaggaggucaagcccuucaucaccgaguccaagccgagcguggagcagcggaagcaggacgacaagaagaucaaggcgugcuucgaggaggugacgaccacccucgaggagaccaaguuccugacggagaaccugcuccuguacaucgacaucaacgggaaccugcaccccgacuccgccacccucgucagcgacaucgacaucaccuuccugaagaaggacgcccccuacaucgugggcgacgugguccaggagggcgugcugaccgccguggucauccccacgaagaaggccgggggcaccaccgagaugcucgcgaaggcccugcgcaaggugccgaccgacaacuacaucacgaccuaccccgggcagggccugaacggguacaccguggaggaggccaagaccguccucaagaagugcaaguccgccuucuacauccugcccagcaucaucuccaacgagaagcaggagauccugggcaccgugagcuggaaccuccgggagaugcuggcgcacgccgaggagacgcgcaagcugaugcccgugugcgucgagaccaaggccaucguguccaccauccagcggaaguacaagggcaucaagauccaggaggggguggucgacuacggcgcccgcuucuacuucuacaccagcaagacgaccguggccucccugaucaacacccucaacgaccugaacgagacccuggugacgaugccgcucggguacgucacccacggccugaaccuggaggaggcggcccgguacaugcgcagccucaaggugcccgccaccguguccgucagcucccccgacgccgugaccgccuacaacggguaccugacgagcuccagcaagacccccgaggagcacuucaucgagaccaucucccuggcgggcagcuacaaggacuggagcuacuccggccagagcacccagcucgggaucgaguuccugaagcggggcgacaaguccguguacuacacgagcaacccgaccaccuuccaccuggacggggaggucaucaccuucgacaaccucaagacgcugcugucccuccgcgaggugcggaccaucaagguguucaccaccgucgacaacaucaaccugcacacgcaggugguggacaugagcaugaccuacggccagcaguucggccccaccuaccuggacggggccgacgucaccaagaucaagccccacaacucccacgagggcaagacguucuacgugcucccgaacgacgacacccugcgcguggaggccuucgaguacuaccacaccaccgaccccagcuuccuggggcgguacauguccgcccucaaccacacgaagaaguggaaguacccccaggucaacggccugaccagcaucaagugggccgacaacaacugcuaccuggcgaccgcccuccugacccugcagcagaucgagcucaaguucaaccccccggcccugcaggacgccuacuaccgcgcgcgggccggggaggccgccaacuucugcgcccugauccucgcguacugcaacaagacggugggcgagcugggcgacgugcgcgagaccauguccuaccuguuccagcacgccaaccucgacagcugcaagcggguccugaacguggucugcaagaccugcgggcagcagcagaccacccugaagggcguggaggccgugauguacauggggacgcucuccuacgagcaguucaagaagggcguccagauccccugcaccugcgggaagcaggccaccaaguaccuggugcagcaggagagccccuucgugaugauguccgcccccccggcgcaguacgagcugaagcacggcaccuucacgugcgccagcgaguacaccggcaacuaccagugcgggcacuacaagcacaucaccuccaaggagacccucuacugcaucgacggcgcccugcugacgaagagcagcgaguacaaggggcccaucaccgacgucuucuacaaggagaacuccuacaccaccacgaucaagcccgugaccuacaagcucgacggcguggucugcaccgagaucgaccccaagcuggacaacuacuacaagaaggacaacagcuacuucaccgagcagccgaucgaccuggugcccaaccagcccuaccccaacgccuccuucgacaacuucaaguucgugugcgacaacaucaaguucgccgacgaccucaaccagcugacgggguacaagaagccggcgagccgcgagcugaaggucaccuucuuccccgaccucaacggcgacgugguggccaucgacuacaagcacuacacccccuccuucaagaagggcgccaagcugcugcacaagcccaucgucuggcacgugaacaacgccaccaacaaggcgacguacaagccgaacaccuggugcauccggugccucuggagcaccaagcccguggagaccuccaacagcuucgacguccugaaguccgaggacgcccaggggauggacaaccuggccugcgaggaccucaagcccgugagcgaggagguggucgagaaccccacgauccagaaggacgugcuggagugcaacgugaagaccaccgaggucgugggcgacaucauccugaagccggccaacaacucccucaagaucaccgaggagguggggcacacggaccugauggccgcguacgucgacaacagcucccugaccaucaagaagcccaacgagcucagccgcgugcugggccugaagacccucgccacccacgggcuggccgccgugaacuccguccccugggacacgaucgccaacuacgcgaagccguuccugaacaagguggugagcaccaccaccaacaucgucacgcgcugccucaaccgggugugcaccaacuacaugcccuacuucuucacccugcugcuccagcugugcaccuucacccgcuccacgaacagccggaucaaggccuccaugcccaccaccaucgccaagaacaccgugaagagcgucggcaaguucugccuggaggccagcuucaacuaccucaagucccccaacuucagcaagcugaucaacaucaucaucugguuccugcuccuguccgugugccugggcagccucaucuacuccacggccgcgcugggggugcugaugagcaaccucggcaugccguccuacugcaccggguaccgcgagggcuaccugaacagcaccaacgucaccaucgccacguacugcaccggcuccauccccugcagcgugugccuguccgggcucgacagccuggacaccuaccccucccuggagaccauccagaucacgaucagcuccuucaagugggaccucaccgccuucggccugguggccgagugguuccuggccuacauccucuucacccgguucuucuacguccuggggcuggcggccaucaugcagcucuucuucagcuacuucgccgugcacuucaucuccaacagcuggcugauguggcugaucaucaaccuggugcagauggcccccaucuccgcgaugguccgcauguacaucuucuucgccagcuucuacuacguguggaagagcuacgugcacgucguggacggcugcaacuccagcaccugcaugaugugcuacaagcggaaccgcgccacgcggguggagugcaccaccaucgucaacggggugcgccgguccuucuacgucuacgccaacggcggcaagggguucugcaagcuccacaacuggaacugcgugaacugcgacaccuucugcgccggcagcacguucaucuccgacgagguggcgcgcgaccugagccugcaguucaagcggccgaucaaccccaccgaccaguccagcuacaucgucgacuccgugaccgugaagaacgggagcauccaccucuacuucgacaaggccggccagaagaccuacgagcgccacucccugagccacuucgucaaccuggacaaccuccgggccaacaacacgaaggggucccugcccaucaacgugaucguguucgacggcaagagcaagugcgaggaguccagcgccaaguccgccagcgucuacuacucccagcugaugugccagcccauccuccugcuggaccaggcgcucgugagcgacgugggcgacagcgccgaggucgccgugaagauguucgacgccuacgugaacaccuucuccagcaccuucaacgucccgauggagaagcugaagacccugguggccacggcggaggccgagcucgccaagaacgugucccuggacaacguccugagcaccuucaucuccgccgcgcgccagggguucguggacagcgacguggagaccaaggacgucguggagugccucaagcugucccaccagagcgacaucgaggugaccggcgacuccugcaacaacuacaugcugacguacaacaaggucgagaacaugaccccccgggaccucggggccugcaucgacugcagcgcccgccacaucaacgcccagguggccaagucccacaacaucgcgcugaucuggaacgugaaggacuucaugagccuguccgagcagcuccggaagcagauccgcagcgccgccaagaagaacaaccugcccuucaagcugaccugcgccaccacgcgccaggucgugaacguggucaccaccaagaucgcccucaagggcgggugaggacuaguuauaagacugacuagcccgaugggccucccaacgggcccuccuccccuccuugcaccgagauuaauaaaaaaaaaaaaaaaaaaaaaaaaaaaaaaaaaaaaaaaaaaaaaaaaaaaaaaaaaaaaaaaaugcaucccccccccccccccccccccccccccccccaaaggcucuuuucagagccaccagaauu

SEQ ID NO: 21628 - RNA, 6058 nt, Artificial Sequence
  SARS-CoV-2__MT811496.1__non-structural protein 3 (NSP3) mRNA gc
aggagaaagcuuaccauggcccccaccaaggugaccuucggcgacgacacggucaucgaggugcagggguacaagagcgugaacaucaccuucgagcuggacgagcgcaucgacaagguccucaacgagaagugcuccgccuacaccguggagcugggcaccgaggugaacgaguucgcgugcgucguggccgacgccgugaucaagacguuccagccggucagcgagcugcucaccccccuggggaucgaccuggacgagugguccauggccaccuacuaccucuucgacgagagcggcgaguucaagcuggccucccacauguacugcagcuucuacccccccgacgaggacgaggaggagggggacugcgaggaggaggaguucgagccguccacccaguacgaguacggcacggaggacgacuaccagggcaagccccuggaguucggggcgaccagcgccgcccuccagcccgaggaggagcaggaggaggacuggcuggacgacgacucccagcagaccgugggccagcaggacgggagcgaggacaaccagaccacgaccauccagaccaucguggagguccagccccagcuggagauggagcucaccccgguggugcagacgaucgaggucaacuccuucagcggcuaccugaagcugaccgacaacguguacaucaagaacgccgacaucguggaggaggcgaagaaggucaagcccaccgugguggucaacgccgccaacguguaccucaagcacgggggcggcguggccggggcccugaacaaggcgaccaacaacgccaugcaggucgaguccgacgacuacaucgccacgaacggcccccugaagguggggggcagcugcguccucuccggccacaaccuggccaagcacugccugcacgugguggggcccaacgucaacaagggcgaggacauccagcuccugaagagcgccuacgagaacuucaaccagcacgaggugcugcucgcgccgcugcuguccgccgggaucuucggcgccgaccccauccacagccuccgggugugcgucgacaccgugcgcaccaacguguaccuggccgucuucgacaagaaccuguacgacaagcucguguccagcuuccuggagaugaagagcgagaagcagguggagcagaagaucgccgagauccccaaggaggaggucaagcccuucaucaccgaguccaagccgagcguggagcagcggaagcaggacgacaagaagaucaaggcgugcguggaggaggucacgaccacccuggaggagaccaaguuccucacggagaaccugcugcucuacaucgacaucaacgggaaccugcaccccgacuccgccacccuggugagcgacaucgacaucaccuuccucaagaaggacgcccccuacaucgugggcgacgucgugcaggagggcgugcugaccgccgucgugauccccacgaagaaggccgggggcaccaccgagaugcuggcgaaggcccuccgcaaggugccgaccgacaacuacaucacgaccuaccccgggcagggccugaacggguacaccgucgaggaggccaagaccgugcugaagaagugcaaguccgccuucuacauccuccccagcaucaucuccaacgagaagcaggagauccugggcaccgugagcuggaaccugcgggagaugcucgcgcacgccgaggagacgcgcaagcugaugcccgucugcguggagaccaaggccaucguguccaccauccagcggaaguacaagggcaucaagauccaggagggggucguggacuacggcgcccgcuucuacuucuacaccagcaagacgaccguggccucccugaucaacacccugaacgaccucaacgagacccuggucacgaugccgcugggguacgugacccacggccucaaccuggaggaggcggcccgguacaugcgcagccugaaggugcccgccaccgucuccgugagcucccccgacgccgugaccgccuacaacggguaccucacgagcuccagcaagacccccgaggagcacuucaucgagaccaucucccuggcgggcagcuacaaggacuggagcuacuccggccagagcacccagcuggggaucgaguuccucaagcggggcgacaaguccgucuacuacacgagcaacccgaccaccuuccaccuggacggggaggugaucaccuucgacaaccugaagacgcuccugucccugcgcgaggugcggaccaucaaggucuucaccaccguggacaacaucaaccuccacacgcagguggucgacaugagcaugaccuacggccagcaguucggccccaccuaccuggacggggccgacgugaccaagaucaagccccacaacucccacgagggcaagacguucuacgugcugccgaacgacgacacccuccgcgucgaggccuucgaguacuaccacaccaccgaccccagcuuccuggggcgguacauguccgcccugaaccacacgaagaaguggaaguacccccaggugaacggccucaccagcaucaagugggccgacaacaacugcuaccuggcgaccgcccugcucacccugcagcagaucgagcugaaguucaaccccccggcccuccaggacgccuacuaccgcgcgcgggccggggaggccgccaacuucugcgcccugauccuggcguacugcaacaagacggugggcgagcucggcgacguccgcgagaccauguccuaccuguuccagcacgccaaccuggacagcugcaagcgggugcucaacgucgugugcaagaccugcgggcagcagcagaccacccugaagggcguggaggccgucauguacauggggacgcuguccuacgagcaguucaagaagggcgugcagauccccugcaccugcgggaagcaggccaccaaguaccucgugcagcaggagagccccuucgucaugauguccgcccccccggcgcaguacgagcugaagcacggcaccuucacgugcgccagcgaguacaccggcaacuaccagugcgggcacuacaagcacaucaccuccaaggagacccuguacugcaucgacggcgcccuccugacgaagagcagcgaguacaaggggcccaucaccgacguguucuacaaggagaacuccuacaccaccacgaucaagcccgugaccuacaagcuggacggcgucgugugcaccgagaucgaccccaagcucgacaacuacuacaagaaggacaacagcuacuucaccgagcagccgaucgaccuggugcccaaccagcccuaccccaacgccuccuucgacaacuucaaguucgucugcgacaacaucaaguucgccgacgaccugaaccagcucacgggguacaagaagccggcgagccgcgagcugaaggugaccuucuuccccgaccugaacggcgacguggucgccaucgacuacaagcacuacacccccuccuucaagaagggcgccaagcuccugcacaagcccaucguguggcacgugaacaacgccaccaacaaggcgacguacaagccgaacaccuggugcauccggugccuguggagcaccaagcccgucgagaccuccaacagcuucgacgugcucaaguccgaggacgcccaggggauggacaaccuggccugcgaggaccugaagcccgugagcgaggaggucguggagaaccccacgauccagaaggacgugcucgagugcaacgucaagaccaccgagguggugggcgacaucauccugaagccggccaacaacucccugaagaucaccgaggaggucgggcacacggaccucauggccgcguacguggacaacagcucccugaccaucaagaagcccaacgagcugagccgcgugcucggccugaagacccuggccacccacgggcucgccgccgucaacuccgugcccugggacacgaucgccaacuacgcgaagccguuccugaacaagguggucagcaccaccaccaacaucgugacgcgcugccugaaccgggugugcaccaacuacaugcccuacuucuucacccuccugcugcagcucugcaccuucacccgcuccacgaacagccggaucaaggccuccaugcccaccaccaucgccaagaacaccgucaagagcgugggcaaguucugccuggaggccagcuucaacuaccugaagucccccaacuucagcaagcucaucaacaucaucaucugguuccugcugcucuccgugugccugggcagccugaucuacuccacggccgcgcucgggguccugaugagcaaccugggcaugccguccuacugcaccggguaccgcgagggcuaccucaacagcaccaacgugaccaucgccacguacugcaccggcuccauccccugcagcgugugccuguccgggcuggacagccucgacaccuaccccucccuggagaccauccagaucacgaucagcuccuucaagugggaccugaccgccuucggccucgucgccgagugguuccuggccuacauccuguucacccgguucuucuacgugcucgggcuggcggccaucaugcagcuguucuucagcuacuucgccgugcacuucaucuccaacagcuggcucauguggcugaucaucaaccugguccagauggcccccaucuccgcgauggugcgcauguacaucuucuucgccagcuucuacuacguguggaagagcuacguccacgugguggacggcugcaacuccagcaccugcaugaugugcuacaagcggaaccgcgccacgcgggucgagugcaccaccaucgugaacgggguccgccgguccuucuacguguacgccaacggcggcaagggguucugcaagcugcacaacuggaacugcgugaacugcgacaccuucugcgccggcagcacguucaucuccgacgaggucgcgcgcgaccucagccugcaguucaagcggccgaucaaccccaccgaccaguccagcuacaucguggacuccgugaccgucaagaacgggagcauccaccuguacuucgacaaggccggccagaagaccuacgagcgccacucccucagccacuucgugaaccuggacaaccugcgggccaacaacacgaaggggucccuccccaucaacgugaucgucuucgacggcaagagcaagugcgaggaguccagcgccaaguccgccagcguguacuacucccagcugaugugccagcccauccugcuccuggaccaggcgcuggugagcgacgucggcgacagcgccgagguggccgugaagauguucgacgccuacgucaacaccuucuccagcaccuucaacgugccgauggagaagcucaagacccugguggccacggcggaggccgagcuggccaagaacgucucccucgacaacgugcugagcaccuucaucuccgccgcgcgccagggguucguggacagcgacgucgagaccaaggacgugguggagugccugaagcucucccaccagagcgacaucgaggucaccggcgacuccugcaacaacuacaugcugacguacaacaagguggagaacaugaccccccgggaccugggggccugcaucgacugcagcgcccgccacaucaacgcccagguggccaagucccacaacaucgcgcucaucuggaacgucaaggacuucaugagccuguccgagcagcugcggaagcagauccgcagcgccgccaagaagaacaaccuccccuucaagcugaccugcgccaccacgcgccagguggugaacgucgugaccaccaagaucgcccugaagggcgggugaggacuaguuauaagacugacuagcccgaugggccucccaacgggcccuccuccccuccuugcaccgagauuaauaaaaaaaaaaaaaaaaaaaaaaaaaaaaaaaaaaaaaaaaaaaaaaaaaaaaaaaaaaaaaaaaugcaucccccccccccccccccccccccccccccccaaaggcucuuuucagagccaccagaauu

SEQ ID NO: 21629 - RNA, 6058 nt, Artificial Sequence
  SARS-CoV-2__MT811506.1__non-structural protein 3 (NSP3) mRNA gc
aggagaaagcuuaccauggcccccaccaaggugaccuucggcgacgacacggucaucgaggugcagggguacaagagcgugaacaucaccuucgagcuggacgagcgcaucgacaagguccucaacgagaagugcuccgccuacaccguggagcugggcaccgaggugaacgaguucgcgugcgucguggccgacgccgugaucaagacgcugcagccggucagcgagcuccugaccccccuggggaucgaccucgacgagugguccauggccaccuacuaccuguucgacgagagcggcgaguucaagcuggccucccacauguacugcagcuucuacccccccgacgaggacgaggaggagggggacugcgaggaggaggaguucgagccguccacccaguacgaguacggcacggaggacgacuaccagggcaagccccucgaguucggggcgaccagcgccgcccugcagcccgaggaggagcaggaggaggacuggcuggacgacgacucccagcagaccgugggccagcaggacgggagcgaggacaaccagaccacgaccauccagaccaucguggagguccagccccagcucgagauggagcugaccccgguggugcagacgaucgaggucaacuccuucagcggcuaccugaagcucaccgacaacguguacaucaagaacgccgacaucguggaggaggcgaagaaggucaagcccaccgugguggucaacgccgccaacguguaccugaagcacgggggcggcguggccggggcccugaacaaggcgaccaacaacgccaugcaggucgaguccgacgacuacaucgccacgaacggcccccucaagguggggggcagcugcguccuguccggccacaaccuggccaagcacugccuccacgugguggggcccaacgucaacaagggcgaggacauccagcugcugaagagcgccuacgagaacuucaaccagcacgaggugcuccuggcgccgcugcucuccgccgggaucuucggcgccgaccccauccacagccugcgggugugcgucgacaccgugcgcaccaacguguaccuggccgucuucgacaagaaccucuacgacaagcugguguccagcuuccuggagaugaagagcgagaagcagguggagcagaagaucgccgagauccccaaggaggaggucaagcccuucaucaccgaguccaagccgagcguggagcagcggaagcaggacgacaagaagaucaaggcgugcguggaggaggucacgaccacccucgaggagaccaaguuccugacggagaaccugcuccuguacaucgacaucaacgggaaccugcaccccgacuccgccacccucgugagcgacaucgacaucaccuuccugaagaaggacgcccccuacaucgugggcgacgucgugcaggagggcgugcugaccgccgucgugauccccacgaagaaggccgggggcaccaccgagaugcucgcgaaggcccugcgcaaggugccgaccgacaacuacaucacgaccuaccccgggcagggccugaacggguacaccgucgaggaggccaagaccgugcucaagaagugcaaguccgccuucuacauccugcccagcaucaucuccaacgagaagcaggagauccugggcaccgugagcuggaaccuccgggagaugcuggcgcacgccgaggagacgcgcaagcugaugcccgucugcguggagaccaaggccaucguguccaccauccagcggaaguacaagggcaucaagauccaggagggggucguggacuacggcgcccgcuucuacuucuacaccagcaagacgaccguggccucccugaucaacacccucaacgaccugaacgagacccuggucacgaugccgcucggguacgugacccacggccugaaccuggaggaggcggcccgguacaugcgcagccucaaggugcccgccaccgucuccgugagcucccccgacgccgugaccgccuacaacggguaccugacgagcuccagcaagacccccgaggagcacuucaucgagaccaucucccuggcgggcagcuacaaggacuggagcuacuccggccagagcacccagcucgggaucgaguuccugaagcggggcgacaaguccgucuacuacacgagcaacccgaccaccuuccaccuggacggggaggugaucaccuucgacaaccucaagacgcugcugucccuccgcgaggugcggaccaucaaggucuucaccaccguggacaacaucaaccugcacacgcagguggucgacaugagcaugaccuacggccagcaguucggccccaccuaccuggacggggccgacgugaccaagaucaagccccacaacucccacgagggcaagacguucuacgugcucccgaacgacgacacccugcgcgucgaggccuucgaguacuaccacaccaccgaccccagcuuccuggggcgguacauguccgcccucaaccacacgaagaaguggaaguacccccaggugaacggccugaccagcaucaagugggccgacaacaacugcuaccuggcgaccgcccuccugacccugcagcagaucgagcucaaguucaaccccccggcccugcaggacgccuacuaccgcgcgcgggccggggaggccgccaacuucugcgcccugauccucgcguacugcaacaagacggugggcgagcugggcgacguccgcgagaccauguccuaccuguuccagcacgccaaccucgacagcugcaagcgggugcugaacgucgugugcaagaccugcgggcagcagcagaccacccugaagggcguggaggccgucauguacauggggacgcucuccuacgagcaguucaagaagggcgugcagauccccugcaccugcgggaagcaggccaccaaguaccuggugcagcaggagagccccuucgucaugauguccgcccccccggcgcaguacgagcugaagcacggcaccuucacgugcgccagcgaguacaccggcaacuaccagugcgggcacuacaagcacaucaccuccaaggagacccucuacugcaucgacggcgcccugcugacgaagagcagcgaguacaaggggcccaucaccgacguguucuacaaggagaacuccuacaccaccacgaucaagcccgugaccuacaagcucgacggcgucgugugcaccgagaucgaccccaagcuggacaacuacuacaagaaggacaacagcuacuucaccgagcagccgaucgaccuggugcccaaccagcccuaccccaacgccuccuucgacaacuucaaguucgucugcgacaacaucaaguucgccgacgaccucaaccagcugacgggguacaagaagccggcgagccgcgagcugaaggugaccuucuuccccgaccucaacggcgacguggucgccaucgacuacaagcacuacacccccuccuucaagaagggcgccaagcugcugcacaagcccaucguguggcacgugaacaacgccaccaacaaggcgacguacaagccgaacaccuggugcauccggugccucuggagcaccaagcccgucgagaccuccaacagcuucgacgugcugaaguccgaggacgcccaggggauggacaaccuggccugcgaggaccucaagcccgugagcgaggaggucguggagaaccccacgauccagaaggacgugcuggagugcaacgucaagaccaccgagguggugggcgacaucauccugaagccggccaacaacucccucaagaucaccgaggaggucgggcacacggaccugauggccgcguacguggacaacagcucccugaccaucaagaagcccaacgagcucagccgcgugcugggccugaagacccucgucacccacgggcuggccgccgugaacuccgugcccugggacacgaucgccaacuacgccaagccguuccugaacaaggucgugagcaccaccaccaacaucgugacgcgcugccucaaccgggucugcaccaacuacaugcccuacuucuucacccugcugcuccagcugugcaccuucacccgcuccacgaacagccggaucaaggcguccaugcccaccaccaucgccaagaacaccgugaagagcgugggcaaguucugccuggaggccagcuucaacuaccucaagucccccaacuucagcaagcugaucaacaucaucaucugguuccugcuccuguccgucugccugggcagccucaucuacuccacggccgcccugggggugcugaugagcaaccucggcaugccguccuacugcaccggguaccgcgagggcuaccugaacagcaccaacgugaccaucgcgacguacugcaccggcuccauccccugcagcgucugccuguccgggcucgacagccuggacaccuaccccucccuggagaccauccagaucacgaucagcuccuucaagugggaccucaccgccuucggccugguggccgagugguuccuggccuacauccucuucacccgguucuucuacgugcuggggcuggccgcgaucaugcagcucuucuucagcuacuucgccguccacuucaucuccaacagcuggcugauguggcugaucaucaaccuggugcagauggcccccaucuccgccauggugcgcauguacaucuucuucgcgagcuucuacuacgucuggaagagcuacgugcacguggucgacggcugcaacuccagcaccugcaugaugugcuacaagcggaaccgcgccacgcggguggagugcaccaccaucgucaacggggugcgccgguccuucuacguguacgccaacggcggcaagggguucugcaagcuccacaacuggaacugcgucaacugcgacaccuucugcgccggcagcacguucaucuccgacgagguggcccgcgaccugagccugcaguucaagcggccgaucaaccccaccgaccaguccagcuacaucguggacuccgucaccgugaagaacgggagcauccaccucuacuucgacaaggcgggccagaagaccuacgagcgccacucccugagccacuucgugaaccuggacaaccuccgggccaacaacacgaaggggucccugcccaucaacgucaucguguucgacggcaagagcaagugcgaggaguccagcgccaaguccgccagcguguacuacucccagcugaugugccagcccauccuccugcuggaccaggcccucgucagcgacgugggcgacagcgcggagguggccgucaagauguucgacgccuacgugaacaccuucuccagcaccuucaacgugccgauggagaagcugaagacccuggucgccacggccgaggcggagcucgccaagaacgugucccuggacaacgugcugagcaccuucaucuccgccgcccgccagggguucgucgacagcgacguggagaccaaggacguggucgagugccucaagcugucccaccagagcgacaucgaggugaccggcgacuccugcaacaacuacaugcugacguacaacaagguggagaacaugaccccccgggaccucggggcgugcaucgacugcagcgcccgccacaucaacgcccaggucgccaagucccacaacaucgcccugaucuggaacgugaaggacuucaugagccuguccgagcagcuccggaagcagauccgcagcgcggccaagaagaacaaccugcccuucaagcugaccugcgccaccacgcgccagguggucaacguggugaccaccaagaucgcccucaagggcgggugaggacuaguuauaagacugacuagcccgaugggccucccaacgggcccuccuccccuccuugcaccgagauuaauaaaaaaaaaaaaaaaaaaaaaaaaaaaaaaaaaaaaaaaaaaaaaaaaaaaaaaaaaaaaaaaaugcaucccccccccccccccccccccccccccccccaaaggcucuuuucagagccaccagaauu

SEQ ID NO: 21630 - RNA, 6058 nt, Artificial Sequence
  SARS-CoV-2__MT811507.1__non-structural protein 3 (NSP3) mRNA gc
aggagaaagcuuaccauggcccccaccaaggugaccuucggcgacgacacggucaucgaggugcagggguacaagagcgugaacaucaccuucgagcuggacgagcgcaucgacaagguccucaacgagaagugcuccgccuacaccguggagcugggcaccgaggugaacgaguucgcgugcgucguggccgacgccgugaucaagacgcugcagccggucagcgagcuccugaccccccuggggaucgaccucgacgagugguccauggccaccuacuaccuguucgacgagagcggcgaguucaagcuggccucccacauguacugcagcuucuacccccccgacgaggacgaggaggagggggacugcgaggaggaggaguucgagccguccacccaguacgaguacggcacggaggacgacuaccagggcaagccccucgaguucggggcgaccagcgccgcccugcagcccgaggaggagcaggaggaggacuggcuggacgacgacucccagcagaccgugggccagcaggacgggagcgaggacaaccagaccacgaccauccagaccaucguggagguccagccccagcucgagauggagcugaccccgguggugcagacgaucgaggucaacuccuucagcggcuaccugaagcucaccgacaacguguacaucaagaacgccgacaucguggaggaggcgaagaaggucaagcccaccgugguggucaacgccgccaacguguaccugaagcacgggggcggcguggccggggcccugaacaaggcgaccaacaacgccaugcaggucgaguccgacgacuacaucgccacgaacggcccccucaagguggggggcagcugcguccuguccggccacaaccuggccaagcacugccuccacgugguggggcccaacgucaacaagggcgaggacauccagcugcugaagagcgccuacgagaacuucaaccagcacgaggugcuccuggcgccgcugcucuccgccgggaucuucggcgccgaccccauccacagccugcgggugugcgucgacaccgugcgcaccaacguguaccuggccgucuucgacaagaaccucuacgacaagcugguguccagcuuccuggagaugaagagcgagaagcagguggagcagaagaucgccgagauccccaaggaggaggucaagcccuucaucaccgaguccaagccgagcguggagcagcggaagcaggacgacaagaagaucaaggcgugcguggaggaggucacgaucacccucgaggagaccaaguuccugaccgagaaccugcuccuguacaucgacaucaacgggaaccugcaccccgacuccgccacgcucgugagcgacaucgacaucaccuuccugaagaaggacgcccccuacaucgugggcgacgucgugcaggagggcgugcugaccgccgucgugauccccaccaagaaggccgggggcacgaccgagaugcucgcgaaggcccugcgcaaggugccgaccgacaacuacaucaccacguaccccgggcagggccugaacggguacaccgucgaggaggccaagaccgugcucaagaagugcaaguccgccuucuacauccugcccagcaucaucuccaacgagaagcaggagauccugggcaccgugagcuggaaccuccgggagaugcuggcgcacgccgaggagacccgcaagcugaugcccgucugcguggagacgaaggccaucguguccaccauccagcggaaguacaagggcaucaagauccaggagggggucguggacuacggcgcccgcuucuacuucuacaccagcaagaccacgguggccucccugaucaacacccucaacgaccugaacgagacccuggucaccaugccgcucggguacgugacgcacggccugaaccuggaggaggcggcccgguacaugcgcagccucaaggugcccgccaccgucuccgugagcucccccgacgccgugaccgccuacaacggguaccugaccagcuccagcaagacgcccgaggagcacuucaucgagaccaucucccuggcgggcagcuacaaggacuggagcuacuccggccagagcacccagcucgggaucgaguuccugaagcggggcgacaaguccgucuacuacaccagcaacccgacgaccuuccaccuggacggggaggugaucaccuucgacaaccucaagacccugcugucccuccgcgaggugcggacgaucaaggucuucaccaccguggacaacaucaaccugcacacccagguggucgacaugagcaugacguacggccagcaguucggccccaccuaccuggacggggccgacgugaccaagaucaagccccacaacucccacgagggcaagaccuucuacgugcucccgaacgacgacacgcugcgcgucgaggccuucgaguacuaccacaccaccgaccccagcuuccuggggcgguacauguccgcccucaaccacaccaagaaguggaaguacccccaggugaacggccugacgagcaucaagugggccgacaacaacugcuaccuggcgaccgcccuccugacccugcagcagaucgagcucaaguucaaccccccggcccugcaggacgccuacuaccgcgcgcgggccggggaggccgccaacuucugcgcccugauccucgcguacugcaacaagaccgugggcgagcugggcgacguccgcgagacgauguccuaccuguuccagcacgccaaccucgacagcugcaagcgggugcugaacgucgugugcaagaccugcgggcagcagcagaccacccugaagggcguggaggccgucauguacauggggacccucuccuacgagcaguucaagaagggcgugcagauccccugcacgugcgggaagcaggccaccaaguaccuggugcagcaggagagccccuucgucaugauguccgcccccccggcgcaguacgagcugaagcacggcaccuucaccugcgccagcgaguacacgggcaacuaccagugcgggcacuacaagcacaucaccuccaaggagacccucuacugcaucgacggcgcccugcugaccaagagcagcgaguacaaggggcccaucacggacguguucuacaaggagaacuccuacaccaccaccaucaagcccgugacguacaagcucgacggcgucgugugcaccgagaucgaccccaagcuggacaacuacuacaagaaggacaacagcuacuucaccgagcagccgaucgaccuggugcccaaccagcccuaccccaacgccuccuucgacaacuucaaguucgucugcgacaacaucaaguucgccgacgaccucaaccagcugaccggguacaagaagccggcgagccgcgagcugaaggugacguucuuccccgaccucaacggcgacguggucgccaucgacuacaagcacuacacccccuccuucaagaagggcgccaagcugcugcacaagcccaucguguggcacgugaacaacgccaccaacaaggcgaccuacaagccgaacacguggugcauccggugccucuggagcaccaagcccgucgagaccuccaacagcuucgacgugcugaaguccgaggacgcccaggggauggacaaccuggccugcgaggaccucaagcccgugagcgaggaggucguggagaaccccaccauccagaaggacgugcuggagugcaacgucaagacgaccgagguggugggcgacaucauccugaagccggccaacaacucccucaagaucaccgaggaggucgggcacaccgaccugauggccgcguacguggacaacagcucccugacgaucaagaagcccaacgagcucagccgcgugcugggccugaagacccucgccacccacgggcuggccgccgucaacuccgugcccugggacaccaucgccaacuacgcgaagccguuccugaacaagguggucagcacgaccaccaacaucgugacccgcugccucaaccgggugugcacgaacuacaugcccuacuucuucacccugcugcuccagcugugcaccuucacccgcuccaccaacagccggaucaaggccuccaugcccacgaccaucgccaagaacaccgucaagagcgugggcaaguucugccuggaggccagcuucaacuaccucaagucccccaacuucagcaagcugaucaacaucaucaucugguuccugcuccuguccgugugccugggcagccucaucuacuccaccgccgcgcuggggguccugaugagcaaccucggcaugccguccuacugcacgggguaccgcgagggcuaccugaacagcaccaacgugaccaucgccaccuacugcacgggcuccauccccugcagcgugugccuguccgggcucgacagccuggacaccuaccccucccuggagaccauccagaucaccaucagcuccuucaagugggaccucacggccuucggccuggucgccgagugguuccuggccuacauccucuucacccgguucuucuacgugcuggggcuggcggccaucaugcagcucuucuucagcuacuucgccgugcacuucaucuccaacagcuggcugauguggcugaucaucaaccugguccagauggcccccaucuccgcgauggugcgcauguacaucuucuucgccagcuucuacuacguguggaagagcuacguccacgugguggacggcugcaacuccagcaccugcaugaugugcuacaagcggaaccgcgccacccgggucgagugcacgaccaucgugaacgggguccgccgguccuucuacguguacgccaacggcggcaagggguucugcaagcuccacaacuggaacugcgugaacugcgacaccuucugcgccggcagcaccuucaucuccgacgaggucgcgcgcgaccugagccugcaguucaagcggccgaucaaccccacggaccaguccagcuacaucguggacuccgugaccgucaagaacgggagcauccaccucuacuucgacaaggccggccagaagaccuacgagcgccacucccugagccacuucgugaaccuggacaaccuccgggccaacaacaccaaggggucccugcccaucaacgugaucgucuucgacggcaagagcaagugcgaggaguccagcgccaaguccgccagcguguacuacucccagcugaugugccagcccauccuccugcuggaccaggcgcucgugagcgacgucggcgacagcgccgagguggccgugaagauguucgacgccuacgucaacacguucuccagcaccuucaacgugccgauggagaagcugaagacccugguggccaccgcggaggccgagcucgccaagaacgucucccuggacaacgugcugagcacguucaucuccgccgcgcgccagggguucguggacagcgacgucgagaccaaggacgugguggagugccucaagcugucccaccagagcgacaucgaggucaccggcgacuccugcaacaacuacaugcugaccuacaacaagguggagaacaugacgccccgggaccucggggccugcaucgacugcagcgcccgccacaucaacgcccagguggccaagucccacaacaucgcgcugaucuggaacgucaaggacuucaugagccuguccgagcagcuccggaagcagauccgcagcgccgccaagaagaacaaccugcccuucaagcugaccugcgccaccacccgccagguggugaacgucgugacgaccaagaucgcccucaagggcgggugaggacuaguuauaagacugacuagcccgaugggccucccaacgggcccuccuccccuccuugcaccgagauuaauaaaaaaaaaaaaaaaaaaaaaaaaaaaaaaaaaaaaaaaaaaaaaaaaaaaaaaaaaaaaaaaaugcaucccccccccccccccccccccccccccccccaaaggcucuuuucagagccaccagaauu

SEQ ID NO: 21631 - RNA, 6058 nt, Artificial Sequence
  SARS-CoV-2__MT811514.1__non-structural protein 3 (NSP3) mRNA gc
aggagaaagcuuaccauggcccccaccaaggugaccuucggcgacgacacggucaucgaggugcagggguacaagagcgugaacaucaccuucgagcuggacgagcgcaucgacaagguccucaacgagaagugcuccgccuacaccguggagcugggcaccgaggugaacgaguucgcgugcgucguggccgacgccgugaucaagacgcugcagccggucagcgagcuccugaccccccuggggaucgaccucgacgagugguccauggccaccuacuaccuguucgacgagagcggcgaguucaagcuggccucccacauguacugcagcuucuacccccccgacgaggacgaggaggagggggacugcgaggaggaggaguucgagccguccacccaguacgaguacggcacggaggacgacuaccagggcaagccccucgaguucggggcgaccagcgccgcccugcagcccgaggaggagcaggaggaggacuggcuggacgacgacucccagcagaccgugggccagcaggacgggagcgaggacaaccagaccacgaccauccagaccaucguggagguccagccccagcucgagauggagcugaccccgguggugcagacgaucgaggucaacuccuucagcggcuaccugaagcucaccgacaacguguacaucaagaacgccgacaucguggaggaggcgaagaaggucaagcccaccgugguggucaacgccgccaacguguaccugaagcacgggggcggcguggccggggcccugaacaaggcgaccaacaacgccaugcaggucgaguccgacgacuacaucgccacgaacggcccccucaagguggggggcagcugcguccuguccggccacaaccuggccaagcacugccuccacgugguggggcccaacgucaacaagggcgaggacauccagcugcugaagagcgccuacgagaacuucaaccagcacgaggugcuccuggcgccgcugcucuccgccgggaucuucggcgccgaccccauccacagccugcgggugugcgucgacaccgugcgcaccaacguguaccuggccgucuucgacaagaaccucuacgacaagcugguguccagcuuccuggagaugaagagcgagaagcagguggagcagaagaucgccgagauccccaaggaggaggucaagcccuucaucaccgaguccaagccgagcguggagcagcggaagcaggacgacaagaagaucaaggcgugcguggaggaggucacgaccacccucgaggagaccaaguuccugacggagaaccugcuccuguacaucgacaucaacgggaaccugcaccccgacuccgccacccucgugagcgacaucgacaucaccuuccugaagaaggacgcccccuacaucgugggcgacgucgugcaggagggcgugcugaccgccgucgugauccccacgaagaaggccgggggcaccaccgagaugcucgcgaaggcccugcgcaaggugccgaccgacaacuacaucacgaccuaccccgggcagggccugaacggguacaccgucgaggaggccaagaccgugcucaagaagugcaaguccgccuucuacauccugcccagcaucaucuccaacgagaagcaggagauccugggcaccgugagcuggaaccuccgggagaugcuggcgcacgccgaggagacgcgcaagcugaugcccgucugcguggagaccaaggccaucguguccaccauccagcggaaguacaagggcaucaagauccaggagggggucguggacuacggcgcccgcuucuacuucuacaccagcaagacgaccguggccucccugaucaacacccucaacgaccugaacgagacccuggucacgaugccgcucggguacgugacccacggccugaaccuggaggaggcggcccgguacaugcgcagccucaaggugcccgccaccgucuccgugagcucccccgacgccgugaccgccuacaacggguaccugacgagcuccagcaagacccccgaggagcacuucaucgagaccaucucccuggcgggcagcuacaaggacuggagcuacuccggccagagcacccagcucgggaucgaguuccugaagcggggcgacaaguccgucuacuacacgagcaacccgaccaccuuccaccuggacggggaggugaucaccuucgacaaccucaagacgcugcugucccuccgcgaggugcggaccaucaaggucuucaccaccguggacaacaucaaccugcacacgcagguggucgacaugagcaugaccuacggccagcaguucggccccaccuaccuggacggggccgacgugaccaagaucaagccccacaacucccacgagggcaagacguucuacgugcucccgaacgacgacacccugcgcgucgaggccuucgaguacuaccacaccaccgaccccagcuuccuggggcgguacauguccgcccucaaccacacgaagaaguggaaguacccccaggugaacggccugaccagcaucaagugggccgacaacaacugcuaccuggcgaccgcccuccugacccugcagcagaucgagcucaaguucaaccccccggcccugcaggacgccuacuaccgcgcgcgggccggggaggccgccaacuucugcgcccugauccucgcguacugcaacaagacggugggcgagcugggcgacguccgcgagaccauguccuaccuguuccagcacgccaaccucgacagcugcaagcgggugcugaacgucgugugcaagaccugcgggcagcagcagaccacccugaagggcguggaggccgucauguacauggggacgcucuccuacgagcaguucaagaagggcgugcagauccccugcaccugcgggaagcaggccaccaaguaccuggugcagcaggagagccccuucgucaugauguccgcccccccggcgcacuacgagcugaagcacggcaccuucacgugcgccagcgaguacaccggcaacuaccagugcgggcacuacaagcacaucaccuccaaggagacccucuacugcaucgacggcgcccugcugacgaagagcagcgaguacaaggggcccaucaccgacguguucuacaaggagaacuccuacaccaccacgaucaagcccgugaccuacaagcucgacggcgucgugugcaccgagaucgaccccaagcuggacaacuacuacaagaaggacaacagcuacuucaccgagcagccgaucgaccuggugcccaaccagcccuaccccaacgccuccuucgacaacuucaaguucgucugcgacaacaucaaguucgccgacgaccucaaccagcugacgggguacaagaagccggcgagccgcgagcugaaggugaccuucuuccccgaccucaacggcgacguggucgccaucgacuacaagcacuacacccccuccuucaagaagggcgccaagcugcugcacaagcccaucguguggcacgugaacaacgccaccaacaaggcgacguacaagccgaacaccuggugcauccggugccucuggagcaccaagcccgucgagaccuccaacagcuucgacgugcugaaguccgaggacgcccaggggauggacaaccuggccugcgaggaccucaagcccgugagcgaggaggucguggagaaccccacgauccagaaggacgugcuggagugcaacgucaagaccaccgagguggugggcgacaucauccugaagccggccaacaacucccucaagaucaccgaggaggucgggcacacggaccugauggccgcguacguggacaacagcucccugaccaucaagaagcccaacgagcucagccgcgugcugggccugaagacccucgccacccacgggcuggccgccgucaacuccgugcccugggacacgaucgccaacuacgcgaagccguuccugaacaagguggucagcaccaccaccaacaucgugacgcgcugccucaaccgggugugcaccaacuacaugcccuacuucuucacccugcugcuccagcugugcaccuucacccgcuccacgaacagccggaucaaggccuccaugcccaccaccaucgccaagaacaccgucaagagcgugggcaaguucugccuggaggccagcuucaacuaccucaagucccccaacuucagcaagcugaucaacaucaucaucugguuccugcuccuguccgugugccugggcagccucaucuacuccacggccgcgcuggggguccugaugagcaaccucggcaugccguccuacugcaccggguaccgcgagggcuaccugaacagcaccaacgugaccaucgccacguacugcaccggcuccauccccugcagcgugugccuguccgggcucgacagccuggacaccuaccccucccuggagaccauccagaucacgaucagcuccuucaagugggaccucaccgccuucggccuggucgccgagugguuccuggccuacauccucuucacccgguucuucuacgugcuggggcuggcggccaucaugcagcucuucuucagcuacuucgccgugcacuucaucuccaacagcuggcugauguggcugaucaucaaccugguccagauggcccccaucuccgcgauggugcgcauguacaucuucuucgccagcuucuacuacguguggaagagcuacguccacgugguggacggcugcaacuccagcaccugcaugaugugcuacaagcggaaccgcgccacgcgggucgagugcaccaccaucgugaacgggguccgccgguccuucuacguguacgccaacggcggcaagggguucugcaagcuccacaacuggaacugcgugaacugcgacaccuucugcgccggcagcacguucaucuccgacgaggucgcgcgcgaccugagccugcaguucaagcggccgaucaaccccaccgaccaguccagcuacaucguggacuccgugaccgucaagaacgggagcauccaccucuacuucgacaaggccggccagaagaccuacgagcgccacucccugagccacuucgugaaccuggacaaccuccgggccaacaacacgaaggggucccugcccaucaacgugaucgucuucgacggcaagagcaagugcgaggaguccagcgccaaguccgccagcguguacuacucccagcugaugugccagcccauccuccugcuggaccaggcgcucgugagcgacgucggcgacagcgccgagguggccgugaagauguucgacgccuacgucaacaccuucuccagcaccuucaacgugccgauggagaagcugaagacccugguggccacggcggaggccgagcucgccaagaacgucucccuggacaacgugcugagcaccuucaucuccgccgcgcgccagggguucguggacagcgacgucgagaccaaggacgugguggagugccucaagcugucccaccagagcgacaucgaggucaccggcgacuccugcaacaacuacaugcugacguacaacaagguggagaacaugaccccccgggaccucggggccugcaucgacugcagcgcccgccacaucaacgcccagguggccaagucccacaacaucgcgcugaucuggaacgucaaggacuucaugagccuguccgagcagcuccggaagcagauccgcagcgccgccaagaagaacaaccugcccuucaagcugaccugcgccaccacgcgccagguggugaacgucgugaccaccaagaucgcccucaagggcgggugaggacuaguuauaagacugacuagcccgaugggccucccaacgggcccuccuccccuccuugcaccgagauuaauaaaaaaaaaaaaaaaaaaaaaaaaaaaaaaaaaaaaaaaaaaaaaaaaaaaaaaaaaaaaaaaaugcaucccccccccccccccccccccccccccccccaaaggcucuuuucagagccaccagaauu

SEQ ID NO: 21632 - RNA, 6058 nt, Artificial Sequence
  SARS-CoV-2__MT811515.1__non-structural protein 3 (NSP3) mRNA gc
aggagaaagcuuaccauggcccccaccaaggugaccuucggcgacgacacggucaucgaggugcagggguacaagagcgugaacaucaccuucgagcuggacgagcgcaucgacaagguccucaacgagaagugcuccgccuacaccguggagcugggcaccgaggugaacgaguucgcgugcgucguggccgacgccgugaucaagacgcugcagccggucagcgagcuccugaccccccuggacaucgaccucgacgagugguccauggccaccuacuaccuguucgacgagagcggggaguucaagcuggccucccacauguacugcagcuucuacccccccgacgaggacgaggaggagggcgacugcgaggaggaggaguucgagccguccacccaguacgaguacgggacggaggacgacuaccagggcaagccccucgaguucggcgcgaccagcgccgcccugcagcccgaggaggagcaggaggaggacuggcuggacgacgacucccagcagaccguggggcagcaggacggcagcgaggacaaccagaccacgaccauccagaccaucguggagguccagccccagcucgagauggagcugaccccgguggugcagacgaucgaggucaacuccuucagcggguaccugaagcucaccgacaacguguacaucaagaacgccgacaucguggaggaggcgaagaaggucaagcccaccgugguggucaacgccgccaacguguaccugaagcacggcgggggcguggccggcgcccugaacaaggcgaccaacaacgccaugcaggucgaguccgacgacuacaucgccacgaacgggccccucaaggugggcgggagcugcguccuguccggccacaaccuggccaagcacugccuccacguggugggccccaacgucaacaagggggaggacauccagcugcugaagagcgccuacgagaacuucaaccagcacgaggugcuccuggcgccgcugcucuccgccggcaucuucggggccgaccccauccacagccugcgggugugcgucgacaccgugcgcaccaacguguaccuggccgucuucgacaagaaccucuacgacaagcugguguccagcuuccuggagaugaagagcgagaagcagguggagcagaagaucgccgagauccccaaggaggaggucaagcccuucaucaccgaguccaagccgagcguggagcagcggaagcaggacgacaagaagaucaaggcgugcguggaggaggucacgaccacccucgaggagaccaaguuccugacggagaaccugcuccuguacaucgacaucaacggcaaccugcaccccgacuccgccacccucgugagcgacaucgacaucaccuuccugaagaaggacgcccccuacaucgugggggacgucgugcaggagggcgugcugaccgccgucgugauccccacgaagaaggccggcgggaccaccgagaugcucgcgaaggcccugcgcaaggugccgaccgacaacuacaucacgaccuaccccggccaggggcugaacggcuacaccgucgaggaggccaagaccgugcucaagaagugcaaguccgccuucuacauccugcccagcaucaucuccaacgagaagcaggagauccuggggaccgugagcuggaaccuccgggagaugcuggcgcacgccgaggagacgcgcaagcugaugcccgucugcguggagaccaaggccaucguguccaccauccagcggaaguacaagggcaucaagauccaggagggcgucguggacuacggggcccgcuucuacuucuacaccagcaagacgaccguggccucccugaucaacacccucaacgaccugaacgagacccuggucacgaugccgcucggcuacgugacccacgggcugaaccuggaggaggcggcccgguacaugcgcagccucaaggugcccgccaccgucuccgugagcucccccgacgccgugaccgccuacaacggcuaccugacgagcuccagcaagacccccgaggagcacuucaucgagaccaucucccuggcggggagcuacaaggacuggagcuacuccggccagagcacccagcucggcaucgaguuccugaagcggggggacaaguccgucuacuacacgagcaacccgaccaccuuccaccuggacggcgaggugaucaccuucgacaaccucaagacgcugcugucccuccgcgaggugcggaccaucaaggucuucaccaccguggacaacaucaaccugcacacgcagguggucgacaugagcaugaccuacgggcagcaguucggccccaccuaccuggacggcgccgacgugaccaagaucaagccccacaacucccacgaggggaagacguucuacgugcucccgaacgacgacacccugcgcgucgaggccuucgaguacuaccacaccaccgaccccagcuuccugggccgguacauguccgcccucaaccacacgaagaaguggaaguacccccaggugaacgggcugaccagcaucaagugggccgacaacaacugcuaccuggcgaccgcccuccugacccugcagcagaucgagcucaaguucaaccccccggcccugcaggacgccuacuaccgcgcgcgggccggcgaggccgccaacuucugcgcccugauccucgcguacugcaacaagacggugggggagcugggcgacguccgcgagaccauguccuaccuguuccagcacgccaaccucgacagcugcaagcgggugcugaacgucgugugcaagaccugcggccagcagcagaccacccugaaggggguggaggccgucauguacaugggcacgcucuccuacgagcaguucaagaagggggugcagauccccugcaccugcggcaagcaggccaccaaguaccuggugcagcaggagagccccuucgucaugauguccgcccccccggcgcaguacgagcugaagcacgggaccuucacgugcgccagcgaguacaccggcaacuaccagugcggccacuacaagcacaucaccuccaaggagacccucuacugcaucgacggggcccugcugacgaagagcagcgaguacaagggccccaucaccgacguguucuacaaggagaacuccuacaccaccacgaucaagcccgugaccuacaagcucgacggggucgugugcaccgagaucgaccccaagcuggacaacuacuacaagaaggacaacagcuacuucaccgagcagccgaucgaccuggugcccaaccagcccuaccccaacgccuccuucgacaacuucaaguucgucugcgacaacaucaaguucgccgacgaccucaaccagcugacgggcuacaagaagccggcgagccgcgagcugaaggugaccuucuuccccgaccucaacggggacguggucgccaucgacuacaagcacuacacccccuccuucaagaagggcgccaagcugcugcacaagcccaucguguggcacgugaacaacgccaccaacaaggcgacguacaagccgaacaccuggugcauccggugccucuggagcaccaagcccgucgagaccuccaacagcuucgacgugcugaaguccgaggacgcccagggcauggacaaccuggccugcgaggaccucaagcccgugagcgaggaggucguggagaaccccacgauccagaaggacgugcuggagugcaacgucaagaccaccgagguggugggggacaucauccugaagccggccaacaacucccucaagaucaccgaggaggucggccacacggaccugauggccgcguacguggacaacagcucccugaccaucaagaagcccaacgagcucagccgcgugcuggggcugaagacccucgccacccacggccuggccgccgucaacuccgugcccugggacacgaucgccaacuacgcgaagccguuccugaacaagguggucagcaccaccaccaacaucgugacgcgcugccucaaccgggugugcaccaacuacaugcccuacuucuucacccugcugcuccagcugugcaccuucacccgcuccacgaacagccggaucaaggccuccaugcccaccaccaucgccaagaacaccgucaagagcguggggaaguucugccuggaggccagcuucaacuaccucaagucccccaacuucagcaagcugaucaacaucaucaucugguuccugcuccuguccgugugccugggcagccucaucuacuccacggccgcgcugggcguccugaugagcaaccucgggaugccguccuacugcaccggcuaccgcgagggguaccugaacagcaccaacgugaccaucgccacguacugcaccggcuccauccccugcagcgugugccuguccggccucgacagccuggacaccuaccccucccuggagaccauccagaucacgaucagcuccuucaagugggaccucaccgccuucgggcuggucgccgagugguuccuggccuacauccucuucacccgguucuucuacgugcugggccuggcggccaucaugcagcucuucuucagcuacuucgccgugcacuucaucuccaacagcuggcugauguggcugaucaucaaccugguccagauggcccccaucuccgcgauggugcgcauguacaucuucuucgccagcuucuacuacguguggaagagcuacguccacgugguggacgggugcaacuccagcaccugcaugaugugcuacaagcggaaccgcgccacgcgggucgagugcaccaccaucgugaacggcguccgccgguccuucuacguguacgccaacgggggcaagggcuucugcaagcuccacaacuggaacugcgugaacugcgacaccuucugcgccgggagcacguucaucuccgacgaggucgcgcgcgaccugagccugcaguucaagcggccgaucaaccccaccgaccaguccagcuacaucguggacuccgugaccgucaagaacggcagcauccaccucuacuucgacaaggccgggcagaagaccuacgagcgccacucccugagccacuucgugaaccuggacaaccuccgggccaacaacacgaagggcucccugcccaucaacgugaucgucuucgacgggaagagcaagugcgaggaguccagcgccaaguccgccagcguguacuacucccagcugaugugccagcccauccuccugcuggaccaggcgcucgugagcgacgucggcgacagcgccgagguggccgugaagauguucgacgccuacgucaacaccuucuccagcaccuucaacgugccgauggagaagcugaagacccugguggccacggcggaggccgagcucgccaagaacgucucccuggacaacgugcugagcaccuucaucuccgccgcgcgccagggcuucguggacagcgacgucgagaccaaggacgugguggagugccucaagcugucccaccagagcgacaucgaggucaccggggacuccugcaacaacuacaugcugacguacaacaagguggagaacaugaccccccgggaccucggcgccugcaucgacugcagcgcccgccacaucaacgcccagguggccaagucccacaacaucgcgcugaucuggaacgucaaggacuucaugagccuguccgagcagcuccggaagcagauccgcagcgccgccaagaagaacaaccugcccuucaagcugaccugcgccaccacgcgccagguggugaacgucgugaccaccaagaucgcccucaaggggggcugaggacuaguuauaagacugacuagcccgaugggccucccaacgggcccuccuccccuccuugcaccgagauuaauaaaaaaaaaaaaaaaaaaaaaaaaaaaaaaaaaaaaaaaaaaaaaaaaaaaaaaaaaaaaaaaaugcaucccccccccccccccccccccccccccccccaaaggcucuuuucagagccaccagaauu

SEQ ID NO: 21633 - RNA, 6058 nt, Artificial Sequence
  SARS-CoV-2__MT811519.1__non-structural protein 3 (NSP3) mRNA gc
aggagaaagcuuaccauggcccccaccaaggugaccuucggcgacgacacggucaucgaggugcagggguacaagagcgugaacaucaccuucgagcuggacgagcgcaucgacaagguccucaacgagaagugcuccgccuacaccguggagcugggcaccgaggugaacgaguucgcgugcgucguggccgacgccgugaucaagacgcugcagccggucagcgagcuccugaccccccuggggaucgaccucgacgagugguccauggccaccuacuaccuguucgacgagagcggcgaguucaagcuggccucccacauguacugcuucuucuacccccccgacgaggacgaggaggagggggacugcgaggaggaggaguucgagccgagcacccaguacgaguacggcacggaggacgacuaccagggcaagccccucgaguucggggcgaccuccgccgcccugcagcccgaggaggagcaggaggaggacuggcuggacgacgacagccagcagaccgugggccagcaggacggguccgaggacaaccagaccacgaccauccagaccaucguggagguccagccccagcucgagauggagcugaccccgguggugcagacgaucgaggucaacagcuucuccggcuaccugaagcucaccgacaacguguacaucaagaacgccgacaucguggaggaggcgaagaaggucaagcccaccgugguggucaacgccgccaacguguaccugaagcacgggggcggcguggccggggcccugaacaaggcgaccaacaacgccaugcaggucgagagcgacgacuacaucgccacgaacggcccccucaagguggggggcuccugcguccugagcggccacaaccuggccaagcacugccuccacgugguggggcccaacgucaacaagggcgaggacauccagcugcugaaguccgccuacgagaacuucaaccagcacgaggugcuccuggcgccgcugcucagcgccgggaucuucggcgccgaccccauccacucccugcgggugugcgucgacaccgugcgcaccaacguguaccuggccgucuucgacaagaaccucuacgacaagcuggugagcuccuuccuggagaugaagagcgagaagcagguggagcagaagaucgccgagauccccaaggaggaggucaagcccuucaucaccgagagcaagccguccguggagcagcggaagcaggacgacaagaagaucaaggcgugcguggaggaggucacgaccacccucgaggagaccaaguuccugacggagaaccugcuccuguacaucgacaucaacgggaaccugcaccccgacagcgccacccucguguccgacaucgacaucaccuuccugaagaaggacgcccccuacaucgugggcgacgucgugcaggagggcgugcugaccgccgucgugauccccacgaagaaggccgggggcaccaccgagaugcucgcgaaggcccugcgcaaggugccgaccgacaacuacaucacgaccuaccccgggcagggccugaacggguacaccgucgaggaggccaagaccgugcucaagaagugcaagagcgccuucuacauccugcccuccaucaucagcaacgagaagcaggagauccugggcaccguguccuggaaccuccgggagaugcuggcgcacgccgaggagacgcgcaagcugaugcccgucugcguggagaccaaggccaucgugagcaccauccagcggaaguacaagggcaucaagauccaggagggggucguggacuacggcgcccgcuucuacuucuacaccuccaagacgaccguggccagccugaucaacacccucaacgaccugaacgagacccuggucacgaugccgcucggguacgugacccacggccugaaccuggaggaggcggcccgguacaugcgcucccucaaggugcccgccaccgucagcguguccagccccgacgccgugaccgccuacaacggguaccugacguccagcuccaagacccccgaggagcacuucaucgagaccaucagccuggcgggcuccuacaaggacuggagcuacagcggccaguccacccagcucgggaucgaguuccugaagcggggcgacaagagcgucuacuacacguccaacccgaccaccuuccaccuggacggggaggugaucaccuucgacaaccucaagacgcugcugagccuccgcgaggugcggaccaucaaggucuucaccaccguggacaacaucaaccugcacacgcagguggucgacauguccaugaccuacggccagcaguucggccccaccuaccuggacggggccgacgugaccaagaucaagccccacaacagccacgagggcaagacguucuacgugcucccgaacgacgacacccugcgcgucgaggccuucgaguacuaccacaccaccgaccccuccuuccuggggcgguacaugagcgcccucaaccacacgaagaaguggaaguacccccaggugaacggccugaccuccaucaagugggccgacaacaacugcuaccuggcgaccgcccuccugacccugcagcagaucgagcucaaguucaaccccccggcccugcaggacgccuacuaccgcgcgcgggccggggaggccgccaacuucugcgcccugauccucgcguacugcaacaagacggugggcgagcugggcgacguccgcgagaccaugagcuaccuguuccagcacgccaaccucgacuccugcaagcgggugcugaacgucgugugcaagaccugcgggcagcagcagaccacccugaagggcguggaggccgucauguacauggggacgcucagcuacgagcaguucaagaagggcgugcagauccccugcaccugcgggaagcaggccaccaaguaccuggugcagcaggagucccccuucgucaugaugagcgcccccccggcgcaguacgagcugaagcacggcaccuucacgugcgccuccgaguacaccggcaacuaccagugcgggcacuacaagcacaucaccagcaaggagacccucuacugcaucgacggcgcccugcugacgaaguccagcgaguacaaggggcccaucaccgacguguucuacaaggagaacagcuacaccaccacgaucaagcccgugaccuacaagcucgacggcgucgugugcaccgagaucgaccccaagcuggacaacuacuacaagaaggacaacuccuacuucaccgagcagccgaucgaccuggugcccaaccagcccuaccccaacgccagcuucgacaacuucaaguucgucugcgacaacaucaaguucgccgacgaccucaaccagcugacgggguacaagaagccggcgucccgcgagcugaaggugaccuucuuccccgaccucaacggcgacguggucgccaucgacuacaagcacuacacccccagcuucaagaagggcgccaagcugcugcacaagcccaucguguggcacgugaacaacgccaccaacaaggcgacguacaagccgaacaccuggugcauccggugccucugguccaccaagcccgucgagaccagcaacuccuucgacgugcugaagagcgaggacgcccaggggauggacaaccuggccugcgaggaccucaagcccguguccgaggaggucguggagaaccccacgauccagaaggacgugcuggagugcaacgucaagaccaccgagguggugggcgacaucauccugaagccggccaacaacagccucaagaucaccgaggaggucgggcacacggaccugauggccgcguacguggacaacuccagccugaccaucaagaagcccaacgagcucucccgcgugcugggccugaagacccucgccacccacgggcuggccgccgucaacagcgugcccugggacacgaucgccaacuacgcgaagccguuccugaacaagguggucuccaccaccaccaacaucgugacgcgcugccucaaccgggugugcaccaacuacaugcccuacuucuucacccugcugcuccagcugugcaccuucacccgcagcacgaacucccggaucaaggccagcaugcccaccaccaucgccaagaacaccgucaaguccgugggcaaguucugccuggaggccagcuucaacuaccucaagagccccaacuucuccaagcugaucaacaucaucaucugguuccugcuccugagcgugugccugggcucccucaucuacagcacggccgcgcuggggguccugauguccaaccucggcaugccgagcuacugcaccggguaccgcgagggcuaccugaacuccaccaacgugaccaucgccacguacugcaccggcagcauccccugcuccgugugccugagcgggcucgacucccuggacaccuaccccagccuggagaccauccagaucacgaucuccagcuucaagugggaccucaccgccuucggccuggucgccgagugguuccuggccuacauccucuucacccgguucuucuacgugcuggggcuggcggccaucaugcagcucuucuucuccuacuucgccgugcacuucaucagcaacuccuggcugauguggcugaucaucaaccugguccagauggcccccaucagcgcgauggugcgcauguacaucuucuucgccuccuucuacuacguguggaagagcuacguccacgugguggacggcugcaacagcuccaccugcaugaugugcuacaagcggaaccgcgccacgcgggucgagugcaccaccaucgugaacgggguccgccggagcuucuacguguacgccaacggcggcaagggguucugcaagcuccacaacuggaacugcgugaacugcgacaccuucugcgccggcuccacguucaucagcgacgaggucgcgcgcgaccugucccugcaguucaagcggccgaucaaccccaccgaccagagcuccuacaucguggacagcgugaccgucaagaacggguccauccaccucuacuucgacaaggccggccagaagaccuacgagcgccacagccugucccacuucgugaaccuggacaaccuccgggccaacaacacgaaggggagccugcccaucaacgugaucgucuucgacggcaaguccaagugcgaggagagcuccgccaagagcgccuccguguacuacagccagcugaugugccagcccauccuccugcuggaccaggcgcucguguccgacgucggcgacagcgccgagguggccgugaagauguucgacgccuacgucaacaccuucagcuccaccuucaacgugccgauggagaagcugaagacccugguggccacggcggaggccgagcucgccaagaacgucagccuggacaacgugcuguccaccuucaucagcgccgugcgccagggguucgucgacuccgacguggagaccaaggacguggucgagugccucaagcugagccaccaguccgacaucgaggugaccggcgacagcugcaacaacuacaugcugacguacaacaagguggagaacaugaccccccgggaccucggggcgugcaucgacugcuccgcccgccacaucaacgcccaggucgccaagagccacaacaucgcccugaucuggaacgugaaggacuucaugucccugagcgagcagcuccggaagcagauccgcuccgcggccaagaagaacaaccugcccuucaagcugaccugcgccaccacgcgccagguggucaacguggugaccaccaagaucgcccucaagggcgggugaggacuaguuauaagacugacuagcccgaugggccucccaacgggcccuccuccccuccuugcaccgagauuaauaaaaaaaaaaaaaaaaaaaaaaaaaaaaaaaaaaaaaaaaaaaaaaaaaaaaaaaaaaaaaaaaugcaucccccccccccccccccccccccccccccccaaaggcucuuuucagagccaccagaauu

SEQ ID NO: 21634 - RNA, 6058 nt, Artificial Sequence
  SARS-CoV-2__MT811521.1__non-structural protein 3 (NSP3) mRNA gc
aggagaaagcuuaccauggcccccaccaaggugaccuucggcgacgacacggucaucgaggugcagggguacaagagcgugaacaucaccuucgagcuggacgagcgcaucgacaagguccucaacgagaagugcuccgccuacaccguggagcugggcaccgaggugaacgaguucgcgugcgucguggccgacgccgugaucaagacgcugcagccggucagcgagcuccugaccccccuggggaucgaccucgacgagugguccauggccaccuacuaccuguucgacgagagcggcgaguucaagcuggccucccacauguacugcagcuucuacccccccgacgaggacgaggaggagggggacugcgaggaggaggaguucgagccguccacccaguacgaguacggcacggaggacgacuaccagggcaagccccucgaguucggggcgaccagcgccgcccugcagcccgaggaggagcaggaggaggacuggcuggacgacgacucccagcagaccgugggccagcaggacgggagcgaggacaaccagaccacgaccauccagaccaucguggagguccagccccagcucgagauggagcugaccccgguggugcagacgaucgaggucaacuccuucagcggcuaccugaagcucaccgacaacguguacaucaagaacgccgacaucguggaggaggcgaagaaggucaagcccaccgugguggucaacgccgccaacguguaccugaagcacgggggcggcguggccggggcccugaacaaggcgaccaacaacgccaugcaggucgaguccgacgacuacaucgccacgaacggcccccucaagguggggggcagcugcguccuguccggccacaaccuggccaagcacugccuccacgugguggggcccaacgucaacaagggcgaggacauccagcugcugaagagcgccuacgagaacuucaaccagcacgaggugcuccuggcgccgcugcucuccgccgggaucuucggcgccgaccccauccacagccugcgggugugcgucgacaccgugcgcaccaacguguaccuggccgucuucgacaagaaccucuacgacaagcugguguccagcuuccuggagaugaagagcgagaagcagguggagcagaagaucgccgagauccccaaggaggaggucaagcccuucaucaccgaguccaagccgagcguggagcagcggaagcaggacgacaagaagaucaaggcgugcguggaggaggucacgaccacccucgaggagaccaaguuccugacggagaaccugcuccuguacaucgacaucaacgggaaccugcaccccgacuccgccacccucgugagcgacaucgacaucaccuuccugaagaaggacgcccccuacaucgugggcgacgucgugcaggagggcgugcugaccgccgucgugauccccacgaagaaggccgggggcaccaccgagaugcucgcgaaggcccugcgcaaggugccgaccgacaacuacaucacgaccuaccccgggcagggccugaacggguacaccgucgaggaggccaagaccgugcucaagaagugcaaguccgccuucuacauccugcccagcaucaucuccaacgagaagcaggagauccugggcaccgugagcuggaaccuccgggagaugcuggcgcacgccgaggagacgcgcaagcugaugcccgucugcguggagaccaaggccaucguguccaccauccagcggaaguacaagggcaucaagauccaggagggggucguggacuacggcgcccgcuucuacuucuacaccagcaagacgaccguggccucccugaucaacacccucaacgaccugaacgagacccuggucacgaugccgcucggguacgugacccacggccugaaccuggaggaggcggcccgguacaugcgcagccucaaggugcccgccaccgucuccgugagcucccccgacgccgugaccgccuacaacggguaccugacgagcuccagcaagacccccgaggagcacuucaucgagaccaucucccuggcgggcagcuacaaggacuggagcuacuccggccagagcacccagcucgggaucgaguuccugaagcggggcgacaaguccgucuacuacacgagcaacccgaccaccuuccaccuggacggggaggugaucaccuucgacaaccucaagacgcugcugucccuccgcgaggugcggaccaucaaggucuucaccaccguggacaacaucaaccugcacacgcagguggucgacaugagcaugaccuacggccagcaguucggccccaccuaccuggacggggccgacgugaccaagaucaagccccacaacucccacgagggcaagacguucuacgugcucccgaacgacgacacccugcgcgucgaggccuucgaguacuaccacaccaccgaccccagcuuccuggggcgguacauguccgcccucaaccacacgaagaaguggaaguacccccaggugaacggccugaccagcaucaagugggccgacaacaacugcuaccuggcgaccgcccuccugacccugcagcagaucgagcucaaguucaaccccccggcccugcaggacgccuacuaccgcgcgcgggccggggaggccgccaacuucugcgcccugauccucgcguacugcaacaagacggugggcgagcugggcgacguccgcgagaccauguccuaccuguuccagcacgccaaccucgacagcugcaagcgggugcugaacgucgugugcaagaccugcgggcagcagcagaccacccugaagggcguggaggccgucauguacauggggacgcucuccuacgagcaguucaagaagggcgugcagauccccugcaccugcgggaagcaggccaccaaguaccuggugcagcaggagagccccuucgucaugauguccgcccccccggcgcaguacgagcugaagcacggcaccuucacgugcgccagcgaguacaccggcaacuaccagugcgggcacuacaagcacaucaccuccaaggagacccucuacugcaucgacggcgcccugcugacgaagagcagcgaguacaaggggcccaucaccgacguguucuacaaggagaacuccuacaccaccacgaucaagcccgugaccuacaagcucgacggcgucgugugcaccgagaucgaccccaagcuggacaacuacuacaagaaggacaacagcuacuucaccgagcagccgaucgaccugauccccaaccagcccuaccccaacgccuccuucgacaacuucaaguucgugugcgacaacaucaaguucgccgacgaccucaaccagcugacgggguacaagaagccggcgagccgcgagcugaaggucaccuucuuccccgaccucaacggcgacgugguggccaucgacuacaagcacuacacccccuccuucaagaagggcgccaagcugcugcacaagcccaucgucuggcacgugaacaacgccaccaacaaggcgacguacaagccgaacaccuggugcauccggugccucuggagcaccaagcccguggagaccuccaacagcuucgacguccugaaguccgaggacgcccaggggauggacaaccuggccugcgaggaccucaagcccgugagcgaggagguggucgagaaccccacgauccagaaggacgugcuggagugcaacgugaagaccaccgaggucgugggcgacaucauccugaagccggccaacaacucccucaagaucaccgaggagguggggcacacggaccugauggccgcguacgucgacaacagcucccugaccaucaagaagcccaacgagcucagccgcgugcugggccugaagacccucgccacccacgggcuggccgccgccaacuccgugcccugggacacgaucgcgaacuacgccaagccguuccugaacaaggucgugagcaccaccaccaacaucgugacgcgcugccucaaccgggucugcaccaacuacaugcccuacuucuucacccugcugcuccagcugugcaccuucacccgcuccacgaacagccggaucaaggccuccaugcccaccaccaucgccaagaacaccgugaagagcgugggcaaguucugccuggaggccagcuucaacuaccucaagucccccaacuucagcaagcugaucaacaucaucaucugguuccugcuccuguccgucugccugggcagccucaucuacuccacggcggcccugggggugcugaugagcaaccucggcaugccguccuacugcaccggguaccgcgagggcuaccugaacagcaccaacgugaccaucgccacguacugcaccggcuccauccccugcagcgucugccuguccgggcucgacagccuggacaccuaccccucccuggagaccauccagaucacgaucagcuccuucaagugggaccucaccgccuucggccugguggccgagugguuccuggcguacauccucuucacccgguucuucuacgugcuggggcuggccgccaucaugcagcucuucuucagcuacuucgccguccacuucaucuccaacagcuggcugauguggcugaucaucaaccuggugcagauggcgcccaucuccgccauggugcgcauguacaucuucuucgccagcuucuacuacgucuggaagagcuacgugcacguggucgacggcugcaacuccagcaccugcaugaugugcuacaagcggaaccgcgccacgcggguggagugcaccaccaucgugaacgggguccgccgguccuucuacguguacgccaacggcggcaagggguucugcaagcuccacaacuggaacugcgucaacugcgacaccuucugcgcgggcagcacguucaucuccgacgagguggcccgcgaccugagccugcaguucaagcggccgaucaaccccaccgaccaguccagcuacaucguggacuccgucaccgugaagaacgggagcauccaccucuacuucgacaaggccggccagaagaccuacgagcgccacucccugagccacuucgugaaccuggacaaccuccgggccaacaacacgaaggggucccugcccaucaacgucaucguguucgacggcaagagcaagugcgaggaguccagcgccaaguccgcgagcguguacuacucccagcugaugugccagcccauccuccugcuggaccaggcccucgucagcgacgugggcgacagcgccgagguggccgucaagauguucgacgccuacgugaacaccuucuccagcaccuucaacgugccgauggagaagcugaagacccuggucgcgacggccgaggccgagcucgccaagaacgugucccuggacaacgugcugagcaccuucaucuccgcggcccgccagggguucgucgacagcgacguggagaccaaggacguggucgagugccucaagcugucccaccagagcgacaucgaggugaccggcgacuccugcaacaacuacaugcugacguacaacaagguggagaacaugaccccccgggaccucggggccugcaucgacugcagcgcccgccacaucaacgcccaggucgcgaagucccacaacaucgcccugaucuggaacgugaaggacuucaugagccuguccgagcagcuccggaagcagauccgcagcgccgccaagaagaacaaccugcccuucaagcugaccugcgccaccacgcgccagguggucaacguggugaccaccaagaucgcgcucaagggcgggugaggacuaguuauaagacugacuagcccgaugggccucccaacgggcccuccuccccuccuugcaccgagauuaauaaaaaaaaaaaaaaaaaaaaaaaaaaaaaaaaaaaaaaaaaaaaaaaaaaaaaaaaaaaaaaaaugcaucccccccccccccccccccccccccccccccaaaggcucuuuucagagccaccagaauu

SEQ ID NO: 21635 - RNA, 6058 nt, Artificial Sequence
  SARS-CoV-2__MT811528.1__non-structural protein 3 (NSP3) mRNA gc
aggagaaagcuuaccauggcccccaccaaggugaccuucggcgacgacacggucaucgaggugcagggguacaagagcgugaacaucaccuucgagcuggacgagcgcaucgacaagguccucaacgagaagugcuccgccuacaccguggagcugggcaccgaggugaacgaguucgcgugcgucguggccgacgccgugaucaagacgcugcagccggucagcgagcuccugaccccccuggggaucgaccucgacgagugguccauggccaccuacuaccuguucgacgagagcggcgaguucaagcuggccucccacauguacugcagcuucuacccccccgacgaggacgaggaggagggggacugcgaggaggaggaguucgagccguccacccaguacgaguacggcacggaggacgacuaccagggcaagccccucgaguucggggcgaccagcgccgcccugcagcccgaggaggagcaggaggaggacuggcuggacgacgacucccagcagaccgugggccagcaggacgggagcgaggacaaccagaccacgaccauccagaccaucguggagguccagccccagcucgagauggagcugaccccgguggugcagacgaucgaggucaacuccuucagcggcuaccugaagcucaccgacaacguguacaucaagaacgccgacaucguggaggaggcgaagaaggucaagcccaccgugguggucaacgccgccaacguguaccugaagcacgggggcggcguggccggggcccugaacaaggcgaccaacaacgccaugcaggucgaguccgacgacuacaucgccacgaacggcccccucaagguggggggcagcugcguccuguccggccacaaccuggccaagcacugccuccacgugguggggcccaacgucaacaagggcgaggacauccagcugcugaagagcgccuacgagaacuucaaccagcacgaggugcuccuggcgccgcugcucuccgccgggaucuucggcgccgaccccauccacagccugcgggugugcgucgacaccgugcgcaccaacguguaccuggccgucuucgacaagaaccucuacgacaagcugguguccagcuuccuggagaugaagagcgagaagcagguggagcagaagaucgccgagauccccaaggaggaggucaagcccuucaucaccgaguccaagccgagcguggagcagcggaagcaggacgacaagaagaucaaggcgugcguggaggaggucacgaccacccucgaggagaccaaguuccugacggagaaccugcuccuguacaucgacaucaacgggaaccugcaccccgacuccgccacccucgugagcgacaucgacaucaccuuccugaagaaggacgcccccuacaucgugggcgacgucgugcaggagggcgugcugaccgccgucgugauccccacgaagaaggccgggggcaccaccgagaugcucgcgaaggcccugcgcaaggugccgaccgacaacuacaucacgaccuaccccgggcagggccugaacggguacaccgucgaggaggccaagaccgugcucaagaagugcaaguccgccuucuacauccugcccagcaucaucuccaacgagaagcaggagauccugggcaccgugagcuggaaccuccgggagaugcuggcgcacgccgaggagacgcgcaagcugaugcccgucugcguggagaccaaggccaucguguccaccauccagcggaaguacaagggcaucaagauccaggagggggucguggacuacggcgcccgcuucuacuucuacaccagcaagacgaccguggccucccugaucaacacccucaacgaccugaacgagacccuggucacgaugccgcucggguacgugacccacggccugaaccuggaggaggcggcccgguacaugcgcagccucaaggugcccgccaccgucuccgugagcucccccgacgccgugaccgccuacaacggguaccugacgagcuccagcaagacccccgaggagcacuucaucgagaccaucucccuggcgggcagcuacaaggacuggagcuacuccggccagagcacccagcucgggaucgaguuccugaagcggggcgacaaguccgucuacuacacgagcaacccgaccaccuuccaccuggacggggaggugaucaccuucgacaaccucaagacgcugcugucccuccgcgaggugcggaccaucaaggucuucaccaccguggacaacaucaaccugcacacgcagguggucgacaugagcaugaccuacggccagcaguucggccccaccuaccuggacggggccgacgugaccaagaucaagccccacaacucccacgagggcaagacguucuacgugcucccgaacgacgacacccugcgcgucgaggccuucgaguacuaccacaccaccgaccccagcuuccuggggcgguacauguccgcccucaaccacacgaagaaguggaaguacccccaggugaacggccugaccagcaucaagugggccgacaacaacugcuaccuggcgaccgcccuccugacccugcagcagaucgagcucaaguucaaccccccggcccugcaggacgccuacuaccgcgcgcgggccggggaggccgccaacuucugcgcccugauccucgcguacugcaacaagacggugggcgagcugggcgacguccgcgagaccauguccuaccuguuccagcacgccaaccucgacagcugcaagcgggugcugaacgucgugugcaagaccugcgggcagcagcagaccacccugaagggcguggaggccgucauguacauggggacgcucuccuacgagcaguucaagaagggcgugcagauccccugcaccugcgggaagcaggccaccaaguaccuggugcagcaggagagccccuucgucaugauguccgcccccccggcgcaguacgagcugaagcacggcaccuucacgugcgccagcgaguacaccggcaacuaccagugcgggcacuacaagcacaucaccuccaaggagacccucuacugcaucgacggcgcccugcugacgaagagcagcgaguacaaggggcccaucaccgacguguucuacaaggagaacuccuacaccaccacgaucaagcccgugaccuacaagcucgacggcgucgugugcaccgagaucgaccccaagcuggacaacuacuacaagaaggacaacagcuacuucaccgagcagccgaucgaccuggugcccaaccagcccuaccccaacgccuccuucgacaacuucaaguucgucugcgacaacaucaaguucgccgacgaccucaaccagcugacgggguacaagaagccggcgagccgcgagcugaaggugaccuucuuccccgaccucaacggcgacguggucgccaucgacuacaagcacuacacccccuccuucaagaagggcgccaagcugcugcacaagcccaucguguggcacgugaacaacgccaccaacaaggcgacguacaagccgaacaccuggugcauccggugccucuggagcaccaagcccgucgagaccuccaacagcuucgacgugcugaaguccgaggacgcccaggggauggacaaccuggccugcgaggaccucaagcccgugagcgaggaggucguggagaaccccacgauccagaaggacgugcuggagugcaacgucaagaccaccgagguggugggcgacaucauccugaagccggccaacaacucccucaagaucaccgaggaggucgggcacacggaccugauggccgcguacguggacaacagcucccugaccaucaagaagcccaacgagcucagccgcgugcugggccugaagacccucgccacccacgggcuggccgccgucaacuccgugcccugggacacgaucgccaacuacgcgaagccguuccugaacaagguggucagcaccaccaccaacaucgugacgcgcugccucaaccgggugugcaccaacuacaugcccuacuucuucacccugcugcuccagcugugcaccuucacccgcuccacgaacagccggaucaaggccuccaugcccaccaccaucgccaagaacaccgucaagagcgugggcaaguucugccuggaggccagcuucaacuaccucaagucccugaacuucagcaagcugaucaacaucaucaucugguuccuccugcuguccgugugccucggcagccugaucuacuccacggccgcgcuggggguccucaugagcaaccugggcaugcccuccuacugcaccggguaccgcgagggcuaccugaacagcaccaacgugaccaucgccacguacugcaccggcuccaucccgugcagcgugugccucuccgggcuggacagccuggacaccuaccccucccucgagaccauccagaucacgaucagcuccuucaagugggaccugaccgccuucggccuggucgccgagugguuccucgccuacauccuguucacccgguucuucuacgugcuggggcucgcggccaucaugcagcuguucuucagcuacuucgccgugcacuucaucuccaacagcuggcugauguggcugaucaucaaccucguccagauggcccccaucuccgcgauggugcgcauguacaucuucuucgccagcuucuacuacguguggaagagcuacguccacgugguggacggcugcaacuccagcaccugcaugaugugcuacaagcggaaccgcgccacgcgggucgagugcaccaccaucgugaacgggguccgccgguccuucuacguguacgccaacggcggcaagggguucugcaagcugcacaacuggaacugcgugaacugcgacaccuucugcgccggcagcacguucaucuccgacgaggucgcgcgcgaccugagccuccaguucaagcggcccaucaacccgaccgaccaguccagcuacaucguggacuccgugaccgucaagaacgggagcauccaccuguacuucgacaaggccggccagaagaccuacgagcgccacucccugagccacuucgugaaccucgacaaccugcgggccaacaacacgaaggggucccugcccaucaacgugaucgucuucgacggcaagagcaagugcgaggaguccagcgccaaguccgccagcguguacuacucccagcucaugugccagcccauccugcugcucgaccaggcgcuggugagcgacgucggcgacagcgccgagguggccgugaagauguucgacgccuacgucaacaccuucuccagcaccuucaacgugcccauggagaagcugaagacccucguggccacggcggaggccgagcuggccaagaacgucucccuggacaacgugcucagcaccuucaucuccgccgcgcgccagggguucguggacagcgacgucgagaccaaggacgugguggagugccugaagcugucccaccagagcgacaucgaggucaccggcgacuccugcaacaacuacaugcucacguacaacaagguggagaacaugaccccgcgggaccugggggccugcaucgacugcagcgcccgccacaucaacgcccagguggccaagucccacaacaucgcgcugaucuggaacgucaaggacuucaugagccucuccgagcagcugcggaagcagauccgcagcgccgccaagaagaacaaccugcccuucaagcucaccugcgccaccacgcgccagguggugaacgucgugaccaccaagaucgcccugaagggcgggugaggacuaguuauaagacugacuagcccgaugggccucccaacgggcccuccuccccuccuugcaccgagauuaauaaaaaaaaaaaaaaaaaaaaaaaaaaaaaaaaaaaaaaaaaaaaaaaaaaaaaaaaaaaaaaaaugcaucccccccccccccccccccccccccccccccaaaggcucuuuucagagccaccagaauu

SEQ ID NO: 21636 - RNA, 6058 nt, Artificial Sequence
  SARS-CoV-2__MT811530.1__non-structural protein 3 (NSP3) mRNA gc
aggagaaagcuuaccauggcccccaccaaggugaccuucggcgacgacacggucaucgaggugcagggguacaagagcgugaacaucaccuucgagcuggacgagcgcaucgacaagguccucaacgagaagugcuccgccuacaccguggagcugggcaccgaggugaacgaguucgcgugcgucguggccgacgccgugaucaagacgcugcagccggucagcgagcuccugaccccccuggggaucgaccucgacgagugguccauggccaccuacuaccuguucgacgagagcggcgaguucaagcuggccucccacauguacugcagcuucuacccccccgacgaggacgaggaggagggggacugcgaggaggaggaguucgagccguccacccaguacgaguacggcacggaggacgacuaccagggcaagccccucgaguucggggcgaccagcgccgcccugcagcccgaggaggagcaggaggaggacuggcuggacgacgacucccagcagaccgugggccagcaggacgggagcgaggacaaccagaccacgaccauccagaccaucguggagguccagccccagcucgagauggagcugaccccgguggugcagacgaucgaggucaacuccuucagcggcuaccugaagcucaucgacaacguguacaucaagaacgccgacaucguggaggaggcgaagaaggucaagcccaccgugguggucaacgccgccaacguguaccugaagcacgggggcggcguggccggggcccugaacaaggcgaccaacaacgccaugcaggucgaguccgacgacuacaucgccaccaacggcccccucaagguggggggcagcugcguccuguccggccacaaccuggccaagcacugccuccacgugguggggcccaacgucaacaagggcgaggacauccagcugcugaagagcgccuacgagaacuucaaccagcacgaggugcuccuggcgccgcugcucuccgccgggaucuucggcgccgaccccauccacagccugcgggugugcgucgacacggugcgcaccaacguguaccuggccgucuucgacaagaaccucuacgacaagcugguguccagcuuccuggagaugaagagcgagaagcagguggagcagaagaucgccgagauccccaaggaggaggucaagcccuucaucaccgaguccaagccgagcguggagcagcggaagcaggacgacaagaagaucaaggcgugcguggaggaggucaccacgacccucgaggagaccaaguuccugaccgagaaccugcuccuguacaucgacaucaacgggaaccugcaccccgacuccgccacgcucgugagcgacaucgacaucaccuuccugaagaaggacgcccccuacaucgugggcgacgucgugcaggagggcgugcugaccgccgucgugauccccaccaagaaggccgggggcacgaccgagaugcucgcgaaggcccugcgcaaggugccgaccgacaacuacaucaccacguaccccgggcagggccugaacggguacaccgucgaggaggccaagaccgugcucaagaagugcaaguccgccuucuacauccugcccagcaucaucuccaacgagaagcaggagauccugggcaccgugagcuggaaccuccgggagaugcuggcgcacgccgaggagacccgcaagcugaugcccgucugcguggagacgaaggccaucguguccaccauccagcggaaguacaagggcaucaagauccaggagggggucguggacuacggcgcccgcuucuacuucuacaccagcaagaccacgguggccucccugaucaacacccucaacgaccugaacgagacccuggucaccaugccgcucggguacgugacgcacggccugaaccuggaggaggcggcccgguacaugcgcagccucaaggugcccgccaccgucuccgugagcucccccgacgccgugaccgccuacaacggguaccugaccagcuccagcaagacgcccgaggagcacuucaucgagaccaucucccuggcgggcagcuacaaggacuggagcuacuccggccagagcacccagcucgggaucgaguuccugaagcggggcgacaaguccgucuacuacaccagcaacccgacgaccuuccaccuggacggggaggugaucaccuucgacaaccucaagacccugcugucccuccgcgaggugcggacgaucaaggucuucaccaccguggacaacaucaaccugcacacccagguggucgacaugagcaugacguacggccagcaguucggccccaccuaccuggacggggccgacgugaccaagaucaagccccacaacucccacgagggcaagaccuucuacgugcucccgaacgacgacacgcugcgcgucgaggccuucgaguacuaccacaccaccgaccccagcuuccuggggcgguacauguccgcccucaaccacaccaagaaguggaaguacccccaggugaacggccugacgagcaucaagugggccgacaacaacugcuaccuggcgaccgcccuccugacccugcagcagaucgagcucaaguucaaccccccggcccugcaggacgccuacuaccgcgcgcgggccggggaggccgccaacuucugcgcccugauccucgcguacugcaacaagaccgugggcgagcugggcgacguccgcgagacgauguccuaccuguuccagcacgccaaccucgacagcugcaagcgggugcugaacgucgugugcaagaccugcgggcagcagcagaccacccugaagggcguggaggccgucauguacauggggacccucuccuacgagcaguucaagaagggcgugcagauccccugcacgugcgggaagcaggccaccaaguaccuggugcagcaggagagccccuucgucaugauguccgcccccccggcgcaguacgagcugaagcacggcaccuucaccugcgccagcgaguacacgggcaacuaccagugcgggcacuacaagcacaucaccuccaaggagacccucuacugcaucgacggcgcccugcugaccaagagcagcgaguacaaggggcccaucacggacguguucuacaaggagaacuccuacaccaccaccaucaagcccgugacguacaagcucgacggcgucgugugcaccgagaucgaccccaagcuggacaacuacuacaagaaggacaacagcuacuucaccgagcagccgaucgaccuggugcccaaccagcccuaccccaacgccuccuucgacaacuucaaguucgucugcgacaacaucaaguucgccgacgaccucaaccagcugaccggguacaagaagccggcgagccgcgagcugaaggugacguucuuccccgaccucaacggcgacguggucgccaucgacuacaagcacuacacccccuccuucaagaagggcgccaagcugcugcacaagcccaucguguggcacgugaacaacgccaccaacaaggcgaccuacaagccgaacacguggugcauccggugccucuggagcaccaagcccgucgagaccuccaacagcuucgacgugcugaaguccgaggacgcccaggggauggacaaccuggccugcgaggaccucaagcccgugagcgaggaggucguggagaaccccaccauccagaaggacgugcuggagugcaacgucaagacgaccgagguggugggcgacaucauccugaagccggccaacaacucccucaagaucaccgaggaggucgggcacaccgaccugauggccgcguacguggacaacagcucccugacgaucaagaagcccaacgagcucagccgcgugcugggccugaagacccucgccacccacgggcuggccgccgucaacuccgugcccugggacaccaucgccaacuacgcgaagccguuccugaacaagguggucagcacgaccaccaacaucgugacccgcugccucaaccgggugugcacgaacuacaugcccuacuucuucacccugcugcuccagcugugcaccuucacccgcuccaccaacagccggaucaaggccuccaugcccacgaccaucgccaagaacaccgucaagagcgugggcaaguucugccuggaggccagcuucaacuaccucaagucccccaacuucagcaagcugaucaacaucaucaucugguuccugcuccuguccgugugccugggcagccucaucuacuccaccgccgcgcuggggguccugaugagcaaccucggcaugccguccuacugcacgggguaccgcgagggcuaccugaacagcaccaacgugaccaucgccaccuacugcacgggcuccauccccugcagcgugugccuguccgggcucgacagccuggacaccuaccccucccuggagaccauccagaucaccaucagcuccuucaagugggaccucacggccuucggccuggucgccgagugguuccuggccuacauccucuucacccgguucuucuacgugcuggggcuggcggccaucaugcagcucuucuucagcuacuucgccgugcacuucaucuccaacagcuggcugauguggcugaucaucaaccugguccagauggcccccaucuccgcgauggugcgcauguacaucuucuucgccagcuucuacuacguguggaagagcuacguccacgugguggacggcugcaacuccagcaccugcaugaugugcuacaagcggaaccgcgccacccgggucgagugcacgaccaucgugaacgggguccgccgguccuucuacguguacgccaacggcggcaagggguucugcaagcuccacaacuggaacugcgugaacugcgacaccuucugcgccggcagcaccuucaucuccgacgaggucgcgcgcgaccugagccugcaguucaagcggccgaucaaccccacggaccaguccagcuacaucguggacuccgugaccgucaagaacgggagcauccaccucuacuucgacaaggccggccagaagaccuacgagcgccacucccugagccacuucgugaaccuggacaaccuccgggccaacaacaccaaggggucccugcccaucaacgugaucgucuucgacggcaagagcaagugcgaggaguccagcgccaaguccgccagcguguacuacucccagcugaugugccagcccauccuccugcuggaccaggcgcucgugagcgacgucggcgacagcgccgagguggccgugaagauguucgacgccuacgucaacacguucuccagcaccuucaacgugccgauggagaagcugaagacccugguggccaccgcggaggccgagcucgccaagaacgucucccuggacaacgugcugagcacguucaucuccgccgcgcgccagggguucguggacagcgacgucgagaccaaggacgugguggagugccucaagcugucccaccagagcgacaucgaggucaccggcgacuccugcaacaacuacaugcugaccuacaacaagguggagaacaugacgccccgggaccucggggccugcaucgacugcagcgcccgccacaucaacgcccagguggccaagucccacaacaucgcgcugaucuggaacgucaaggacuucaugagccuguccgagcagcuccggaagcagauccgcagcgccgccaagaagaacaaccugcccuucaagcugaccugcgccaccacccgccagguggugaacgucgugacgaccaagaucgcccucaagggcgggugaggacuaguuauaagacugacuagcccgaugggccucccaacgggcccuccuccccuccuugcaccgagauuaauaaaaaaaaaaaaaaaaaaaaaaaaaaaaaaaaaaaaaaaaaaaaaaaaaaaaaaaaaaaaaaaaugcaucccccccccccccccccccccccccccccccaaaggcucuuuucagagccaccagaauu

SEQ ID NO: 21637 - RNA, 6058 nt, Artificial Sequence
  SARS-CoV-2__MT811552.1__non-structural protein 3 (NSP3) mRNA gc
aggagaaagcuuaccauggcccccaccaaggugaccuucggcgacgacacggucaucgaggugcagggguacaagagcgugaacaucaccuucgagcuggacgagcgcaucgacaagguccucaacgagaagugcuccgccuacaccguggagcugggcaccgaggugaacgaguucgcgugcgucguggccgacgccgugaucaagacgcugcagccggucagcgagcuccugaccccccuggggaucgaccucgacgagugguccauggccaccuacuaccuguucgacgagagcggcgaguucaagcuggccucccacauguacugcagcuucuacccccccgacgaggacgaggaggagggggacugcgaggaggaggaguucgagccguccacccaguacgaguacggcacggaggacgacuaccagggcaagccccucgaguucggggcgaccagcgccgcccugcagcccgaggaggagcaggaggaggacuggcuggacgacgacucccagcagaccgugggccagcaggacgggagcgaggacaaccagaccacgaccauccagaccaucguggagguccagccccagcucgagauggagcugaccccgguggugcagacgaucgaggucaacuccuucagcggcuaccugaagcucaccgacaacguguacaucaagaacgccgacaucguggaggaggcgaagaaggucaagcccaccgugguggucaacgccgccaacguguaccugaagcacgggggcggcguggccggggcccugaacaaggcgaccaacaacgccaugcaggucgaguccgacgacuacaucgccacgaacggcccccucaagguggggggcagcugcguccuguccggccacaaccuggccaagcacugccuccacgugguggggcccaacgucaacaagggcgaggacauccagcugcugaagagcgccuacgagaacuucaaccagcacgaggugcuccuggcgccgcugcucuccgccgggaucuucggcgccgaccccauccacagccugcgggugugcgucgacaccgugcgcaccaacguguaccuggccgucuucgacaagaaccucuacgacaagcugguguccagcuuccuggagaugaagagcgagaagcagguggagcagaagaucgccgagauccccaaggaggaggucaagcccuucaucaccgaguccaagccgagcguggagcagcggaagcaggacgacaagaagaucaaggcgugcguggaggaggucacgaccacccucgaggagaccaaguuccugacggagaaccugcuccuguacaucgacaucaacgggaaccugcaccccgacuccgccacccucgugagcgacaucgacaucaccuuccugaagaaggacgcccccuacaucgugggcgacgucgugcaggagggcgugcugaccgccgucgugauccccacgaagaaggccgggggcaccaccgagaugcucgcgaaggcccugcgcaaggugccgaccgacaacuacaucacgaccuaccccgggcagggccugaacggguacaccgucgaggaggccaagaccgugcucaagaagugcaaguccgccuucuacauccugcccagcaucaucuccaacgagaagcaggagauccugggcaccgugagcuggaaccuccgggagaugcuggcgcacgccgaggagacgcgcaagcugaugcccgucugcguggagaccaaggccaucguguccaccauccagcggaaguacaagggcaucaagauccaggagggggucguggacuacggcgcccgcuucuacuucuacaccagcaagacgaccguggccucccugaucaacacccucaacgaccugaacgagacccuggucacgaugccgcucggguacgugacccacggccugaaccuggaggaggcggcccgguacaugcgcagccucaaggugcccgccaccgucuccgugagcucccccgacgccgugaccgccuacaacggguaccugacgagcuccagcaagacccccgaggagcacuucaucgagaccaucucccuggcgggcagcuacaaggacuggagcuacuccggccagagcacccagcucgggaucgaguuccugaagcggggcgacaaguccgucuacuacacgagcaacccgaccaccuuccaccuggacggggaggugaucaccuucgacaaccucaagacgcugcugucccuccgcgaggugcggaccaucaaggucuucaccaccguggacaacaucaaccugcacacgcagguggucgacaugagcaugaccuacggccagcaguucggccccaccuaccuggacggggccgacgugaccaagaucaagccccacaacucccacgagggcaagacguucuacgugcucccgaacgacgacacccugcgcgucgaggccuucgaguacuaccacaccaccgaccccagcuuccuggggcgguacauguccgcccucaaccacacgaagaaguggaaguacccccaggugaacggccugaccagcaucaagugggccgacaacaacugcuaccuggcgaccgcccuccugacccugcagcagaucgagcucaaguucaaccccccggcccugcaggacgccuacuaccgcgcgcgggccggggaggccgccaacuucugcgcccugauccucgcguacugcaacaagacggugggcgagcugggcgacguccgcgagaccauguccuaccuguuccagcacgccaaccucgacagcugcaagcgggugcugaacgucgugugcaagaccugcgggcagcagcagaccacccugaagggcguggaggccgucauguacauggggacgcucuccuacgagcaguucaagaagggcgugcagauccccugcaccugcgggaagcaggccaccaaguaccuggugcagcaggagagccccuucgucaugauguccgcccccccggcgcaguacgagcugaagcacggcaccuucacgugcgccagcgaguacaccggcaacuaccagugcgggcacuacaagcacaucaccuccaaggagacccucuacugcaucgacggcgcccugcugacgaagagcagcgaguacaaggggcccaucaccgacguguucuacaaggagaacuccuacaccaccacgaucaagcccgugaccuacaagcucgacggcgucgugugcaccgagaucgaccccaagcuggacaacuacuacaagaaggacaacagcuacuucaccgagcagccgaucgaccuggugcccaaccagcccuaccccaacgccuccuucgacaacuucaaguucgucugcgacaacaucaaguucgccgacgaccucaaccagcugacgggguacaagaagccggcgagccgcgagcugaaggugaccuucuuccccgaccucaacggcgacguggucgccaucgacuacaagcacuacacccccuccuucaagaagggcgccaagcugcugcacaagcccaucguguggcacgugaacaacgccaccaacaaggcgacguacaagccgaacaccuggugcauccggugccucuggagcaccaagcccgucgagaccuccaacagcuucgacgugcugaaguccgaggacgcccaggggauggacaaccuggccugcgaggaccucaagcccgugagcgaggaggucguggagaaccccacgauccagaaggacgugcuggagugcaacgucaagaccaccgagguggugggcgacaucauccugaagccggccaacaacucccucaagaucaccgaggaggucgggcacacggaccugauggccgcguacguggacaacagcucccugaccaucaagaagcccaacgagcucagccgcgugcugggccugaagacccucgccacccacgggcuggccgccgucaacuccgugcccugggacacgaucgccaacuacgcgaagccguuccugaacaagguggucagcaccaccaccaacaucgugacgcgcugccucaaccgggugugcaccaacuacaugcccuacuucuucacccugcugcuccagcugugcaccuucacccgcuccacgaacagccggaucaaggccuccaugcccaccaccaucgccaagaacaccgucaagagcgugggcaaguucugccuggaggccagcuucaacuaccucaagucccccaacuucagcaagcugaucaacaucaucaucugguuccugcuccuguccgugugccugggcagccucaucuacuccacggccgcgcuggggguccugaugagcaaccucggcaugccguccuacugcaccggguaccgcgagggcuaccugaacagcaccaacgugaccaucgccacguacugcaccggcuccauccccugcagcgugugccuguccgggcucgacagccuggacaccuaccccucccuggagaccauccagaucacgaucagcuccuucaagugggaccucaccgccuucggccuggucgccgagugguuccuggccuacauccucuucacccgguucuucuacgugcuggggcuggcggccaucaugcagcucuucuucagcuacuucgccgugcacuucaucuccaacagcuggcugauguggcugaucaucaaccugguccagauggcccccaucuccgcgauggugcgcauguacaucuucuucgccagcuucuacuacguguggaagagcuacguccacgugguggacggcugcuccagcuccaccugcaugaugugcuacaagcggaaccgcgccacgcgggucgagugcaccaccaucgugaacgggguccgccggagcuucuacguguacgccaacggcggcaagggguucugcaagcuccacaacuggaacugcgugaacugcgacaccuucugcgccggcuccacguucaucagcgacgaggucgcgcgcgaccugucccugcaguucaagcggccgaucaaccccaccgaccagagcuccuacaucguggacagcgugaccgucaagaacggguccauccaccucuacuucgacaaggccggccagaagaccuacgagcgccacagccugucccacuucgugaaccuggacaaccuccgggccaacaacacgaaggggagccugcccaucaacgugaucgucuucgacggcaaguccaagugcgaggagagcuccgccaagagcgccuccguguacuacagccagcugaugugccagcccauccuccugcuggaccaggcgcucgugagcgacgucggcgacuccgccgagguggccgugaagauguucgacgccuacgucaacaccuucagcuccaccuucaacgugccgauggagaagcugaagacccugguggccacggcggaggccgagcucgccaagaacgucagccuggacaacgugcuguccaccuucaucagcgccgcgcgccagggguucguggacuccgacgucgagaccaaggacgugguggagugccucaagcugagccaccaguccgacaucgaggucaccggcgacagcugcaacaacuacaugcugacguacaacaagguggagaacaugaccccccgggaccucggggccugcaucgacugcuccgcccgccacaucaacgcccagguggccaagagccacaacaucgcgcugaucuggaacgucaaggacuucaugucccugagcgagcagcuccggaagcagauccgcuccgccgccaagaagaacaaccugcccuucaagcugaccugcgccaccacgcgccagguggugaacgucgugaccaccaagaucgcccucaagggcgggugaggacuaguuauaagacugacuagcccgaugggccucccaacgggcccuccuccccuccuugcaccgagauuaauaaaaaaaaaaaaaaaaaaaaaaaaaaaaaaaaaaaaaaaaaaaaaaaaaaaaaaaaaaaaaaaaugcaucccccccccccccccccccccccccccccccaaaggcucuuuucagagccaccagaauu

SEQ ID NO: 21638 - RNA, 6058 nt, Artificial Sequence
  SARS-CoV-2__MT811557.1__non-structural protein 3 (NSP3) mRNA gc
aggagaaagcuuaccauggcccccaccaaggugaccuucggcgacgacacggucaucgaggugcagggguacaagagcgugaacaucaccuucgagcuggacgagcgcaucgacaagguccucaacgagaagugcuccgccuacaccguggagcugggcaccgaggugaacgaguucgcgugcgucguggccgacgccgugaucaagacgcugcagccggucagcgagcuccugaccccccuggggaucgaccucgacgagugguccauggccaccuacuaccuguucgacgagagcggcgaguucaagcuggccucccacauguacugcagcuucuacccccccgacgaggacgaggaggagggggacugcgaggaggaggaguucgagccguccacccaguacgaguacggcacggaggacgacuaccagggcaagccccucgaguucggggcgaccagcgccgcccugcagcccgaggaggagcaggaggaggacuggcuggacgacgacucccagcagaccgugggccagcaggacgggagcgaggacaaccagaccacgaccauccagaccaucguggagguccagccccagcucgagauggagcugaccccgguggugcagacgaucgaggucaacuccuucagcggcuaccugaagcucaccgacaacguguacaucaagaacgccgacaucguggaggaggcgaagaaggucaagcccaccgugguggucaacgccgccaacguguaccugaagcacgggggcggcguggccggggcccugaacaaggcgaccaacaacgccaugcaggucgaguccgacgacuacaucgccacgaacggcccccucaagguggggggcagcugcguccuguccggccacaaccuggccaagcacugccuccacgugguggggcccaacgucaacaagggcgaggacauccagcugcugaagagcgccuacgagaacuucaaccagcacgaggugcuccuggcgccgcugcucuccgccgggaucuucggcgccgaccccauccacagccugcgggugugcgucgacaccgugcgcaccaacguguaccuggccgucuucgacaagaaccucuacgacaagcugguguccagcuuccuggagaugaagagcgagaagcagguggagcagaagaucgccgagauccccaaggaggaggucaagcccuucaucaccgaguccaagccgagcguggagcagcggaagcaggacgacaagaagaucaaggcgugcguggaggaggucacgaccacccucgaggagaccaaguuccugacggagaaccugcuccuguacaucgacaucaacgggaaccugcaccccgacuccgccacccucgugagcgacaucgacaucaccuuccugaagaaggacgcccccuacaucgugggcgacgucgugcaggagggcgugcugaccgccgucgugauccccacgaagaaggccgggggcaccaccgagaugcucgcgaaggcccugcgcaaggugccgaccgacaacuacaucacgaccuaccccgggcagggccugaacggguacaccgucgaggaggccaagaccgugcucaagaagugcaaguccgccuucuacauccugcccagcaucaucuccaacgagaagcaggagauccugggcaccgugagcuggaaccuccgggagaugcuggcgcacgccgaggagacgcgcaagcugaugcccgucugcguggagaccaaggccaucguguccaccauccagcggaaguacaagggcaucaagauccaggagggggucguggacuacggcgcccgcuucuacuucuacaccagcaagacgaccguggccucccugaucaacacccucaacgaccugaacgagacccuggucacgaugccgcucggguacgugacccacggccugaaccuggaggaggcggcccgguacaugcgcagccucaaggugcccgccaccgucuccgugagcucccccgacgccgugaccgccuacaacggguaccugacgagcuccagcaagacccccgaggagcacuucaucgagaccaucucccuggcgggcagcuacaaggacuggagcuacuccggccagagcacccagcucgggaucgaguuccugaagcggggcgacaaguccgucuacuacacgagcaacccgaccaccuuccaccuggacggggaggugaucaccuucgacaaccucaagacgcugcugucccuccgcgaggugcggaccaucaaggucuucaccaccguggacaacaucaaccugcacacgcagguggucgacaugagcaugaccuacggccagcaguucggccccaccuaccuggacggggccgacgugaccaagaucaagccccacaacucccacgagggcaagacguucuacgugcucccgaacgacgacacccugcgcgucgaggccuucgaguacuaccacaccaccgaccccagcuuccuggggcgguacauguccgcccucaaccacacgaagaaguggaaguacccccaggugaacggccugaccagcaucaagugggccgacaacaacugcuaccuggcgaccgcccuccugacccugcagcagaucgagcucaaguucaaccccccggcccugcaggacgccuacuaccgcgcgcgggccggggaggccgccaacuucugcgcccugauccucgcguacugcaacaagacggugggcgagcugggcgacguccgcgagaccauguccuaccuguuccagcacgccaaccucgacagcugcaagcgggugcugaacgucgugugcaagaccugcgggcagcagcagaccacccugaagggcguggaggccgucauguacauggggacgcucuccuacgagcaguucaagaagggcgugcagauccccugcaccugcgggaagcaggccaccaaguaccuggugcagcaggagagccccuucgucaugauguccgcccccccggcgcaguacgagcugaagcacggcaccuucacgugcgccagcgaguacaccggcaacuaccagugcgggcacuacaagcacaucaccuccaaggagacccucuacugcaucgacggcgcccugcugacgaagagcagcgaguacaaggggcccaucaccgacguguucuacaaggagaacuccuacaccaccacgaucaagcccgugaccuacaagcucgacggcgucgugugcaccgagaucgaccccaagcuggacaacuacuacaagaaggacaacagcuacuucaccgagcagccgaucgaccuggugcccaaccagcccuaccccaacgccuccuucgacaacuucaaguucgucugcgacaacaucaaguucgccgacgaccucaaccagcugacgggguacaagaagccggcgagccgcgagcugaaggugaccuucuuccccgaccucaacggcgacguggucgccaucgacuacaagcacuacacccccuccuucaagaagggcgccaagcugcugcacaagcccaucguguggcacgugaacaacgccaccaacaaggcgacguacaagccgaacaccuggugcauccggugccucuggagcaccaagcccgucgagaccuccaacagcuucgacgugcugaaguccgaggacgcccaggggauggacaaccuggccugcgaggaccucaagcccgugagcgaggaggucguggagaaccccacgauccagaaggacgugcuggagugcaacgucaagaccaccgagguggugggcgacaucauccugaagccggccaacaacucccucaagaucaccgaggaggucgggcacacggaccugauggccgcguacguggacaacagcucccugaccaucaagaagcccaacgagcucagccgcgugcugggccugaagacccucgccacccacgggcuggccgccgucaacuccgugcccugggacacgaucgccaacuacgcgaagccguuccugaacaagguggucagcaccaccaccaacaucgugacgcgcugccucaaccgggugugcaccaacuacaugcccuacuucuucacccugcugcuccagcugugcaccuucacccgcuccacgaacagccggaucaaggccuccaugcccaccaccaucgccaagaacaccgucaagagcgugggcaaguucugccuggaggccagcuucaacuaccucaagucccccaacuucagcaagcugaucaacaucaucaucugguuccugcuccuguccgugugccugggcagccucaucuacuccacggccgcgcuggggguccugaugagcaaccucggcaugccguccuacugcaccggguaccgcgagggcuaccugaacagcaccaacgugaccaucgccacguacugcaccggcuccauccccugcagcgugugccuguccgggcucgacagccuggacaccuacuccagccuggagaccauccagaucacgaucuccagcuucaagugggaccucaccgccuucggccuggucgccgagugguuccuggccuacauccucuucacccgguucuucuacgugcuggggcuggcggccaucaugcagcucuucuucuccuacuucgccgugcacuucaucagcaacuccuggcugauguggcugaucaucaaccugguccagauggcccccaucagcgcgauggugcgcauguacaucuucuucgccagcuucuacuacguguggaaguccuacguccacgugguggacggcugcaacagcuccaccugcaugaugugcuacaagcggaaccgcgccacgcgggucgagugcaccaccaucgugaacgggguccgccggagcuucuacguguacgccaacggcggcaagggguucugcaagcuccacaacuggaacugcgugaacugcgacaccuucugcgccggcuccacguucaucagcgacgaggucgcgcgcgaccugucccugcaguucaagcggcccaucaacccgaccgaccagagcuccuacaucguggacagcgugaccgucaagaacggguccauccaccucuacuucgacaaggccggccagaagaccuacgagcgccacagccugucccacuucgugaaccuggacaaccuccgggccaacaacacgaaggggagccugcccaucaacgugaucgucuucgacggcaaguccaagugcgaggagagcuccgccaagagcgccuccguguacuacagccagcugaugugccagcccauccuccugcuggaccaggcgcucgugagcgacgucggcgacuccgccgagguggccgugaagauguucgacgccuacgucaacaccuucagcuccaccuucaacgugcccauggagaagcugaagacccugguggccacggcggaggccgagcucgccaagaacgucagccuggacaacgugcuguccaccuucaucagcgccgcgcgccagggguucguggacuccgacgucgagaccaaggacgugguggagugccucaagcugagccaccaguccgacaucgaggucaccggcgacagcugcaacaacuacaugcugacguacaacaagguggagaacaugaccccgcgggaccucggggccugcaucgacugcuccgcccgccacaucaacgcccagguggccaagagccacaacaucgcgcugaucuggaacgucaaggacuucaugucccugagcgagcagcuccggaagcagauccgcuccgccgccaagaagaacaaccugcccuucaagcugaccugcgccaccacgcgccagguggugaacgucgugaccaccaagaucgcccucaagggcgggugaggacuaguuauaagacugacuagcccgaugggccucccaacgggcccuccuccccuccuugcaccgagauuaauaaaaaaaaaaaaaaaaaaaaaaaaaaaaaaaaaaaaaaaaaaaaaaaaaaaaaaaaaaaaaaaaugcaucccccccccccccccccccccccccccccccaaaggcucuuuucagagccaccagaauu

SEQ ID NO: 21639 - RNA, 6058 nt, Artificial Sequence
  SARS-CoV-2__MT811659.1__non-structural protein 3 (NSP3) mRNA gc
aggagaaagcuuaccauggcccccaccaaggugaccuucggcgccgacacggucaucgaggugcagggguacaagagcgugaacaucaccuucgagcuggacgagcgcaucgacaagguccucaacgagaagugcuccgcguacaccguggagcugggcaccgaggugaacgaguucgccugcgucguggccgacgccgugaucaagacgcugcagccggucagcgagcuccugaccccccuggggaucgaccucgacgagugguccauggccaccuacuaccuguucgacgagagcggcgaguucaagcuggcgucccacauguacugcagcuucuacccccccgacgaggacgaggaggagggggacugcgaggaggaggaguucgagccguccacccaguacgaguacggcacggaggacgacuaccagggcaagccccucgaguucggggccaccagcgccgcccugcagcccgaggaggagcaggaggaggacuggcuggacgacgacucccagcagaccgugggccagcaggacgggagcgaggacaaccagaccacgaccauccagaccaucguggagguccagccccagcucgagauggagcugaccccgguggugcagacgaucgaggucaacuccuucagcggcuaccugaagcucaccgacaacguguacaucaagaacgcggacaucguggaggaggccaagaaggucaagcccaccgugguggucaacgccgccaacguguaccugaagcacgggggcggcguggccggggcgcugaacaaggccaccaacaacgccaugcaggucgaguccgacgacuacaucgccacgaacggcccccucaagguggggggcagcugcguccuguccggccacaaccuggccaagcacugccuccacgugguggggcccaacgucaacaagggcgaggacauccagcugcugaagagcgcguacgagaacuucaaccagcacgaggugcuccuggccccgcugcucuccgccgggaucuucggcgccgaccccauccacagccugcgggugugcgucgacaccgugcgcaccaacguguaccuggccgucuucgacaagaaccucuacgacaagcugguguccagcuuccuggagaugaagagcgagaagcagguggagcagaagaucgcggagauccccaaggaggaggucaagcccuucaucaccgaguccaagccgagcguggagcagcggaagcaggacgacaagaagaucaaggccugcguggaggaggucacgaccacccucgaggagaccaaguuccugacggagaaccugcuccuguacaucgacaucaacgggaaccugcaccccgacuccgccacccucgugagcgacaucgacaucaccuuccugaagaaggacgcccccuacaucgugggcgacgucgugcaggagggcgugcugaccgccgucgugauccccacgaagaaggcggggggcaccaccgagaugcucgccaaggcccugcgcaaggugccgaccgacaacuacaucacgaccuaccccgggcagggccugaacggguacaccgucgaggaggccaagaccgugcucaagaagugcaaguccgcguucuacauccugcccagcaucaucuccaacgagaagcaggagauccugggcaccgugagcuggaaccuccgggagaugcuggcccacgccgaggagacgcgcaagcugaugcccgucugcguggagaccaaggccaucguguccaccauccagcggaaguacaagggcaucaagauccaggagggggucguggacuacggcgcccgcuucuacuucuacaccagcaagacgaccguggcgucccugaucaacacccucaacgaccugaacgagacccuggucacgaugccgcucggguacgugacccacggccugaaccuggaggaggccgcccgguacaugcgcagccucaaggugcccgccaccgucuccgugagcucccccgacgccgugaccgcguacaacggguaccugacgagcuccagcaagacccccgaggagcacuucaucgagaccaucucccuggccggcagcuacaaggacuggagcuacuccggccagagcacccagcucgggaucgaguuccugaagcggggcgacaaguccgucuacuacacgagcaacccgaccaccuuccaccuggacggggaggugaucaccuucgacaaccucaagacgcugcugucccuccgcgaggugcggaccaucaaggucuucaccaccguggacaacaucaaccugcacacgcagguggucgacaugagcaugaccuacggccagcaguucggccccaccuaccuggacggggccgacgugaccaagaucaagccccacaacucccacgagggcaagacguucuacgugcucccgaacgacgacacccugcgcgucgaggccuucgaguacuaccacaccaccgaccccagcuuccuggggcgguacauguccgcccucaaccacacgaagaaguggaaguacccccaggugaacggccugaccagcaucaagugggcggacaacaacugcuaccuggccaccgcccuccugacccugcagcagaucgagcucaaguucaaccccccggcccugcaggacgcguacuaccgcgcccgggccggggaggccgccaacuucugcgcgcugauccucgccuacugcaacaagacggugggcgagcugggcgacguccgcgagaccauguccuaccuguuccagcacgccaaccucgacagcugcaagcgggugcugaacgucgugugcaagaccugcgggcagcagcagaccacccugaagggcguggaggccgucauguacauggggacgcucuccuacgagcaguucaagaagggcgugcagauccccugcaccugcgggaagcaggccaccaaguaccuggugcagcaggagagccccuucgucaugauguccgcgcccccggcccaguacgagcugaagcacggcaccuucacgugcgccagcgaguacaccggcaacuaccagugcgggcacuacaagcacaucaccuccaaggagacccucuacugcaucgacggcgcccugcugacgaagagcagcgaguacaaggggcccaucaccgacguguucuacaaggagaacuccuacaccaccacgaucaagcccgugaccuacaagcucgacggcgucgugugcaccgagaucgaccccaagcuggacaacuacuacaagaaggacaacagcuacuucaccgagcagccgaucgaccuggugcccaaccagcccuaccccaacgccuccuucgacaacuucaaguucgucugcgacaacaucaaguucgcggacgaccucaaccagcugacgggguacaagaagccggccagccgcgagcugaaggugaccuucuuccccgaccucaacggcgacguggucgccaucgacuacaagcacuacacccccuccuucaagaagggcgccaagcugcugcacaagcccaucguguggcacgugaacaacgcgaccaacaaggccacguacaagccgaacaccuggugcauccggugccucuggagcaccaagcccgucgagaccuccaacagcuucgacgugcugaaguccgaggacgcccaggggauggacaaccuggccugcgaggaccucaagcccgugagcgaggaggucguggagaaccccacgauccagaaggacgugcuggagugcaacgucaagaccaccgagguggugggcgacaucauccugaagccggccaacaacucccucaagaucaccgaggaggucgggcacacggaccugauggcggccuacguggacaacagcucccugaccaucaagaagcccaacgagcucagccgcgugcugggccugaagacccucgccacccacgggcuggccgccgucaacuccgugcccugggacacgaucgcgaacuacgccaagccguuccugaacaagguggucagcaccaccaccaacaucgugacgcgcugccucaaccgggugugcaccaacuacaugcccuacuucuucacccugcugcuccagcugugcaccuucacccgcuccacgaacagccggaucaaggccuccaugcccaccaccaucgccaagaacaccgucaagagcgugggcaaguucugccuggaggccagcuucaacuaccucaagucccccaacuucagcaagcugaucaacaucaucaucugguuccugcuccuguccgugugccugggcagccucaucuacuccacggcggcccuggggguccugaugagcaaccucggcaugccguccuacugcaccggguaccgcgagggcuaccugaacagcaccaacgugaccaucgccacguacugcaccggcuccauccccugcagcgugugccuguccgggcucgacagccuggacaccuaccccucccuggagaccauccagaucacgaucagcuccuucaagugggaccucaccgccuucggccuggucgccgagugguuccuggcguacauccucuucacccgguucuucuacgugcuggggcuggccgccaucaugcagcucuucuucagcuacuucgccgugcacuucaucuccaacagcuggcugauguggcugaucaucaaccugguccagauggcgcccaucuccgccauggugcgcauguacaucuucuucgccagcuucuacuacguguggaagagcuacguccacgugguggacggcugcaacuccagcaccugcaugaugugcuacaagcggaaccgcgccacgcgggucgagugcaccaccaucgugaacgggguccgccgguccuucuacguguacgccaacggcggcaagggguucugcaagcuccacaacuggaacugcgugaacugcgacaccuucugcgcgggcagcacguucaucuccgacgaggucgcccgcgaccugagccugcaguucaagcggccgaucaaccccaccgaccaguccagcuacaucguggacuccgugaccgucaagaacgggagcauccaccucuacuucgacaaggccggccagaagaccuacgagcgccacucccugagccacuucgugaaccuggacaaccuccgggccaacaacacgaaggggucccugcccaucaacgugaucgucuucgacggcaagagcaagugcgaggaguccagcgccaaguccgcgagcguguacuacucccagcugaugugccagcccauccuccugcuggaccaggcccucgugagcgacgucggcgacagcgccgagguggccgugaagauguucgacgccuacgucaacaccuucuccagcaccuucaacgugccgauggagaagcugaagacccugguggcgacggccgaggccgagcucgccaagaacgucucccuggacaacgugcugagcaccuucaucuccgcggcccgccagggguucguggacagcgacgucgagaccaaggacgugguggagugccucaagcugucccaccagagcgacaucgaggucaccggcgacuccugcaacaacuacaugcugacguacaacaagguggagaacaugaccccccgggaccucggggccugcaucgacugcagcgcccgccacaucaacgcccagguggcgaagucccacaacaucgcccugaucuggaacgucaaggacuucaugagccuguccgagcagcuccggaagcagauccgcagcgccgccaagaagaacaaccugcccuucaagcugaccugcgccaccacgcgccagguggugaacgucgugaccaccaagaucgcgcucaagggcgggugaggacuaguuauaagacugacuagcccgaugggccucccaacgggcccuccuccccuccuugcaccgagauuaauaaaaaaaaaaaaaaaaaaaaaaaaaaaaaaaaaaaaaaaaaaaaaaaaaaaaaaaaaaaaaaaaugcaucccccccccccccccccccccccccccccccaaaggcucuuuucagagccaccagaauu

SEQ ID NO: 21640 - RNA, 6058 nt, Artificial Sequence
  SARS-CoV-2__MT811670.1__non-structural protein 3 (NSP3) mRNA gc
aggagaaagcuuaccauggcccccaccaaggugaccuucggcgacgacacggucaucgaggugcagggguacaagagcgugaacaucaccuucgagcuggacgagcgcaucgacaagguccucaacgagaagugcuccgccuacaccguggagcugggcaccgaggugaacgaguucgcgugcgucguggccgacgccgugaucaagacgcugcagccggucagcgagcuccugaccccccuggggaucgaccucgacgagugguccauggccaccuacuaccuguucgacgagagcggcgaguucaagcuggccucccacauguacugcagcuucuacccccccgacgaggacgaggaggagggggacugcgaggaggaggaguucgagccguccacccaguacgaguacggcacggaggacgacuaccagggcaagccccucgaguucggggcgaccagcgccgcccugcagcccgaggaggagcaggaggaggacuggcuggacgacgacucccagcagaccgugggccagcaggacgggagcgaggacaaccagaccacgaccauccagaccaucguggagguccagccccagcucgagauggagcugaccccgguggugcagacgaucgaggucaacuccuucagcggcuaccugaagcucaccgacaacguguacaucaagaacgccgacaucguggaggaggcgaagaaggucaagcccaccgugguggucaacgccgccaacguguaccugaagcacgggggcggcguggccggggcccugaacaaggcgaccaacaacgccaugcaggucgaguccgacgacuacaucgccacgaacggcccccucaagguggggggcagcugcguccuguccggccacaaccuggccaagcacugccuccacgugguggggcccaacgucaacaagggcgaggacauccagcugcugaagagcgccuacgagaacuucaaccagcacgaggugcuccuggcgccgcugcucuccgccgggaucuucggcgccgaccccauccacagccugcgggugugcgucgacaccgugcgcaccaacguguaccuggccgucuucgacaagaaccucuacgacaagcugguguccagcuuccuggagaugaagagcgagaagcagguggagcagaacaucgccgagauccccaaggaggaggucaagcccuucaucaccgaguccaagccgagcguggagcagcggaagcaggacgacaagaagaucaaggcgugcguggaggaggucacgaccacccucgaggagaccaaguuccugacggagaaccugcuccuguacaucgacaucaacgggaaccugcaccccgacuccgccacccucgugagcgacaucgacaucaccuuccugaagaaggacgcccccuacaucgugggcgacgucgugcaggagggcgugcugaccgccgucgugauccccacgaagaaggccgggggcaccaccgagaugcucgcgaaggcccugcgcaaggugccgaccgacaacuacaucacgaccuaccccgggcagggccugaacggguacaccgucgaggaggccaagaccgugcucaagaagugcaaguccgccuucuacauccugcccagcaucaucuccaacgagaagcaggagauccugggcaccgugagcuggaaccuccgggagaugcuggcgcacgccgaggagacgcgcaagcugaugcccgucugcguggagaccaaggccaucguguccaccauccagcggaaguacaagggcaucaagauccaggagggggucguggacuacggcgcccgcuucuacuucuacaccagcaagacgaccguggccucccugaucaacacccucaacgaccugaacgagacccuggucacgaugccgcucggguacgugacccacggccugaaccuggaggaggcggcccgguacaugcgcagccucaaggugcccgccaccgucuccgugagcucccccgacgccgugaccgccuacaacggguaccugacgagcuccagcaagacccccgaggagcacuucaucgagaccaucucccuggcgggcagcuacaaggacuggagcuacuccggccagagcacccagcucgggaucgaguuccugaagcggggcgacaaguccgucuacuacacgagcaacccgaccaccuuccaccuggacggggaggugaucaccuucgacaaccucaagacgcugcugucccuccgcgaggugcggaccaucaaggucuucaccaccguggacaacaucaaccugcacacgcagguggucgacaugagcaugaccuacggccagcaguucggccccaccuaccuggacggggccgacgugaccaagaucaagccccacaacucccacgagggcaagacguucuacgugcucccgaacgacgacacccugcgcgucgaggccuucgaguacuaccacaccaccgaccccagcuuccuggggcgguacauguccgcccucaaccacacgaagaaguggaaguacccccaggugaacggccugaccagcaucaagugggccgacaacaacugcuaccuggcgaccgcccuccugacccugcagcagaucgagcucaaguucaaccccccggcccugcaggacgccuacuaccgcgcgcgggccggggaggccgccaacuucugcgcccugauccucgcguacugcaacaagacggugggcgagcugggcgacguccgcgagaccauguccuaccuguuccagcacgccaaccucgacagcugcaagcgggugcugaacgucgugugcaagaccugcgggcagcagcagaccacccugaagggcguggaggccgucauguacauggggacgcucuccuacgagcaguucaagaagggcgugcagauccccugcaccugcgggaagcaggccaccaaguaccuggugcagcaggagagccccuucgucaugauguccgcccccccggcgcaguacgagcugaagcacggcaccuucacgugcgccagcgaguacaccggcaacuaccagugcgggcacuacaagcacaucaccuccaaggagacccucuacugcaucgacggcgcccugcugacgaagagcagcgaguacaaggggcccaucaccgacguguucuacaaggagaacuccuacaccaccacgaucaagcccgugaccuacaagcucgacggcgucgugugcaccgagaucgaccccaagcuggacaacuacuacaagaaggacaacagcuacuucaccgagcagccgaucgaccuggugcccaaccagcccuaccccaacgccuccuucgacaacuucaaguucgucugcgacaacaucaaguucgccgacgaccucaaccagcugacgggguacaagaagccggcgagccgcgagcugaaggugaccuucuuccccgaccucaacggcgacguggucgccaucgacuacaagcacuacacccccuccuucaagaagggcgccaagcugcugcacaagcccaucguguggcacgugaacaacgccaccaacaaggcgacguacaagccgaacaccuggugcauccggugccucuggagcaccaagcccgucgagaccuccaacagcuucgacgugcugaaguccgaggacgcccaggggauggacaaccuggccugcgaggaccucaagcccgugagcgaggaggucguggagaaccccacgauccagaaggacgugcuggagugcaacgucaagaccaccgagguggugggcgacaucauccugaagccggccaacaacucccucaagaucaccgaggaggucgggcacacggaccugauggccgcguacguggacaacagcucccugaccaucaagaagcccaacgagcucagccgcgugcugggccugaagacccucgccacccacgggcuggccgccgucaacuccgugcccugggacacgaucgccaacuacgcgaagccguuccugaacaagguggucagcaccaccaccaacaucgugacgcgcugccucaaccgggugugcaccaacuacaugcccuacuucuucacccugcugcuccagcugugcaccuucacccgcuccacgaacagccggaucaaggccuccaugcccaccaccaucgccaagaacaccgucaagagcgugggcaaguucugccuggaggccagcuucaacuaccucaagucccccaacuucagcaagcugaucaacaucaucaucugguuccugcuccuguccgugugccugggcagccucaucuacuccacggccgcgcuggggguccugaugagcaaccucggcaugccguccuacugcaccggguaccgcgagggcuaccugaacagcaccaacgugaccaucgccacguacugcaccggcuccauccccugcagcgugugccuguccgggcucgacagccuggacaccuaccccucccuggagaccauccagaucacgaucagcuccuucaagugggaccucaccgccuucggccuggucgccgagugguuccuggccuacauccucuucacccgguucuucuacgugcuggggcuggcggccaucaugcagcucuucuucagcuacuucgccgugcacuucaucuccaacagcuggcugauguggcugaucaucaaccugguccagauggcccccaucuccgcgauggugcgcauguacaucuucuucgccagcuucuacuacguguggaagagcuacguccacgugguggacggcugcaacuccagcaccugcaugaugugcuacaagcggaaccgcgccacgcgggucgagugcaccaccaucgugaacgggguccgccgguccuucuacguguacgccaacggcggcaagggguucugcaagcuccacaacuggaacugcgugaacugcgacaccuucugcgccggcagcacguucaucuccgacgaggucgcgcgcgaccugagccugcaguucaagcggccgaucaaccccaccgaccaguccagcuacaucguggacuccgugaccgucaagaacgggagcauccaccucuacuucgacaaggccggccagaagaccuacgagcgccacucccugagccacuucgugaaccuggacaaccuccgggccaacaacacgaaggggucccugcccaucaacgugaucgucuucgacggcaagagcaagugcgaggaguccagcgccaaguccgccagcguguacuacucccagcugaugugccagcccauccuccugcuggaccaggcgcucgugagcgacgucggcgacagcgccgagguggccgugaagauguucgacgccuacgucaacaccuucuccagcaccuucaacgugccgauggagaagcugaagacccugguggccacggcggaggccgagcucgccaagaacgucucccuggacaacgugcugagcaccuucaucuccgccgcgcgccagggguucguggacagcgacgucgagaccaaggacgugguggagugccucaagcugucccaccagagcgacaucgaggucaccggcgacuccugcaacaacuacaugcugacguacaacaagguggagaacaugaccccccgggaccucggggccugcaucgacugcagcgcccgccacaucaacgcccagguggccaagucccacaacaucgcgcugaucuggaacgucaaggacuucaugagccuguccgagcagcuccggaagcagauccgcagcgccgccaagaagaacaaccugcccuucaagcugaccugcgccaccacgcgccagguggugaacgucgugaccaccaagaucgcccucaagggcgggugaggacuaguuauaagacugacuagcccgaugggccucccaacgggcccuccuccccuccuugcaccgagauuaauaaaaaaaaaaaaaaaaaaaaaaaaaaaaaaaaaaaaaaaaaaaaaaaaaaaaaaaaaaaaaaaaugcaucccccccccccccccccccccccccccccccaaaggcucuuuucagagccaccagaauu

SEQ ID NO: 21641 - RNA, 6058 nt, Artificial Sequence
  SARS-CoV-2__MT811680.1__non-structural protein 3 (NSP3) mRNA gc
aggagaaagcuuaccauggcccccaccaaggugaccuucggcgacgacacggucaucgaggugcagggguacaagagcgugaacaucaccuucgagcuggacgagcgcaucgacaagguccucaacgagaagugcuccgccuacaccguggagcugggcaccgaggugaacgaguucgcgugcgucguggccgacgccgugaucaagacgcugcagccggucagcgagcuccugaccccccuggggaucgaccucgacgagugguccauggccaccuacuaccuguucgacgagagcggcgaguucaagcuggccucccacauguacugcagcuucuacccccccgacgaggacgaggaggagggggacugcgaggaggaggaguucgagccguccacccaguacgaguacggcacggaggacgacuaccagggcaagccccucgaguucggggcgaccagcgccgcccugcagcccgaggaggagcaggaggaggacuggcuggacgacgacucccagcagaccgugggccagcaggacgggagcgaggacaaccagaccacgaccauccagaccaucguggagguccagccccagcucgagauggagcugaccccgguggugcagacgaucgaggucaacuccuucagcggcuaccugaagcucaccgacaacguguacaucaagaacgccgacaucguggaggaggcgaagaaggucaagcccaccgugguggucaacgccgccaacguguaccugaagcacgggggcggcguggccggggcccugaacaaggcgaccaacaacgccaugcaggucgaguccgacgacuacaucgccacgaacggcccccucaagguggggggcagcugcguccuguccggccacaaccuggccaagcacugccuccacgugguggggcccaacgucaacaagggcgaggacauccagcugcugaagagcgccuacgagaacuucaaccagcacgaggugcuccuggcgccgcugcucuccgccgggaucuucggcgccgaccugauccacagccugcgggugugcgucgacaccgugcgcaccaacguguaccucgccgucuucgacaagaaccuguacgacaagcugguguccagcuuccucgagaugaagagcgagaagcagguggagcagaagaucgccgagauccccaaggaggaggucaagcccuucaucaccgaguccaagcccagcguggagcagcggaagcaggacgacaagaagaucaaggcgugcguggaggaggucacgaccacccuggaggagaccaaguuccugacggagaaccuccugcuguacaucgacaucaacgggaaccuccacccggacuccgccacccuggugagcgacaucgacaucaccuuccugaagaaggacgcccccuacaucgugggcgacgucgugcaggagggcgugcucaccgccgucgugauccccacgaagaaggccgggggcaccaccgagaugcuggcgaaggcccugcgcaaggugcccaccgacaacuacaucacgaccuacccggggcagggccucaacggguacaccgucgaggaggccaagaccgugcugaagaagugcaaguccgccuucuacauccugcccagcaucaucuccaacgagaagcaggagauccucggcaccgugagcuggaaccugcgggagaugcuggcgcacgccgaggagacgcgcaagcugaugcccgucugcguggagaccaaggccaucguguccaccauccagcggaaguacaagggcaucaagauccaggagggggucguggacuacggcgcccgcuucuacuucuacaccagcaagacgaccguggccucccucaucaacacccugaacgaccugaacgagacccucgucacgaugccccugggguacgugacccacggccugaaccucgaggaggcggcccgguacaugcgcagccugaaggugccggccaccgucuccgugagcucccccgacgccgugaccgccuacaacggguaccugacgagcuccagcaagacccccgaggagcacuucaucgagaccaucucccucgcgggcagcuacaaggacuggagcuacuccggccagagcacccagcuggggaucgaguuccugaagcggggcgacaaguccgucuacuacacgagcaaccccaccaccuuccaccucgacggggaggugaucaccuucgacaaccugaagacgcugcucucccugcgcgaggugcggaccaucaaggucuucaccaccguggacaacaucaaccugcacacgcagguggucgacaugagcaugaccuacggccagcaguucggcccgaccuaccucgacggggccgacgugaccaagaucaagccccacaacucccacgagggcaagacguucuacgugcugcccaacgacgacacccugcgcgucgaggccuucgaguacuaccacaccaccgacccgagcuuccucgggcgguacauguccgcccugaaccacacgaagaaguggaaguacccccaggugaacggccugaccagcaucaagugggccgacaacaacugcuaccucgcgaccgcccugcugacccuccagcagaucgagcugaaguucaacccccccgcccugcaggacgccuacuaccgcgcgcgggccggggaggccgccaacuucugcgcccucauccuggcguacugcaacaagacggugggcgagcugggcgacguccgcgagaccauguccuaccucuuccagcacgccaaccuggacagcugcaagcgggugcugaacgucgugugcaagaccugcgggcagcagcagaccacccucaagggcguggaggccgucauguacauggggacgcuguccuacgagcaguucaagaagggcgugcagaucccgugcaccugcgggaagcaggccaccaaguaccuggugcagcaggagagccccuucgucaugauguccgccccccccgcgcaguacgagcucaagcacggcaccuucacgugcgccagcgaguacaccggcaacuaccagugcgggcacuacaagcacaucaccuccaaggagacccuguacugcaucgacggcgcccugcucacgaagagcagcgaguacaaggggccgaucaccgacguguucuacaaggagaacuccuacaccaccacgaucaagcccgugaccuacaagcuggacggcgucgugugcaccgagaucgaccccaagcuggacaacuacuacaagaaggacaacagcuacuucaccgagcagcccaucgaccucgugccgaaccagcccuaccccaacgccuccuucgacaacuucaaguucgucugcgacaacaucaaguucgccgacgaccugaaccagcugacgggguacaagaagcccgcgagccgcgagcucaaggugaccuucuucccggaccugaacggcgacguggucgccaucgacuacaagcacuacacccccuccuucaagaagggcgccaagcugcuccacaagcccaucguguggcacgugaacaacgccaccaacaaggcgacguacaagcccaacaccuggugcauccggugccuguggagcaccaagccggucgagaccuccaacagcuucgacgugcugaaguccgaggacgcccaggggauggacaaccucgccugcgaggaccugaagcccgugagcgaggaggucguggagaaccccacgauccagaaggacgugcuggagugcaacgucaagaccaccgagguggugggcgacaucauccucaagcccgccaacaacucccugaagaucaccgaggaggucgggcacacggaccugauggccgcguacguggacaacagcucccucaccaucaagaagccgaacgagcugagccgcgugcugggccucaagacccuggccacccacgggcuggccgccgucaacuccgugcccugggacacgaucgccaacuacgcgaagcccuuccucaacaagguggucagcaccaccaccaacaucgugacgcgcugccugaaccgggugugcaccaacuacaugccguacuucuucacccugcuccugcagcugugcaccuucacccgcuccacgaacagccggaucaaggccuccaugcccaccaccaucgccaagaacaccgucaagagcgugggcaaguucugccucgaggccagcuucaacuaccugaagucccccaacuucagcaagcugaucaacaucaucaucugguuccuccugcuguccgugugccucggcagccugaucuacuccacggccgcgcuggggguccucaugagcaaccugggcaugcccuccuacugcaccggguaccgcgagggcuaccugaacagcaccaacgugaccaucgccacguacugcaccggcuccaucccgugcagcgugugccucuccgggcuggacagccuggacaccuaccccucccucgagaccauccagaucacgaucagcuccuucaagugggaccugaccgccuucggccuggucgccgagugguuccucgccuacauccuguucacccgguucuucuacgugcuggggcucgcggccaucaugcagcuguucuucagcuacuucgccgugcacuucaucuccaacagcuggcugauguggcugaucaucaaccucguccagauggcccccaucuccgcgauggugcgcauguacaucuucuucgccagcuucuacuacguguggaagagcuacguccacgugguggacggcugcaacuccagcaccugcaugaugugcuacaagcggaaccgcgccacgcgggucgagugcaccaccaucgugaacgggguccgccgguccuucuacguguacgccaacggcggcaagggguucugcaagcugcacaacuggaacugcgugaacugcgacaccuucugcgccggcagcacguucaucuccgacgaggucgcgcgcgaccugagccuccaguucaagcggcccaucaacccgaccgaccaguccagcuacaucguggacuccgugaccgucaagaacgggagcauccaccuguacuucgacaaggccggccagaagaccuacgagcgccacucccugagccacuucgugaaccucgacaaccugcgggccaacaacacgaaggggucccugcccaucaacgugaucgucuucgacggcaagagcaagugcgaggaguccagcgccaaguccgccagcguguacuacucccagcucaugugccagcccauccugcugcucgaccaggcgcuggugagcgacgucggcgacagcgccgagguggccgugaagauguucgacgccuacgucaacaccuucuccagcaccuucaacgugcccauggagaagcugaagacccucguggccacggcggaggccgagcuggccaagaacgucucccuggacaacgugcucagcaccuucaucuccgccgcgcgccagggguucguggacagcgacgucgagaccaaggacgugguggagugccugaagcugucccaccagagcgacaucgaggucaccggcgacuccugcaacaacuacaugcucacguacaacaagguggagaacaugaccccgcgggaccugggggccugcaucgacugcagcgcccgccacaucaacgcccagguggccaagucccacaacaucgcgcugaucuggaacgucaaggacuucaugagccucuccgagcagcugcggaagcagauccgcagcgccgccaagaagaacaaccugcccuucaagcucaccugcgccaccacgcgccagguggugaacgucgugaccaccaagaucgcccugaagggcgggugaggacuaguuauaagacugacuagcccgaugggccucccaacgggcccuccuccccuccuugcaccgagauuaauaaaaaaaaaaaaaaaaaaaaaaaaaaaaaaaaaaaaaaaaaaaaaaaaaaaaaaaaaaaaaaaaugcaucccccccccccccccccccccccccccccccaaaggcucuuuucagagccaccagaauu

SEQ ID NO: 21642 - RNA, 6058 nt, Artificial Sequence
  SARS-CoV-2__MT811683.1__non-structural protein 3 (NSP3) mRNA gc
aggagaaagcuuaccauggcccccaccaaggugaccuucggcgacgacacggucaucgaggugcagggguacaagagcgugaacaucaccuucgagcuggacgagcgcaucgacaagguccucaacgagaagugcuccgccuacaccguggagcugggcaccgaggugaacgaguucgcgugcgucguggccgacgccgugaucaagacgcugcagccggucagcgagcuccugaccccccuggggaucgaccucgacgagugguccauggccaccuacuaccuguucgacgagagcggcgaguucaagcuggccucccacauguacugcagcuucuacccccccgacgaggacgaggaggagggggacugcgaggaggaggaguucgagccguccacccaguacgaguacggcacggaggacgacuaccagggcaagccccucgaguucggggcgaccagcgccgcccugcagcccgaggaggagcaggaggaggacuggcuggacgacgacucccagcagaccgugggccagcaggacgggagcgaggacaaccagaccacgaccauccagaccaucguggagguccagccccagcucgagauggagcugaccccgguggugcagacgaucgaggucaacuccuucagcggcuaccugaagcucaccgacaacguguacaucaagaacgccgacaucguggaggaggcgaagaaggucaagcccaccgugguggucaacgccgccaacguguaccugaagcacgggggcggcguggccggggcccugaacaaggcgaccaacaacgccaugcaggucgaguccgacgacuacaucgccacgaacggcccccucaagguggggggcagcugcguccuguccggccacaaccuggccaagcacugccuccacgugguggggcccaacgucaacaagggcgaggacauccagcugcugaagagcgccuacgagaacuucaaccagcacgaggugcuccuggcgccgcugcucuccgccgggaucuucggcgccgaccccauccacagccugcgggugugcgucgacaccgugcgcaccaacguguaccuggccgucuucgacaagaaccucuacgacaagcugguguccagcuuccuggagaugaagagcgagaagcagguggagcagaagaucgccgagauccccaaggaggaggucaagcccuucaucaccgaguccaagccgagcguggagcagcggaagcaggacgacaagaagaucaaggcgugcguggaggaggucacgaccacccucgaggagaccaaguuccugacggagaaccugcuccuguacaucgacaucaacgggaaccugcaccccgacuccgccacccucgugagcgacaucgacaucaccuuccugaagaaggacgcccccuacaucgugggcgacgucgugcaggagggcgugcugaccgccgucgugauccccacgaagaaggccgggggcaccaccgagaugcucgcgaaggcccugcgcaaggugccgaccgacaacuacaucacgaccuaccccgggcagggccugaacggguacaccgucgaggaggccaagaccgugcucaagaagugcaaguccgccuucuacauccugcccagcaucaucuccaacgagaagcaggagauccugggcaccgugagcuggaaccuccgggagaugcuggcgcacgccgaggagacgcgcaagcugaugcccgucugcguggagaccaaggccaucguguccaccauccagcggaaguacaagggcaucaagauccaggagggggucguggacuacggcgcccgcuucuacuucuacaccagcaagacgaccguggccucccugaucaacacccucaacgaccugaacgagacccuggucacgaugccgcucggguacgugacccacggccugaaccuggaggaggcggcccgguacaugcgcagccucaaggugcccgccaccgucuccgugagcucccccgacgccgugaccgccuacaacggguaccugacgagcuccagcaagacccccgaggagcacuucaucgagaccaucucccuggcgggcagcuacaaggacuggagcuacuccggccagagcacccagcucgggaucgaguuccugaagcggggcgacaaguccgucuacuacacgagcaacccgaccaccuuccaccuggacggggaggugaucaccuucgacaaccucaagacgcugcugucccuccgcgaggugcggaccaucaaggucuucaccaccguggacaacaucaaccugcacacgcagguggucgacaugagcaugaccuacggccagcaguucggccccaccuaccuggacggggccgacgugaccaagaucaagccccacaacucccacgagggcaagacguucuacgugcucccgaacgacgacacccugcgcgucgaggccuucgaguacuaccacaccaccgaccccagcuuccuggggcgguacauguccgcccucaaccacacgaagaaguggaaguacccccaggugaacggccugaccagcaucaagugggccgacaacaacugcuaccuggcgaccgcccuccugacccugcagcagaucgagcucaaguucaaccccccggcccugcaggacgccuacuaccgcgcgcgggccggggaggccgccaacuucugcgcccugauccucgcguacugcaacaagacggugggcgagcugggcgacguccgcgagaccauguccuaccuguuccagcacgccaaccucgacagcugcaagcgggugcugaacgucgugugcaagaccugcgggcagcagcagaccacccugaagggcguggaggccgucauguacauggggacgcucuccuacgagcaguucaagaagggcgugcagauccccugcaccugcgggaagcaggccaccaaguaccuggugcagcaggagagccccuucgucaugauguccgcccccccggcgcaguacgagcugaagcacggcaccuucacgugcgccagcgaguacaccggcaacuaccagugcgggcacuacaagcacaucaccuccaaggagacccucuacugcaucgacggcgcccugcugacgaagagcagcgaguacaaggggcccaucaccgacguguucuacaaggagaacuccuacaccaccacgaucaagcccgugaccuacaagcucgacggcgucgugugcaccgagaucgaccccaagcuggacaacuacuacaagaaggacaacagcuacuucaccgagcagccgaucgaccuggugcccaaccagcccuaccccaacgccuccuucgacaacuucaaguucgucugcgacaacaucaaguucgccgacgaccucaaccagcugacgggguacaagaagccggcgagccgcgagcugaaggugaccuucuuccccgaccucaacggcgacguggucgccaucgacuacaagcacuacacccccuccuucaagaagggcgccaagcugcugcacaagcccaucguguggcacgugaacaacgccaccaacaaggcgacguacaagccgaacaccuggugcauccggugccucuggagcaccaagcccgucgagaccuccaacagcuucgacgugcugaaguccgaggacgcccaggggauggacaaccuggccugcgaggaccucaagcccgugagcgaggaggucguggagaaccccacgauccagaaggacgugcuggagugcaacgucaagaccaccgagguggugggcgacaucauccugaagccggccaacaacucccucaagaucaccgaggaggucgggcacacggaccugauggccgcguacguggacaacagcucccugaccaucaagaagcccaacgagcucagccgcgugcugggccugaagacccucgccacccacgggcuggccgccgucaacuccgugcccugggacacgaucgccaacuacgcgaagccguuccugaacaagguggucagcaccaccaccaacaucgugacgcgcugccucaaccgggugugcaccaacuacaugcccuacuucuucacccugcugcuccagcugugcaccuucacccgcuccacgaacagccggaucaaggccuccaugcccaccaccaucgccaagaacaccgucaagagcgugggcaaguucugccuggaggccagcuucaacuaccucaagucccccaacuucagcaagcugaucaacaucaucaucugguuccugcuccuguccgugugccugggcagccucaucuacuccacggccgcgcuggggguccugaugagcaaccucggcaugccguccuacugcaccggguaccgcgagggcuaccugaacagcaccaacgugaccaucgccacguacugcaccggcuccauccccugcagcgugugccuguccgggcucgacagccuggacaccuaccccucccuggagaccauccagaucacgaucagcuccuucaagugggaccucaccgccuucggccuggucgccgagugguuccuggccuacauccucuucacccgguucuucuacgugcuggggcuggcggccaucaugcagcucuucuucagcuacuucgccgugcacuucaucuccaacagcuggcugauguggcugaucaucaaccugguccagauggcccccaucuccgcgauggugcgcauguacaucuucuucgccagcuucuacuacguguggaagagcuacguccacgugguggacggcugcaacuccagcaccugcaugaugugcuacaagcggaaccgcgccacgcgggucgagugcaccaccaucgugaacgggguccgccggccguucuacguguacgccaacggcggcaagggguucugcaagcuccacaacuggaacugcgugaacugcgacaccuucugcgccggcuccacguucaucagcgacgaggucgcgcgcgaccugucccugcaguucaagcggcccaucaaccccaccgaccagagcuccuacaucguggacagcgugaccgucaagaacggguccauccaccucuacuucgacaaggccggccagaagaccuacgagcgccacagccugucccacuucgugaaccuggacaaccuccgggccaacaacacgaaggggagccugcccaucaacgugaucgucuucgacggcaaguccaagugcgaggagagcuccgccaagagcgccuccguguacuacagccagcugaugugccagccgauccuccugcuggaccaggcgcucguguccgacgucggcgacagcgccgagguggccgugaagauguucgacgccuacgucaacaccuucagcuccaccuucaacgugcccauggagaagcugaagacccugguggccacggcggaggccgagcucgccaagaacgucagccuggacaacgugcuguccaccuucaucagcgccgcgcgccagggguucguggacuccgacgucgagaccaaggacgugguggagugccucaagcugagccaccaguccgacaucgaggucaccggcgacagcugcaacaacuacaugcugacguacaacaagguggagaacaugaccccccgggaccucggggccugcaucgacugcuccgcccgccacaucaacgcccagguggccaagagccacaacaucgcgcugaucuggaacgucaaggacuucaugucccugagcgagcagcuccggaagcagauccgcuccgccgccaagaagaacaaccugcccuucaagcugaccugcgccaccacgcgccagguggugaacgucgugaccaccaagaucgcccucaagggcgggugaggacuaguuauaagacugacuagcccgaugggccucccaacgggcccuccuccccuccuugcaccgagauuaauaaaaaaaaaaaaaaaaaaaaaaaaaaaaaaaaaaaaaaaaaaaaaaaaaaaaaaaaaaaaaaaaugcaucccccccccccccccccccccccccccccccaaaggcucuuuucagagccaccagaauu

SEQ ID NO: 21643 - RNA, 6058 nt, Artificial Sequence
  SARS-CoV-2__MT811688.1__non-structural protein 3 (NSP3) mRNA gc
aggagaaagcuuaccauggcccccaccaaggugaccuucggcgacgacacggucaucgaggugcagggguacaagagcgugaacaucaccuucgagcuggacgagcgcaucgacaagguccucaacgagaagugcuccgccuacaccguggagcugggcaccgaggugaacgaguucgcgugcgucguggccgacgccgugaucaagacgcugcagccggucagcgagcuccugaccccccuggggaucgaccucgacgagugguccauggccaccuacuaccuguucgacgagagcggcgaguucaagcuggccucccacauguacugcagcuucuacccccccgacgaggacgaggaggagggggacugcgaggaggaggaguucgagccguccacccaguacgaguacggcacggaggacgacuaccagggcaagccccucgaguucggggcgaccagcgccgcccugcagcccgaggaggagcaggaggaggacuggcuggacgacgacucccagcagaccgugggccagcaggacgggagcgaggacaaccagaccacgaccauccagaccaucguggagguccagccccagcucgagauggagcugaccccgguggugcagacgaucgaggucaacuccuucagcggcuaccugaagcucaccgacaacguguacaucaagaacgccgacaucguggaggaggcgaagaaggucaagcccaccgugguggucaacgccgccaacguguaccugaagcacgggggcggcguggccggggcccugaacaaggcgaccaacaacgccaugcaggucgaguccgacgacuacaucgccacgaacggcccccucaagguggggggcagcugcguccuguccggccacaaccuggccaagcacugccuccacgugguggggcccaacgucaacaagggcgaggacauccagcugcugaagagcgccuacgagaacuucaaccagcacgaggugcuccuggcgccgcugcucuccgccgggaucuucggcgccgaccccauccacagccugcgggugugcgucgacaccgugcgcaccaacguguaccuggccgucuucgacaagaaccucuacgacaagcugguguccagcuuccuggagaugaagagcgagaagcagguggagcagaagaucgccgagauccccaaggaggaggucaagcccuucaucaccgaguccaagccgagcguggagcagcggaagcaggacgacaagaagaucaaggcgugcguggaggaggucacgaccacccucgaggagaccaaguuccugacggagaaccugcuccuguacaucgacaucaacgggaaccugcaccccgacuccgccacccucgugagcgacaucgacaucaccuuccugaagaaggacgcccccuacaucgugggcgacgucgugcaggagggcuuccugaccgccguggucauccccacgaagaaggccgggggcaccaccgagaugcucgcgaaggcccugcgcaaggugccgaccgacaacuacaucacgaccuaccccgggcagggccugaacggguacaccguggaggaggccaagaccguccucaagaagugcaaguccgccuucuacauccugcccagcaucaucuccaacgagaagcaggagauccugggcaccgugagcuggaaccuccgggagaugcuggcgcacgccgaggagacgcgcaagcugaugcccgugugcgucgagaccaaggccaucguguccaccauccagcggaaguacaagggcaucaagauccaggaggggguggucgacuacggcgcccgcuucuacuucuacaccagcaagacgaccguggccucccugaucaacacccucaacgaccugaacgagacccuggugacgaugccgcucggguacgucacccacggccugaaccuggaggaggcggcccgguacaugcgcagccucaaggugcccgccaccguguccgucagcucccccgacgccgugaccgccuacaacggguaccugacgagcuccagcaagacccccgaggagcacuucaucgagaccaucucccuggcgggcagcuacaaggacuggagcuacuccggccagagcacccagcucgggaucgaguuccugaagcggggcgacaaguccguguacuacacgagcaacccgaccaccuuccaccuggacggggaggucaucaccuucgacaaccucaagacgcugcugucccuccgcgaggugcggaccaucaagguguucaccaccgucgacaacaucaaccugcacacgcaggugguggacaugagcaugaccuacggccagcaguucggccccaccuaccuggacggggccgacgucaccaagaucaagccccacaacucccacgagggcaagacguucuacgugcucccgaacgacgacacccugcgcguggaggccuucgaguacuaccacaccaccgaccccagcuuccuggggcgguacauguccgcccucaaccacacgaagaaguggaaguacccccaggucaacggccugaccagcaucaagugggccgacaacaacugcuaccuggcgaccgcccuccugacccugcagcagaucgagcucaaguucaaccccccggcccugcaggacgccuacuaccgcgcgcgggccggggaggccgccaacuucugcgcccugauccucgcguacugcaacaagacggugggcgagcugggcgacgugcgcgagaccauguccuaccuguuccagcacgccaaccucgacagcugcaagcggguccugaacguggucugcaagaccugcgggcagcagcagaccacccugaagggcguggaggccgugauguacauggggacgcucuccuacgagcaguucaagaagggcguccagauccccugcaccugcgggaagcaggccaccaaguaccuggugcagcaggagagccccuucgugaugauguccgcccccccggcgcaguacgagcugaagcacggcaccuucacgugcgccagcgaguacaccggcaacuaccagugcgggcacuacaagcacaucaccuccaaggagacccucuacugcaucgacggcgcccugcugacgaagagcagcgaguacaaggggcccaucaccgacgucuucuacaaggagaacuccuacaccaccacgaucaagcccgugaccuacaagcucgacggcguggucugcaccgagaucgaccccaagcuggacaacuacuacaagaaggacaacagcuacuucaccgagcagccgaucgaccuggugcccaaccagcccuaccccaacgccuccuucgacaacuucaaguucgugugcgacaacaucaaguucgccgacgaccucaaccagcugacgggguacaagaagccggcgagccgcgagcugaaggucaccuucuuccccgaccucaacggcgacgugguggccaucgacuacaagcacuacacccccuccuucaagaagggcgccaagcugcugcacaagcccaucgucuggcacgugaacaacgccaccaacaaggcgacguacaagccgaacaccuggugcauccggugccucuggagcaccaagcccguggagaccuccaacagcuucgacguccugaaguccgaggacgcccaggggauggacaaccuggccugcgaggaccucaagcccgugagcgaggagguggucgagaaccccacgauccagaaggacgugcuggagugcaacgugaagaccaccgaggucgugggcgacaucauccugaagccggccaacaacucccucaagaucaccgaggagguggggcacacggaccugauggccgcguacgucgacaacagcucccugaccaucaagaagcccaacgagcucagccgcgugcugggccugaagacccucgccacccacgggcuggccgccgugaacuccguccccugggacacgaucgccaacuacgcgaagccguuccugaacaagguggugagcaccaccaccaacaucgucacgcgcugccucaaccgggugugcaccaacuacaugcccuacuucuucacccugcugcuccagcugugcaccuucacccgcuccacgaacagccggaucaaggccuccaugcccaccaccaucgccaagaacaccgugaagagcgucggcaaguucugccuggaggccagcuucaacuaccucaagucccccaacuucagcaagcugaucaacaucaucaucugguuccugcuccuguccgugugccugggcagccucaucuacuccacggccgcgcugggggugcugaugagcaaccucggcaugccguccuacugcaccggguaccgcgagggcuaccugaacagcaccaacgucaccaucgccacguacugcaccggcuccauccccugcagcgugugccuguccgggcucgacagccuggacaccuaccccucccuggagaccauccagaucacgaucagcuccuucaagugggaccucaccgccuucggccugguggccgagugguuccuggccuacauccucuucacccgguucuucuacguccuggggcuggcggccaucaugcagcucuucuucagcuacuucgccgugcacuucaucuccaacagcuggcugauguggcugaucaucaaccuggugcagauggcccccaucuccgcgaugguccgcauguacaucuucuucgccagcuucuacuacguguggaagagcuacgugcacgucguggacggcugcaacuccagcaccugcaugaugugcuacaagcggaaccgcgccacgcggguggagugcaccaccaucgucaacggggugcgccgguccuucuacgucuacgccaacggcggcaagggguucugcaagcuccacaacuggaacugcgugaacugcgacaccuucugcgccggcagcacguucaucuccgacgagguggcgcgcgaccugagccugcaguucaagcggccgaucaaccccaccgaccaguccagcuacaucgucgacuccgugaccgugaagaacgggagcauccaccucuacuucgacaaggccggccagaagaccuacgagcgccacucccugagccacuucgucaaccuggacaaccuccgggccaacaacacgaaggggucccugcccaucaacgugaucguguucgacggcaagagcaagugcgaggaguccagcgccaaguccgccagcgucuacuacucccagcugaugugccagcccauccuccugcuggaccaggcgcucgugagcgacgugggcgacagcgccgaggucgccgugaagauguucgacgccuacgugaacaccuucuccagcaccuucaacgucccgauggagaagcugaagacccugguggccacggcggaggccgagcucgccaagaacgugucccuggacaacguccugagcaccuucaucuccgccgcgcgccagggguucguggacagcgacguggagaccaaggacgucguggagugccucaagcugucccaccagagcgacaucgaggugaccggcgacuccugcaacaacuacaugcugacguacaacaaggucgagaacaugaccccccgggaccucggggccugcaucgacugcagcgcccgccacaucaacgcccagguggccaagucccacaacaucgcgcugaucuggaacgugaaggacuucaugagccuguccgagcagcuccggaagcagauccgcagcgccgccaagaagaacaaccugcccuucaagcugaccugcgccaccacgcgccaggucgugaacguggucaccaccaagaucgcccucaagggcgggugaggacuaguuauaagacugacuagcccgaugggccucccaacgggcccuccuccccuccuugcaccgagauuaauaaaaaaaaaaaaaaaaaaaaaaaaaaaaaaaaaaaaaaaaaaaaaaaaaaaaaaaaaaaaaaaaugcaucccccccccccccccccccccccccccccccaaaggcucuuuucagagccaccagaauu

SEQ ID NO: 21644 - RNA, 6058 nt, Artificial Sequence
  SARS-CoV-2__MT811695.1__non-structural protein 3 (NSP3) mRNA gc
aggagaaagcuuaccauggcccccaccaaggugaccuucggcgacgacacggucaucgaggugcagggguacaagagcgugaacaucaccuucgagcuggacgagcgcaucgacaagguccucaacgagaagugcuccgccuacaccguggagcugggcaccgaggugaacgaguucgcgugcgucguggccgacgccgugaucaagacgcugcagccggucagcgagcuccugaccccccuggggaucgaccucgacgagugguccauggccaccuacuaccuguucgacgagagcggcgaguucaagcuggccucccacauguacugcagcuucuacccccccgacgaggacgaggaggagggggacugcgaggaggaggaguucgagccguccacccaguacgaguacggcacggaggacgacuaccagggcaagccccucgaguucggggcgaccagcgccgcccugcagcccgaggaggagcaggaggaggacuggcuggacgacgacucccagcagaccgugggccagcaggacgggagcgaggacaaccagaccacgaccauccagaccaucguggagguccagccccagcucgagauggagcugaccccgguggugcagacgaucgaggucaacuccuucagcggcuaccugaagcucaccgacaacguguacaucaagaacgccgacaucguggaggaggcgaagaaggucaagcccaccgugguggucaacgccgccaacguguaccugaagcacgggggcggcguggccggggcccugaacaaggcgaccaacaacgccaugcaggucgaguccgacgacuacaucgccacgaacggcccccucaagguggggggcagcugcguccuguccggccacaaccuggccaagcacugccuccacgugguggggcccaacgucaacaagggcgaggacauccagcugcugaagagcgccuacgagaacuucaaccagcacgaggugcuccuggcgccgcugcucuccgccgggaucuucggcgccgaccccauccacagccugcgggugugcgucgacaccgugcgcaccaacguguaccuggccgucuucgacaagaaccucuacgacaagcugguguccagcuuccuggagaugaagagcgagaagcagguggagcagaagaucgccgagauccccaaggaggaggucaagcccuucaucaccgaguccaagccgagcguggagcagcggaagcaggacgacaagaagaucaaggcgugcguggaggaggucacgaccacccucgaggagaccaaguuccugacggagaaccugcuccuguacaucgacaucaacgggaaccugcaccccgacuccgccacccucgugagcgacaucgacaucaccuuccugaagaaggacgcccccuacaucgugggcgacgucgugcaggagggcgugcugaccgccgucgugauccccacgaagaaggccgggggcaccaccgagaugcucgcgaaggcccugcgcaaggugccgaccgacaacuacaucacgaccuaccccgggcagggccugaacggguacaccgucgaggaggccaagaccgugcucaagaagugcaaguccgccuucuacauccugcccagcaucaucuccaacgagaagcaggagauccugggcaccgugagcuggaaccuccgggagaugcuggcgcacgccgaggagacgcgcaagcugaugcccgucugcguggagaccaaggccaucguguccaccauccagcggaaguacaagggcaucaagauccaggagggggucguggacuacggcgcccgcuucuacuucuacaccagcaagacgaccguggccucccugaucaacacccucaacgaccugaacgagacccuggucacgaugccgcucggguacgugacccacggccugaaccuggaggaggcggcccgguacaugcgcagccucaaggugcccgccaccgucuccgugagcucccccgacgccgugaccgccuacaacggguaccugacgagcuccagcaagacccccgaggagcacuucaucgagaccaucucccuggcgggcagcuacaaggacuggagcuacuccggccagagcacccagcucgggaucgaguuccugaagcggggcgacaaguccgucuacuacacgagcaacccgaccaccuuccaccuggacggggaggugaucaccuucgacaaccucaagacgcugcugucccuccgcgaggugcggaccaucaaggucuucaccaccguggacaacaucaaccugcacacgcagguggucgacaugagcaugaccuacggccagcaguucggccccaccuaccuggacggggccgacgugaccaagaucaagccccacaacucccacgagggcaagacguucuacgugcucccgaacgacgacacccugcgcgucgaggccuucgaguacuaccacaccaccgaccccagcuuccuggggcgguacauguccgcccucaaccacacgaagaaguggaaguacccccaggugaacggccugaccagcaucaagugggccgacaacaacugcuaccuggcgaccgcccuccugacccugcagcagaucgagcucaaguucaaccccccggcccugcaggacgccuacuaccgcgcgcgggccggggaggccgccaacuucugcgcccugauccucgcguacugcaacaagacggugggcgagcugggcgacguccgcgagaccauguccuaccuguuccagcacgccaaccucgacagcugcaagcgggugcugaacgucgugugcaagaccugcgggcagcagcagaccacccugaagggcguggaggccgucauguacauggggacgcucuccuacgagcaguucaagaagggcgugcagauccccugcaccugcgggaagcaggccaccaaguaccuggugcagcaggagagccccuucgucaugauguccgcccccccggcgcaguacgagcugaagcacggcaccuucacgugcgccagcgaguacaccggcaacuaccagugcgggcacuacaagcacaucaccuccaaggagacccucuacugcaucgacggcgcccugcugacgaagagcagcgaguacaaggggcccaucaccgacguguucuacaaggagaacuccuacaccaccacgaucaagcccgugaccuacaagcucgacggcgucgugugcaccgagaucgaccccaagcuggacaacuacuacaagaaggacaacagcuacuucaccgagcagccgaucgaccuggugcccaaccagcccuaccccaacgccuccuucgacaacuucaaguucgucugcgacaacaucaaguucgccgacgaccucaaccagcugacgggguacaagaagccggcgagccgcgagcugaaggugaccuucuuccccgaccucaacggcgacguggucgccaucgacuacaagcacuacacccccuccuucaagaagggcgccaagcugcugcacaagcccaucguguggcacgugaacaacgccaccaacaaggcgacguacaagccgaacaccuggugcauccggugccucuggagcaccaagcccgucgagaccuccaacagcuucgacgugcugaaguccgaggacacgcaggggauggacaaccuggccugcgaggaccucaagcccgugagcgaggaggucguggagaaccccaccauccagaaggacgugcuggagugcaacgucaagaccaccgagguggugggcgacaucauccugaagccggccaacaacucccucaagaucacggaggaggucgggcacaccgaccugauggccgccuacguggacaacagcucccugaccaucaagaagcccaacgagcucagccgcgugcugggccugaagacccucgcgacgcacgggcuggccgccgucaacuccgugcccugggacaccaucgccaacuacgccaagccguuccugaacaagguggucagcaccaccacgaacaucgugacccgcugccucaaccgggugugcaccaacuacaugcccuacuucuucacccugcugcuccagcugugcaccuucacgcgcuccaccaacagccggaucaaggcguccaugcccaccaccaucgccaagaacacggucaagagcgugggcaaguucugccuggaggccagcuucaacuaccucaagucccccaacuucagcaagcugaucaacaucaucaucugguuccugcuccuguccgugugccugggcagccucaucuacuccaccgccgcccuggggguccugaugagcaaccucggcaugccguccuacugcaccggguaccgcgagggcuaccugaacagcaccaacgugacgaucgcgaccuacugcaccggcuccauccccugcagcgugugccuguccgggcucgacagccuggacaccuaccccucccuggagacgauccagaucaccaucagcuccuucaagugggaccucaccgccuucggccuggucgccgagugguuccuggccuacauccucuucacccgguucuucuacgugcuggggcuggccgcgaucaugcagcucuucuucagcuacuucgccgugcacuucaucuccaacagcuggcugauguggcugaucaucaaccugguccagauggcccccaucuccgccauggugcgcauguacaucuucuucgcgagcuucuacuacguguggaagagcuacguccacgugguggacggcugcaacuccagcacgugcaugaugugcuacaagcggaaccgcgccacccgggucgagugcaccaccaucgugaacgggguccgccgguccuucuacguguacgccaacggcggcaagggguucugcaagcuccacaacuggaacugcgugaacugcgacacguucugcgccggcagcaccuucaucuccgacgaggucgcccgcgaccugagccugcaguucaagcggccgaucaaccccaccgaccaguccagcuacaucguggacuccgugaccgucaagaacgggagcauccaccucuacuucgacaaggcgggccagaagacguacgagcgccacuuccugucccacuucgugaaccuggacaaccuccgggccaacaacaccaaggggagccugcccaucaacgugaucgucuucgacggcaaguccaagugcgaggagagcuccgccaagagcgccuccguguacuacagccagcugaugugccagcccauccuccugcuggaccaggcccucguguccgacgucggcgacagcgcggagguggccgugaagauguucgacgccuacgucaacaccuucagcuccaccuucaacgugccgauggagaagcugaagacgcugguggccaccgccgaggcggagcucgccaagaacgucagccuggacaacgugcuguccaccuucaucagcgccgcccgccagggguucguggacuccgacgucgagaccaaggacgugguggagugccucaagcugagccaccaguccgacaucgaggucacgggcgacagcugcaacaacuacaugcugaccuacaacaagguggagaacaugaccccccgggaccucggggcgugcaucgacugcuccgcccgccacaucaacgcccagguggccaagagccacaacaucgcccugaucuggaacgucaaggacuucaugucccugagcgagcagcuccggaagcagauccgcuccgcggccaagaagaacaaccugcccuucaagcugaccugcgccacgacccgccagguggugaacgucgugaccaccaagaucgcccucaagggcgggugaggacuaguuauaagacugacuagcccgaugggccucccaacgggcccuccuccccuccuugcaccgagauuaauaaaaaaaaaaaaaaaaaaaaaaaaaaaaaaaaaaaaaaaaaaaaaaaaaaaaaaaaaaaaaaaaugcaucccccccccccccccccccccccccccccccaaaggcucuuuucagagccaccagaauu

SEQ ID NO: 21645 - RNA, 6058 nt, Artificial Sequence
  SARS-CoV-2__MT811708.1__non-structural protein 3 (NSP3) mRNA gc
aggagaaagcuuaccauggcccccaccaaggugaccuucggcgacgacacggucaucgaggugcagggguacaagagcgugaacaucaccuucgagcuggacgagcgcaucgacaagguccucaacgagaagugcuccgccuacaccguggagcugggcaccgaggugaacgaguucgcgugcgucguggccgacgccgugaucaagacgcugcagccggucagcgagcuccugaccccccuggggaucgaccucgacgagugguccauggccaccuacuaccuguucgacgagagcggcgaguucaagcuggccucccacauguacugcagcuucuacccccccgacgaggacgaggaggagggggacugcgaggaggaggaguucgagccguccacccaguacgaguacggcacggaggacgacuaccagggcaagccccucgaguucggggcgaccagcgccgcccugcagcccgaggaggagcaggaggaggacuggcuggacgacgacucccagcagaccgugggccagcaggacgggagcgaggacaaccagaccacgaccauccagaccaucguggagguccagccccagcucgagauggagcugaccccgguggugcagacgaucgaggucaacuccuucagcggcuaccugaagcucaccgacaacguguacaucaagaacgccgacaucguggaggaggcgaagaaggucaagcccaccgugguggucaacgccgccaacguguaccugaagcacgggggcggcguggccggggcccugaacaaggcgaccaacaacgccaugcaggucgaguccgacgacuacaucgccacgaacggcccccucaagguggggggcagcugcguccuguccggccacaaccuggccaagcacugccuccacgugguggggcccaacgucaacaagggcgaggacauccagcugcugaagagcgccuacgagaacuucaaccagcacgaggugcuccuggcgccgcugcucuccgccgggaucuucggcgccgaccccauccacagccugcgggugugcgucgacaccgugcgcaccaacguguaccuggccgucuucgacaagaaccucuacgacaagcugguguccagcuuccuggagaugaagagcgagaagcagguggagcagaagaucgccgagauccccaaggaggaggucaagcccuucaucaccgaguccaagccgagcguggagcagcggaagcaggacgacaagaagaucaaggcgugcguggaggaggucacgaccacccucgaggagaccaaguuccugacggagaaccugcuccuguacaucgacaucaacgggaaccugcaccccgacuccgccacccucgugagcgacaucgacaucaccuuccugaagaaggacgcccccuacaucgugggcgacgucgugcaggagggcgugcugaccgccgucgugauccccacgaagaaggccgggggcaccaccgagaugcucgcgaaggcccugcgcaaggugccgaccgacaacuacaucacgaccuaccccgggcagggccugaacggguacaccgucgaggaggccaagaccgugcucaagaagugcaaguccgccuucuacauccugcccagcaucaucuccaacgagaagcaggagauccugggcaccgugagcuggaaccuccgggagaugcuggcgcacgccgaggagacgcgcaagcugaugcccgucugcguggagaccaaggccaucguguccaccauccagcggaaguacaagggcaucaagauccaggagggggucguggacuacggcgcccgcuucuacuucuacaccagcaagacgaccguggccucccugaucaacacccucaacgaccugaacgagacccuggucacgaugccgcucggguacgugacccacggccugaaccuggaggaggcggcccgguacaugcgcagccucaaggugcccgccaccgucuccgugagcucccccgacgccgugaccgccuacaacggguaccugacgagcuccagcaagacccccgaggagcacuucaucgagaccaucucccuggcgggcagcuacaaggacuggagcuacuccggccagagcacccagcucgggaucgaguuccugaagcggggcgacaaguccgucuacuacacgagcaacccgaccaccuuccaccuggacggggaggugaucaccuucgacaaccucaagacgcugcugucccuccgcgaggugcggaccaucaaggucuucaccaccguggacaacaucaaccugcacacgcagguggucgacaugagcaugaccuacggccagcaguucggccccaccuaccuggacggggccgacgugaccaagaucaagccccacaacucccacgagggcaagacguucuacgugcucccgaacgacgacacccugcgcgucgaggccuucgaguacuaccacaccaccgaccccagcuuccuggggcgguacauguccgcccucaaccacacgaagaaguggaaguacccccaggugaacggccugaccagcaucaagugggccgacaacaacugcuaccuggcgaccgcccuccugacccugcagcagaucgagcucaaguucaaccccccggcccugcaggacgccuacuaccgcgcgcgggccggggaggccgccaacuucugcgcccugauccucgcguacugcaacaagacggugggcgagcugggcgacguccgcgagaccauguccuaccuguuccagcacgccaaccucgacagcugcaagcgggugcugaacgucgugugcaagaccugcgggcagcagcagaccacccugaagggcguggaggccgucauguacauggggacgcucuccuacgagcaguucaagaagggcgugcagauccccugcaccugcgggaagcaggccaccaaguaccuggugcagcaggagagccccuucgucaugauguccgcccccccggcgcaguacgagcugaagcacggcaccuucacgugcgccagcgaguacaccggcaacuaccagugcgggcacuacaagcacaucaccuccaaggagacccucuacugcaucgacggcgcccugcugacgaagagcagcgaguacaaggggcccaucaccgacguguucuacaaggagaacuccuacaccaccacgaucaagcccgugaccuacaagcucgacggcgucgugugcaccgagaucgaccccaagcuggacaacuacuacaagaaggacaacagcuacuucaccgagcagccgaucgaccuggugcccaaccagcccuaccccaacgccuccuucgacaacuucaaguucgucugcgacaacaucaaguucgccgacgaccucaaccagcugacgggguacaagaagccggcgagccgcgagcugaaggugaccuucuuccccgaccucaacggcgacguggucgccaucgacuacaagcacuacacccccuccuucaagaagggcgccaagcugcugcacaagcccaucguguggcacgugaacaacgccaccaacaaggcgacguacaagccgaacaccuggugcauccggugccucuggagcaccaagcccgucgagaccuccaacagcuucgacgugcugaaguccgaggacacgcaggggauggacaaccuggccugcgaggaccucaagcccgugagcgaggaggucguggagaaccccaccauccagaaggacgugcuggagugcaacgucaagaccaccgagguggugggcgacaucauccugaagccggccaacaacucccucaagaucacggaggaggucgggcacaccgaccugauggccgccuacguggacaacagcucccugaccaucaagaagcccaacgagcucagccgcgugcugggccugaagacccucgcgacgcacgggcuggccgccgucaacuccgugcccugggacaccaucgccaacuacgccaagccguuccugaacaagguggucagcaccaccacgaacaucgugacccgcugccucaaccgggugugcaccaacuacaugcccuacuucuucacccugcugcuccagcugugcaccuucacgcgcuccaccaacagccggaucaaggcguccaugcccaccaccaucgccaagaacacggucaagagcgugggcaaguucugccuggaggccagcuucaacuaccucaagucccccaacuucagcaagcugaucaacaucaucaucugguuccugcuccuguccgugugccugggcagccucaucuacuccaccgccgcccuggggguccugaugagcaaccucggcaugccguccuacugcaccggguaccgcgagggcuaccugaacagcaccaacgugacgaucgcgaccuacugcaccggcuccauccccugcagcgugugccuguccgggcucgacagccuggacaccuaccccucccuggagacgauccagaucaccaucagcuccuucaagugggaccucaccgccuucggccuggucgccgagugguuccuggccuacauccucuucacccgguucuucuacgugcuggggcuggccgcgaucaugcagcucuucuucagcuacuucgccgugcacuucaucuccaacagcuggcugauguggcugaucaucaaccugguccagauggcccccaucuccgccauggugcgcauguacaucuucuucgcgagcuucuacuacguguggaagagcuacguccacgugguggacggcugcaacuccagcacgugcaugaugugcuacaagcggaaccgcgccacccgggucgagugcaccaccaucgugaacgggguccgccgguccuucuacguguacgccaacggcggcaagggguucugcaagcuccacaacuggaacugcgugaacugcgacacguucugcgccggcagcaccuucaucuccgacgaggucgcccgcgaccugagccugcaguucaagcggccgaucaaccccaccgaccaguccagcuacaucguggacuccgugaccgucaagaacgggagcauccaccucuacuucgacaaggcgggccagaagacguacgagcgccacucccugagccacuucgugaaccuggacaaccuccgggccaacaacaccaaggggucccugcccaucaacgugaucgucuucgacggcaagagcaagugcgaggaguccagcgccaaguccgccagcguguacuacucccagcugaugugccagcccauccuccugcuggaccaggcccucgugagcgacgucggcgacagcgcggagguggccgugaagauguucgacgccuacgucaacaccuucuccagcaccuucaacgugccgauggagaagcugaagacgcugguggccaccgccgaggcggagcucgccaagaacgucucccuggacaacgugcugagcaccuucaucuccgccgcccgccagggguucguggacagcgacgucgagaccaaggacgugguggagugccucaagcugucccaccagagcgacaucgaggucacgggcgacuccugcaacaacuacaugcugaccuacaacaagguggagaacaugaccccccgggaccucggggcgugcaucgacugcagcgcccgccacaucaacgcccagguggccaagucccacaacaucgcccugaucuggaacgucaaggacuucaugagccuguccgagcagcuccggaagcagauccgcagcgcggccaagaagaacaaccugcccuucaagcugaccugcgccacgacccgccagguggugaacgucgugaccaccaagaucgcccucaagggcgggugaggacuaguuauaagacugacuagcccgaugggccucccaacgggcccuccuccccuccuugcaccgagauuaauaaaaaaaaaaaaaaaaaaaaaaaaaaaaaaaaaaaaaaaaaaaaaaaaaaaaaaaaaaaaaaaaugcaucccccccccccccccccccccccccccccccaaaggcucuuuucagagccaccagaauu

SEQ ID NO: 21646 - RNA, 6058 nt, Artificial Sequence
  SARS-CoV-2__MT811713.1__non-structural protein 3 (NSP3) mRNA gc
aggagaaagcuuaccauggcccccaccaaggugaccuucggcgacgacacggucaucgaggugcagggguacaagagcgugaacaucaccuucgagcuggacgagcgcaucgacaagguccucaacgagaagugcuccgccuacaccguggagcugggcaccgaggugaacgaguucgcgugcgucguggccgacgccgugaucaagacgcugcagccggucagcgagcuccugaccccccuggggaucgaccucgacgagugguccauggccaccuacuaccuguucgacgagagcggcgaguucaagcuggccucccacauguacugcagcuucuacccccccgacgaggacgaggaggagggggacugcgaggaggaggaguucgagccguccacccaguacgaguacggcacggaggacgacuaccagggcaagccccucgaguucggggcgaccagcgccgcccugcagcccgaggaggagcaggaggaggacuggcuggacgacgacucccagcagaccgugggccagcaggacgggagcgaggacaaccagaccacgaccauccagaccaucguggagguccagccccagcucgagauggagcugaccccgguggugcagacgaucgaggucaacuccuucagcggcuaccugaagcucaccgacaacguguacaucaagaacgccgacaucguggaggaggcgaagaaggucaagcccaccgugguggucaacgccgccaacguguaccugaagcacgggggcggcguggccggggcccugaacaaggcgaccaacaacgccaugcaggucgaguccgacgacuacaucgccacgaacggcccccucaagguggggggcagcugcguccuguccggccacaaccuggccaagcacugccuccacgugguggggcccaacgucaacaagggcgaggacauccagcugcugaagagcgccuacgagaacuucaaccagcacgaggugcuccuggcgccgcugcucuccgccgggaucuucggcgccgaccccauccacagccugcgggugugcgucgacaccgugcgcaccaacguguaccuggccgucuucgacaagaaccucuacgacaagcugguguccagcuuccuggagaugaagagcgagaagcagguggagcagaagaucgccgagauccccaaggaggaggucaagcccuucaucaccgaguccaagccgagcguggagcagcggaagcaggacgacaagaagaucaaggcgugcguggaggaggucacgaccacccucgaggagaccaaguuccugacggagaaccugcuccuguacaucgacaucaacgggaaccugcaccccgacuccgccacccucgugagcgacaucgacaucaccuuccugaagaaggacgcccccuacaucgugggcgacgucgugcaggagggcgugcugaccgccgucgugauccccacgaagaaggccgggggcaccaccgagaugcucgcgaaggcccugcgcaaggugccgaccgacaacuacaucacgaccuaccccgggcagggccugaacggguacaccgucgaggaggccaagaccgugcucaagaagugcaaguccgccuucuacauccugcccagcaucaucuccaacgagaagcaggagauccugggcaccgugagcuggaaccuccgggagaugcuggcgcacgccgaggagacgcgcaagcugaugcccgucugcguggagaccaaggccaucguguccaccauccagcggaaguacaagggcaucaagauccaggagggggucguggacuacggcgcccgcuucuacuucuacaccagcaagacgaccguggccucccugaucaacacccucaacgaccugaacgagacccuggucacgaugccgcucggguacgugacccacggccugaaccuggaggaggcggcccgguacaugcgcagccucaaggugcccgccaccgucuccgugagcucccccgacgccgugaccgccuacaacggguaccugacgagcuccagcaagacccccgaggagcacuucaucgagaccaucucccuggcgggcagcuacaaggacuggagcuacuccggccagagcacccagcucgggaucgaguuccugaagcggggcgacaaguccgucuacuacacgagcaacccgaccaccuuccaccuggacggggaggugaucaccuucgacaaccucaagacgcugcugucccuccgcgaggugcggaccaucaaggucuucaccaccguggacaacaucaaccugcacacgcagguggucgacaugagcaugaccuacggccagcaguucggccccaccuaccuggacggggccgacgugaccaagaucaagccccacaacucccacgagggcaagacguucuacgugcucccgaacgacgacacccugcgcgucgaggccuucgaguacuaccacaccaccgaccccagcuuccuggggcgguacauguccgcccucaaccacacgaagaaguggaaguacccccaggugaacggccugaccagcaucaagugggccgacaacaacugcuaccuggcgaccgcccuccugacccugcagcagaucgagcucaaguucaaccccccggcccugcaggacgccuacuaccgcgcgcgggccggggaggccgccaacuucugcgcccugauccucgcguacugcaacaagacggugggcgagcugggcgacguccgcgagaccauguccuaccuguuccagcacgccaaccucgacagcugcaagcgggugcugaacgucgugugcaagaccugcgggcagcagcagaccacccugaagggcguggaggccgucauguacauggggacgcucuccuacgagcaguucaagaagggcgugcagauccccugcaccugcgggaagcaggccaccaaguaccuggugcagcaggagagccccuucgucaugauguccgcccccccggcgcaguacgagcugaagcacggcaccuucacgugcgccagcgaguacaccggcaacuaccagugcgggcacuacaagcacaucaccuccaaggagacccucuacugcaucgacggcgcccugcugacgaagagcagcgaguacaaggggcccaucaccgacguguucuacaaggagaacuccuacaccaccacgaucaagcccgugaccuacaagcucgacggcgucgugugcaccgagaucgaccccaagcuggacaacuacuacaagaaggacaacagcuacuucaccgagcagccgaucgaccuggugcccaaccagcccuaccccaacgccuccuucgacaacuucaaguucgucugcgacaacaucaaguucgccgacgaccucaaccagcugacgggguacaagaagccggcgagccgcgagcugaaggugaccuucuuccccgaccucaacggcgacguggucgccaucgacuacaagcacuacacccccuccuucaagaagggcgccaagcugcugcacaagcccaucguguggcacgugaacaacgccaccaacaaggcgacguacaagccgaacaccuggugcauccggugccucuggagcaccaagcccgucgagaccuccaacagcuucgacgugcugaaguccgaggacgcccaggggauggacaaccuggccugcgaggaccucaagcccgugagcgaggaggucguggagaaccccacgauccagaaggacgugcuggagugcaacgucaagaccaccgagguggugggcgacaucauccugaagccggccaacaacucccucaagaucaccgaggaggucgggcacacggaccugauggccgcguacguggacaacagcucccugaccaucaagaagcccaacgagcucagccgcgugcugggccugaagacccucgccacccacgggcuggccgccgucaacuccgugcccugggacacgaucgccaacuacgcgaagccguuccugaacaagguggucagcaccaccaccaacaucgugacgcgcugccucaaccgggugugcaccaacuacaugcccuacuucuucacccugcugcuccagcugugcaccuucacccgcuccacgaacagccggaucaaggccuccaugcccaccaccaucgccaagaacaccgucaagagcgugggcaaguucugccuggaggccagcuucaacuaccucaagucccccaacuucagcaagcugaucaacaucaucaucugguuccugcuccuguccgugugccugggcagccucaucuacuccacggccgcgcuggggguccugaugagcaaccucggcaugccguccuacugcaccggguaccgcgagggcuaccugaacagcaccaacgugaccaucgccacguacugcaccggcuccauccccugcagcgugugccuguccgggcucgacagccuggacaccuaccccucccuggagaccauccagaucacgaucagcuccuucaagugggaccucaccgccuucggccuggucgccgagugguuccuggccuacauccucuucacccgguucuucuacgugcuggggcuggcggccaucaugcagcucuucuucagcuacuucgccgugcacuucaucuccaacagcuggcugauguggcugaucaucaaccugguccagauggcccccaucuccgcgauggugcgcauguacaucuucuucgccagcuucuacuacguguggaagagcuacguccacgugguggacggcugcaacuccagcaccugcaugaugugcuacaagcggaaccgcgccacgcgggucgagugcaccaccaucgugaacgggguccgccgguccuucuacguguacgccaacggcggcaagggguucugcaagcuccacaacuggaacugcgugaacugcgacaccuucugcgccggcagcacguucaucuccgacgaggucgcgcgcgaccugagccugcaguucaagcggccgaucaaccccaccgaccaguccagcuacaucguggacuccgugaccgucaagaacgggagcauccaccucuacuucgacaaggccggccagaagaccuacgagcgccacucccugagccacuucgugaaccuggacaaccuccgggccaacaacacgaaggggucccugcccaucaacgugaucgucuucgacggcaagagcaagugcgaggaguccagcgccaaguccgccagcguguacuacucccagcugaugugccagcccauccuccugcuggaccaggcgcucgugagcgacgucggcgacagcgccgagguggccgugaagauguucgacgccuacgucaacaccuucuccagcaccuucaacgugccgauggagaagcugaagacccugguggccacggcggaggccgagcucgccaacaacgucucccuggacaacgugcugagcaccuucaucuccgccgcgcgccagggguucguggacagcgacgucgagaccaaggacgugguggagugccucaagcugucccaccagagcgacaucgaggucaccggcgacuccugcaacaacuacaugcugacguacaacaagguggagaacaugaccccccgggaccucggggccugcaucgacugcagcgcccgccacaucaacgcccagguggccaagucccacaacaucgcgcugaucuggaacgucaaggacuucaugagccuguccgagcagcuccggaagcagauccgcagcgccgccaagaagaacaaccugcccuucaagcugaccugcgccaccacgcgccagguggugaacgucgugaccaccaagaucgcccucaagggcgggugaggacuaguuauaagacugacuagcccgaugggccucccaacgggcccuccuccccuccuugcaccgagauuaauaaaaaaaaaaaaaaaaaaaaaaaaaaaaaaaaaaaaaaaaaaaaaaaaaaaaaaaaaaaaaaaaugcaucccccccccccccccccccccccccccccccaaaggcucuuuucagagccaccagaauu

SEQ ID NO: 21647 - RNA, 6058 nt, Artificial Sequence
  SARS-CoV-2__MT811720.1__non-structural protein 3 (NSP3) mRNA gc
aggagaaagcuuaccauggcccccaccaaggugaccuucggcgacgacacggucaucgaggugcagggguacaagagcgugaacaucaccuucgagcuggacgagcgcaucgacaagguccucaacgagaagugcuccgccuacaccguggagcugggcaccgaggugaacgaguucgcgugcgucguggccgacgccaucaucaagacgcugcagccggugagcgagcuccugaccccccuggggaucgaccucgacgagugguccauggccaccuacuaccuguucgacgagagcggcgaguucaagcuggccucccacauguacugcagcuucuacccccccgacgaggacgaggaggagggggacugcgaggaggaggaguucgagccguccacccaguacgaguacggcacggaggacgacuaccagggcaagccccucgaguucggggcgaccagcgccgcccugcagcccgaggaggagcaggaggaggacuggcuggacgacgacucccagcagaccgucggccagcaggacgggagcgaggacaaccagaccacgaccauccagaccaucguggaggugcagccccagcucgagauggagcugaccccggucgugcagacgaucgaggugaacuccuucagcggcuaccugaagcucaccgacaacgucuacaucaagaacgccgacaucguggaggaggcgaagaaggugaagcccaccgucguggugaacgccgccaacgucuaccugaagcacgggggcggcguggccggggcccugaacaaggcgaccaacaacgccaugcagguggaguccgacgacuacaucgccacgaacggcccccucaaggucgggggcagcugcgugcuguccggccacaaccuggccaagcacugccuccacgucguggggcccaacgugaacaagggcgaggacauccagcugcugaagagcgccuacgagaacuucaaccagcacgagguccuccuggcgccgcugcucuccgccgggaucuucggcgccgaccccauccacagccugcgggugugcguggacaccguccgcaccaacguguaccuggccguguucgacaagaaccucuacgacaagcuggucuccagcuuccuggagaugaagagcgagaagcagguggagcagaagaucgccgagauccccaaggaggaggugaagcccuucaucaccgaguccaagccgagcgucgagcagcggaagcaggacgacaagaagaucaaggcgugcguggaggaggugacgaccacccucgaggagaccaaguuccugacggagaaccugcuccuguacaucgacaucaacgggaaccugcaccccgacuccgccacccucgucagcgacaucgacaucaccuuccugaagaaggacgcccccuacaucgugggcgacgugguccaggagggcgugcugaccgccguggucauccccacgaagaaggccgggggcaccaccgagaugcucgcgaaggcccugcgcaaggugccgaccgacaacuacaucacgaccuaccccgggcagggccugaacggguacaccguggaggaggccaagaccguccucaagaagugcaaguccgccuucuacauccugcccagcaucaucuccaacgagaagcaggagauccugggcaccgugagcuggaaccuccgggagaugcuggcgcacgccgaggagacgcgcaagcugaugcccgugugcgucgagaccaaggccaucguguccaccauccagcggaaguacaagggcaucaagauccaggaggggguggucgacuacggcgcccgcuucuacuucuacaccagcaagacgaccguggccucccugaucaacacccucaacgaccugaacgagacccuggugacgaugccgcucggguacgucacccacggccugaaccuggaggaggcggcccgguacaugcgcagccucaaggugcccgccaccguguccgucagcucccccgacgccgugaccgccuacaacggguaccugacgagcuccagcaagacccccgaggagcacuucaucgagaccaucucccuggcgggcagcuacaaggacuggagcuacuccggccagagcacccagcucgggaucgaguuccugaagcggggcgacaaguccguguacuacacgagcaacccgaccaccuuccaccuggacggggaggucaucaccuucgacaaccucaagacgcugcugucccuccgcgaggugcggaccaucaagguguucaccaccgucgacaacaucaaccugcacacgcaggugguggacaugagcaugaccuacggccagcaguucggccccaccuaccuggacggggccgacgucaccaagaucaagccccacaacucccacgagggcaagacguucuacgugcucccgaacgacgacacccugcgcguggaggccuucgaguacuaccacaccaccgaccccagcuuccuggggcgguacauguccgcccucaaccacacgaagaaguggaaguacccccaggucaacggccugaccagcaucaagugggccgacaacaacugcuaccuggcgaccgcccuccugacccugcagcagaucgagcucaaguucaaccccccggcccugcaggacgccuacuaccgcgcgcgggccggggaggccgccaacuucugcgcccugauccucgcguacugcaacaagacggugggcgagcugggcgacgugcgcgagaccauguccuaccuguuccagcacgccaaccucgacagcugcaagcggguccugaacguggucugcaagaccugcgggcagcagcagaccacccugaagggcguggaggccgugauguacauggggacgcucuccuacgagcaguucaagaagggcguccagauccccugcaccugcgggaagcaggccaccaaguaccuggugcagcaggagagccccuucgugaugauguccgcccccccggcgcaguacgagcugaagcacggcaccuucacgugcgccagcgaguacaccggcaacuaccagugcgggcacuacaagcacaucaccuccaaggagacccucuacugcaucgacggcgcccugcugacgaagagcagcgaguacaaggggcccaucaccgacgucuucuacaaggagaacuccuacaccaccacgaucaagcccgugaccuacaagcucgacggcguggucugcaccgagaucgaccccaagcuggacaacuacuacaagaaggacaacagcuacuucaccgagcagccgaucgaccuggugcccaaccagcccuaccccaacgccuccuucgacaacuucaaguucgugugcgacaacaucaaguucgccgacgaccucaaccagcugacgggguacaagaagccggcgagccgcgagcugaaggucaccuucuuccccgaccucaacggcgacgugguggccaucgacuacaagcacuacacccccuccuucaagaagggcgccaagcugcugcacaagcccaucgucuggcacgugaacaacgccaccaacaaggcgacguacaagccgaacaccuggugcauccggugccucuggagcaccaagcccguggagaccuccaacagcuucgacguccugaaguccgaggacgcccaggggauggacaaccuggccugcgaggaccucaagcccgugagcgaggagguggucgagaaccccacgauccagaaggacgugcuggagugcaacgugaagaccaccgaggucgugggcgacaucauccugaagccggccaacaacucccucaagaucaccgaggagguggggcacacggaccugauggccgcguacgucgacaacagcucccugaccaucaagaagcccaacgagcucagccgcgugcugggccugaagacccucgccacccacgggcuggccgccgugaacuccguccccugggacacgaucgccaacuacgcgaagccguuccugaacaagguggugagcaccaccaccaacaucgucacgcgcugccucaaccgggugugcaccaacuacaugcccuacuucuucacccugcugcuccagcugugcaccuucacccgcuccacgaacagccggaucaaggccuccaugcccaccaccaucgccaagaacaccgugaagagcgucggcaaguucugccuggaggccagcuucaacuaccucaagucccccaacuucagcaagcugaucaacaucaucaucugguuccugcuccuguccgugugccugggcagccucaucuacuccacggccgcgcugggggugcugaugagcaaccucggcaugccguccuacugcaccggguaccgcgagggcuaccugaacagcaccaacgucaccaucgccacguacugcaccggcuccauccccugcagcgugugccuguccgggcucgacagccuggacaccuaccccucccuggagaccauccagaucacgaucagcuccuucaagugggaccucaccgccuucggccugguggccgagugguuccuggccuacauccucuucacccgguucuucuacguccuggggcuggcggccaucaugcagcucuucuucagcuacuucgccgugcacuucaucuccaacagcuggcugauguggcugaucaucaaccuggugcagauggcccccaucuccgcgaugguccgcauguacaucuucuucgccagcuucuacuacguguggaagagcuacgugcacgucguggacggcugcaacuccagcaccugcaugaugugcuacaagcggaaccgcgccacgcggguggagugcaccaccaucgucaacggggugcgccgguccuucuacgucuacgccaacggcggcaagggguucugcaagcuccacaacuggaacugcgugaacugcgacaccuucugcgccggcagcacguucaucuccgacgagguggcgcgcgaccugagccugcaguucaagcggccgaucaaccccaccgaccaguccagcuacaucgucgacuccgugaccgugaagaacgggagcauccaccucuacuucgacaaggccggccagaagaccuacgagcgccacucccugagccacuucgucaaccuggacaaccuccgggccaacaacacgaaggggucccugcccaucaacgugaucguguucgacggcaagagcaagugcgaggaguccagcgccaaguccgccagcgucuacuacucccagcugaugugccagcccauccuccugcuggaccaggcgcucgugagcgacgugggcgacagcgccgaggucgccgugaagauguucgacgccuacgugaacaccuucuccagcaccuucaacgucccgauggagaagcugaagacccugguggccacggcggaggccgagcucgccaagaacgugucccuggacaacguccugagcaccuucaucuccgccgcgcgccagggguucguggacagcgacguggagaccaaggacgucguggagugccucaagcugucccaccagagcgacaucgaggugaccggcgacuccugcaacaacuacaugcugacguacaacaaggucgagaacaugaccccccgggaccucggggccugcaucgacugcagcgcccgccacaucaacgcccagguggccaagucccacaacaucgcgcugaucuggaacgugaaggacuucaugagccuguccgagcagcuccggaagcagauccgcagcgccgccaagaagaacaaccugcccuucaagcugaccugcgccaccacgcgccaggucgugaacguggucaccaccaagaucgcccucaagggcgggugaggacuaguuauaagacugacuagcccgaugggccucccaacgggcccuccuccccuccuugcaccgagauuaauaaaaaaaaaaaaaaaaaaaaaaaaaaaaaaaaaaaaaaaaaaaaaaaaaaaaaaaaaaaaaaaaugcaucccccccccccccccccccccccccccccccaaaggcucuuuucagagccaccagaauu

SEQ ID NO: 21648 - RNA, 6058 nt, Artificial Sequence
  SARS-CoV-2__MT811723.1__non-structural protein 3 (NSP3) mRNA gc
aggagaaagcuuaccauggcccccaccaaggugaccuucggcgacgacacggucaucgaggugcagggguacaagagcgugaacaucaccuucgagcuggacgagcgcaucgacaagguccucaacgagaagugcuccgccuacaccguggagcugggcaccgaggugaacgaguucgcgugcgucguggccgacgccgugaucaagacgcugcagccggucagcgagcuccugaccccccuggggaucgaccucgacgagugguccauggccaccuacuaccuguucgacgagagcggcgaguucaagcuggccucccacauguacugcagcuucuacccccccgacgaggacgaggaggagggggacugcgaggaggaggaguucgagccguccacccaguacgaguacggcacggaggacgacuaccagggcaagccccucgaguucggggcgaccagcgccgcccugcagcccgaggaggagcaggaggaggacuggcuggacgacgacucccagcaggccgugggccagcaggacgggagcgaggacaaccagaccaccacgauccagaccaucguggagguccagccccagcucgagauggagcugaccccgguggugcagaccaucgaggucaacuccuucagcggcuaccugaagcucacggacaacguguacaucaagaacgcggacaucguggaggaggccaagaaggucaagcccaccgugguggucaacgccgccaacguguaccugaagcacgggggcggcguggccggggcgcugaacaaggccaccaacaacgccaugcaggucgaguccgacgacuacaucgccaccaacggcccccucaagguggggggcagcugcguccuguccggccacaaccuggccaagcacugccuccacgugguggggcccaacgucaacaagggcgaggacauccagcugcugaagagcgcguacgagaacuucaaccagcacgaggugcuccuggccccgcugcucuccgccgggaucuucggcgccgaccccauccacagccugcgggugugcgucgacacggugcgcaccaacguguaccuggccgucuucgacaagaaccucuacgacaagcugguguccagcuuccuggagaugaagagcgagaagcagguggagcagaagaucgcggagauccccaaggaggaggucaagcccuucaucaccgaguccaagccgagcguggagcagcggaagcaggacgacaagaagaucaaggccugcguggaggaggucaccacgacccucgaggagaccaaguuccugaccgagaaccugcuccuguacaucgacaucaacgggaaccugcaccccgacuccgccacgcucgugagcgacaucgacaucaccuuccugaagaaggacgcccccuacaucgugggcgacgucgugcaggagggcgugcugaccgccgucgugauccccaccaagaaggcggggggcacgaccgagaugcucgccaaggcccugcgcaaggugccgaccgacaacuacaucaccacguaccccgggcagggccugaacggguacaccgucgaggaggccaagaccgugcucaagaagugcaaguccgcguucuacauccugcccagcaucaucuccaacgagaagcaggagauccugggcaccgugagcuggaaccuccgggagaugcuggcccacgccgaggagacccgcaagcugaugcccgucugcguggagacgaaggccaucguguccaccauccagcggaaguacaagggcaucaagauccaggagggggucguggacuacggcgcccgcuucuacuucuacaccagcaagaccacgguggcgucccugaucaacacccucaacgaccugaacgagacccuggucaccaugccgcucggguacgugacgcacggccugaaccuggaggaggccgcccgguacaugcgcagccucaaggugcccgccaccgucuccgugagcucccccgacgccgugaccgcguacaacggguaccugaccagcuccagcaagacgcccgaggagcacuucaucgagaccaucucccuggccggcagcuacaaggacuggagcuacuccggccagagcacccagcucgggaucgaguuccugaagcggggcgacaaguccgucuacuacaccagcaacccgacgaccuuccaccuggacggggaggugaucaccuucgacaaccucaagacccugcugucccuccgcgaggugcggacgaucaaggucuucaccaccguggacaacaucaaccugcacacccagguggucgacaugagcaugacguacggccagcaguucggccccaccuaccuggacggggccgacgugaccaagaucaagccccacaacucccacgagggcaagaccuucuacgugcucccgaacgacgacacgcugcgcgucgaggccuucgaguacuaccacaccaccgaccccagcuuccuggggcgguacauguccgcccucaaccacaccaagaaguggaaguacccccaggugaacggccugacgagcaucaagugggcggacaacaacugcuaccuggccaccgcccuccugacccugcagcagaucgagcucaaguucaaccccccggcccugcaggacgcguacuaccgcgcccgggccggggaggccgccaacuucugcgcgcugauccucgccuacugcaacaagaccgugggcgagcugggcgacguccgcgagacgauguccuaccuguuccagcacgccaaccucgacagcugcaagcgggugcugaacgucgugugcaagaccugcgggcagcagcagaccacccugaagggcguggaggccgucauguacauggggacccucuccuacgagcaguucaagaagggcgugcagauccccugcacgugcgggaagcaggccaccaaguaccuggugcagcaggagagccccuucgucaugauguccgcgcccccggcccaguacgagcugaagcacggcaccuucaccugcgccagcgaguacacgggcaacuaccagugcgggcacuacaagcacaucaccuccaaggagacccucuacugcaucgacggcgcccugcugaccaagagcagcgaguacaaggggcccaucacggacguguucuacaaggagaacuccuacaccaccaccaucaagcccgugacguacaagcucgacggcgucgugugcaccgagaucgaccccaagcuggacaacuacuacaagaaggacaacagcuacuucaccgagcagccgaucgaccuggugcccaaccagcccuaccccaacgccuccuucgacaacuucaaguucgucugcgacaacaucaaguucgcggacgaccucaaccagcugaccggguacaagaagccggccagccgcgagcugaaggugacguucuuccccgaccucaacggcgacguggucgccaucgacuacaagcacuacacccccuccuucaagaagggcgccaagcugcugcacaagcccaucguguggcacgugaacaacgcgaccaacaaggccaccuacaagccgaacacguggugcauccggugccucuggagcaccaagcccgucgagaccuccaacagcuucgacgugcugaaguccgaggacgcccaggggauggacaaccuggccugcgaggaccucaagcccgugagcgaggaggucguggagaaccccaccauccagaaggacgugcuggagugcaacgucaagacgaccgagguggugggcgacaucauccugaagccggccaacaacucccucaagaucaccgaggaggucgggcacaccgaccugauggcggccuacguggacaacagcucccugacgaucaagaagcccaacgagcucagccgcgugcugggccugaagacccucgccacccacgggcuggccgccgucaacuccgugcccugggacaccaucgcgaacuacgccaagccguuccugaacaagguggucagcacgaccaccaacaucgugacccgcugccucaaccgggugugcacgaacuacaugcccuacuucuucacccugcugcuccagcugugcaccuucacccgcuccaccaacagccggaucaaggccuccaugcccacgaccaucgccaagaacaccgucaagagcgugggcaaguucugccuggaggccagcuucaacuaccucaagucccccaacuucagcaagcugaucaacaucaucaucugguuccugcuccuguccgugugccugggcagccucaucuacuccaccgcggcccuggggguccugaugagcaaccucggcaugccguccuacugcacgggguaccgcgagggcuaccugaacagcaccaacgugaccaucgccaccuacugcacgggcuccauccccugcagcgugugccuguccgggcucgacagccuggacaccuaccccucccuggagaccauccagaucaccaucagcuccuucaagugggaccucacggccuucggccuggucgccgagugguuccuggcguacauccucuucacccgguucuucuacgugcuggggcuggccgccaucaugcagcucuucuucagcuacuucgccgugcacuucaucuccaacagcuggcugauguggcugaucaucaaccugguccagauggcgcccaucuccgccauggugcgcauguacaucuucuucgccagcuucuacuacguguggaagagcuacguccacgugguggacggcugcaacuccagcaccugcaugaugugcuacaagcggaaccgcgccacccgggucgagugcacgaccaucgugaacgggguccgccgguccuucuacguguacgccaacggcggcaagggguucugcaagcuccacaacuggaacugcgugaacugcgacaccuucugcgcgggcagcaccuucaucuccgacgaggucgcccgcgaccugagccugcaguucaagcggccgaucaaccccacggaccaguccagcuacaucguggacuccgugaccgucaagaacgggagcauccaccucuacuucgacaaggccggccagaagaccuacgagcgccacucccugagccacuucgugaaccuggacaaccuccgggccaacaacaccaaggggucccugcccaucaacgugaucgucuucgacggcaagagcaagugcgaggaguccagcgccaaguccgcgagcguguacuacucccagcugaugugccagcccauccuccugcuggaccaggcccucgugagcgacgucggcgacagcgccgagguggccgugaagauguucgacgccuacgucaacacguucuccagcaccuucaacgugccgauggagaagcugaagacccugguggcgaccgccgaggccgagcucgccaagaacgucucccuggacaacgugcugagcacguucaucuccgcggcccgccagggguucguggacagcgacgucgagaccaaggacgugguggagugccucaagcugucccaccagagcgacaucgaggucaccggcgacuccugcaacaacuacaugcugaccuacaacaagguggagaacaugacgccccgggaccucggggccugcaucgacugcagcgcccgccacaucaacgcccagguggcgaagucccacaacaucgcccugaucuggaacgucaaggacuucaugagccuguccgagcagcuccggaagcagauccgcagcgccgccaagaagaacaaccugcccuucaagcugaccugcgccaccacccgccagguggugaacgucgugacgaccaagaucgcgcucaagggcgggugaggacuaguuauaagacugacuagcccgaugggccucccaacgggcccuccuccccuccuugcaccgagauuaauaaaaaaaaaaaaaaaaaaaaaaaaaaaaaaaaaaaaaaaaaaaaaaaaaaaaaaaaaaaaaaaaugcaucccccccccccccccccccccccccccccccaaaggcucuuuucagagccaccagaauu

SEQ ID NO: 21649 - RNA, 6058 nt, Artificial Sequence
  SARS-CoV-2__MT811727.1__non-structural protein 3 (NSP3) mRNA gc
aggagaaagcuuaccauggcccccaccaaggugaccuucggcgacgacacggucaucgaggugcagggguacaagagcgugaacaucaccuucgagcuggacgagcgcaucgacaagguccucaacgagaagugcuccgccuacaccguggagcugggcaccgaggugaacgaguucgcgugcgucguggccgacgccgugaucaagacgcugcagccggucagcgagcuccugaccccccuggggaucgaccucgacgagugguccauggccaccuacuaccuguucgacgagagcggcgaguucaagcuggccucccacauguacugcagcuucuacccccccgacgaggacgaggaggagggggacugcgaggaggaggaguucgagccguccacccaguacgaguacggcacggaggacgacuaccagggcaagccccucgaguucggggcgaccagcgccgcccugcagcccgaggaggagcaggaggaggacuggcuggacgacgacucccagcagaccgugggccagcaggacgggagcgaggacaaccagaccacgaccauccagaccaucguggagguccagccccagcucgagauggagcugaccccgguggugcagacgaucgaggucaacuccuucagcggcuaccugaagcucaccgacaacguguacaucaagaacgccgacaucguggaggaggcgaagaaggucaagcccaccgugguggucaacgccgccaacguguaccugaagcacgggggcggcguggccggggcccugaacaaggcgaccaacaacgccaugcaggucgaguccgacgacuacaucgccacgaacggcccccucaagguggggggcagcugcguccuguccggccacaaccuggccaagcacugccuccacgugguggggcccaacgucaacaagggcgaggacauccagcugcugaagagcgccuacgagaacuucaaccagcacgaggugcuccuggcgccgcugcucuccgccgggaucuucggcgccgaccccauccacagccugcgggugugcgucgacaccgugcgcaccaacguguaccuggccgucuucgacaagaaccucuacgacaagcugguguccagcuuccuggagaugaagagcgagaagcagguggagcagaacaucgccgagauccccaaggaggaggucaagcccuucaucaccgaguccaagccgagcguggagcagcggaagcaggacgacaagaagaucaaggcgugcguggaggaggucacgaccacccucgaggagaccaaguuccugacggagaaccugcuccuguacaucgacaucaacgggaaccugcaccccgacuccgccacccucgugagcgacaucgacaucaccuuccugaagaaggacgcccccuacaucgugggcgacgucgugcaggagggcgugcugaccgccgucgugauccccacgaagaaggccgggggcaccaccgagaugcucgcgaaggcccugcgcaaggugccgaccgacaacuacaucacgaccuaccccgggcagggccugaacggguacaccgucgaggaggccaagaccgugcucaagaagugcaaguccgccuucuacauccugcccagcaucaucuccaacgagaagcaggagauccugggcaccgugagcuggaaccuccgggagaugcuggcgcacgccgaggagacgcgcaagcugaugcccgucugcguggagaccaaggccaucguguccaccauccagcggaaguacaagggcaucaagauccaggagggggucguggacuacggcgcccgcuucuacuucuacaccagcaagacgaccguggccucccugaucaacacccucaacgaccugaacgagacccuggucacgaugccgcucggguacgugacccacggccugaaccuggaggaggcggcccgguacaugcgcagccucaaggugcccgccaccgucuccgugagcucccccgacgccgugaccgccuacaacggguaccugacgagcuccagcaagacccccgaggagcacuucaucgagaccaucucccuggcgggcagcuacaaggacuggagcuacuccggccagagcacccagcucgggaucgaguuccugaagcggggcgacaaguccgucuacuacacgagcaacccgaccaccuuccaccuggacggggaggugaucaccuucgacaaccucaagacgcugcugucccuccgcgaggugcggaccaucaaggucuucaccaccguggacaacaucaaccugcacacgcagguggucgacaugagcaugaccuacggccagcaguucggccccaccuaccuggacggggccgacgugaccaagaucaagccccacaacucccacgagggcaagacguucuacgugcucccgaacgacgacacccugcgcgucgaggccuucgaguacuaccacaccaccgaccccagcuuccuggggcgguacauguccgcccucaaccacacgaagaaguggaaguacccccaggugaacggccugaccagcaucaagugggccgacaacaacugcuaccuggcgaccgcccuccugacccugcagcagaucgagcucaaguucaaccccccggcccugcaggacgccuacuaccgcgcgcgggccggggaggccgccaacuucugcgcccugauccucgcguacugcaacaagacggugggcgagcugggcgacguccgcgagaccauguccuaccuguuccagcacgccaaccucgacagcugcaagcgggugcugaacgucgugugcaagaccugcgggcagcagcagaccacccugaagggcguggaggccgucauguacauggggacgcucuccuacgagcaguucaagaagggcgugcagauccccugcaccugcgggaagcaggccaccaaguaccuggugcagcaggagagccccuucgucaugauguccgcccccccggcgcaguacgagcugaagcacggcaccuucacgugcgccagcgaguacaccggcaacuaccagugcgggcacuacaagcacaucaccuccaaggagacccucuacugcaucgacggcgcccugcugacgaagagcagcgaguacaaggggcccaucaccgacguguucuacaaggagaacuccuacaccaccacgaucaagcccgugaccuacaagcucgacggcgucgugugcaccgagaucgaccccaagcuggacaacuacuacaagaaggacaacagcuacuucaccgagcagccgaucgaccuggugcccaaccagcccuaccccaacgccuccuucgacaacuucaaguucgucugcgacaacaucaaguucgccgacgaccucaaccagcugacgggguacaagaagccggcgagccgcgagcugaaggugaccuucuuccccgaccucaacggcgacguggucgccaucgacuacaagcacuacacccccuccuucaagaagggcgccaagcugcugcacaagcccaucguguggcacgugaacaacgccaccaacaaggcgacguacaagccgaacaccuggugcauccggugccucuggagcaccaagcccgucgagaccuccaacagcuucgacgugcugaaguccgaggacgcccaggggauggacaaccuggugugcgaggaccucaagcccgucagcgaggaggugguggagaaccccacgauccagaaggacguccuggagugcaacgugaagaccaccgagguggucggcgacaucauccugaagccggccaacaacucccucaagaucaccgaggagguggggcacacggaccugauggccgccuacguggacaacagcucccugaccaucaagaagcccaacgagcucagccgcguccugggccugaagacccucgcgacccacgggcuggccgccgugaacuccgugcccugggacacgaucgccaacuacgccaagccguuccugaacaaggucgugagcaccaccaccaacaucgugacgcgcugccucaaccgggucugcaccaacuacaugcccuacuucuucacccugcugcuccagcugugcaccuucacccgcuccacgaacagccggaucaaggcguccaugcccaccaccaucgccaagaacaccgugaagagcgugggcaaguucugccuggaggccagcuucaacuaccucaagucccccaacuucagcaagcugaucaacaucaucaucugguuccugcuccuguccgucugccugggcagccucaucuacuccacggccgcccugggggugcugaugagcaaccucggcaugccguccuacugcaccggguaccgcgagggcuaccugaacagcaccaacgugaccaucgcgacguacugcaccggcuccauccccugcagcgucugccuguccgggcucgacagccuggacaccuaccccucccuggagaccauccagaucacgaucagcuccuucaagugggaccucaccgccuucggccugguggccgagugguuccuggccuacauccucuucacccgguucuucuacgugcuggggcuggccgcgaucaugcagcucuucuucagcuacuucgccguccacuucaucuccaacagcuggcugauguggcugaucaucaaccuggugcagauggcccccaucuccgccauggugcgcauguacaucuucuucgcgagcuucuacuacgucuggaagagcuacgugcacguggucgacggcugcaacuccagcaccugcaugaugugcuacaagcggaaccgcgccacgcggguggagugcaccaccaucgucaacggggugcgccgguccuucuacguguacgccaacggcggcaagggguucugcaagcuccacaacuggaacugcgucaacugcgacaccuucugcgccggcagcacguucaucuccgacgagguggcccgcgaccugagccugcaguucaagcggccgaucaaccccaccgaccaguccagcuacaucguggacuccgucaccgugaagaacgggagcauccaccucuacuucgacaaggcgggccagaagaccuacgagcgccacucccugagccacuucgugaaccuggacaaccuccgggccaacaacacgaaggggucccugcccaucaacgucaucguguucgacggcaagagcaagugcgaggaguccagcgccaaguccgccagcguguacuacucccagcugaugugccagcccauccuccugcuggaccaggcccucgucagcgacgugggcgacagcgcggagguggccgucaagauguucgacgccuacgugaacaccuucuccagcaccuucaacgugccgauggagaagcugaagacccuggucgccacggccgaggcggagcucgccaagaacgugucccuggacaacgugcugagcaccuucaucuccgccgcccgccagggguucgucgacagcgacguggagaccaaggacguggucgagugccucaagcugucccaccagagcgacaucgaggugaccggcgacuccugcaacaacuacaugcugacguacaacaagguggagaacaugaccccccgggaccucggggcgugcaucgacugcagcgcccgccacaucaacgcccaggucgccaagucccacaacaucgcccugaucuggaacgugaaggacuucaugagccuguccgagcagcuccggaagcagauccgcagcgcggccaagaagaacaaccugcccuucaagcugaccugcgccaccacgcgccagguggucaacguggugaccaccaagaucgcccucaagggcgggugaggacuaguuauaagacugacuagcccgaugggccucccaacgggcccuccuccccuccuugcaccgagauuaauaaaaaaaaaaaaaaaaaaaaaaaaaaaaaaaaaaaaaaaaaaaaaaaaaaaaaaaaaaaaaaaaugcaucccccccccccccccccccccccccccccccaaaggcucuuuucagagccaccagaauu

SEQ ID NO: 21650 - RNA, 6058 nt, Artificial Sequence
  SARS-CoV-2__MT811731.1__non-structural protein 3 (NSP3) mRNA gc
aggagaaagcuuaccauggcccccaccaaggugaccuucggcgacgacacggucaucgaggugcagggguacaagagcgugaacaucaccuucgagcuggacgagcgcaucgacaagguccucaacgagaagugcuccgccuacaccguggagcugggcaccgaggugaacgaguucgcgugcgucguggccgacgccgugaucaagacgcugcagccggucagcgagcuccugaccccccuggggaucgaccucgacgagugguccauggccaccuacuaccuguucgacgagagcggcgaguucaagcuggccucccacauguacugcagcuucuacccccccgacgaggacgaggaggagggggacugcgaggaggaggaguucgagccguccacccaguacgaguacggcacggaggacgacuaccagggcaagccccucgaguucggggcgaccagcgccgcccugcagcccgaggaggagcaggaggaggacuggcuggacgacgacucccagcagaccgugggccagcaggacgggagcgaggacaaccagaccacgaccauccagaccaucguggagguccagccccagcucgagauggagcugaccccgguggugcagacgaucgaggucaacuccuucagcggcuaccugaagcucaccgacaacguguacaucaagaacgccgacaucguggaggaggcgaagaaggucaagcccaccgugguggucaacgccgccaacguguaccugaagcacgggggcggcguggccggggcccugaacaaggcgaccaacaacgccaugcaggucgaguccgacgacuacaucgccacgaacggcccccucaagguggggggcagcugcguccuguccggccacaaccuggccaagcacugccuccacgugguggggcccaacgucaacaagggcgaggacauccagcugcugaagagcgccuacgagaacuucaaccagcacgaggugcuccuggcgccgcugcucuccgccgggaucuucggcgccgaccccauccacagccugcgggugugcgucgacaccgugcgcaccaacguguaccuggccgucuucgacaagaaccucuacgacaagcugguguccagcuuccuggagaugaagagcgagaagcagguggagcagaagaucgccgagauccccaaggaggaggucaagcccuucaucaccgaguccaagccgagcguggagcagcggaagcaggacgacaagaagaucaaggcgugcguggaggaggucacgaccacccucgaggagaccaaguuccugacggagaaccugcuccuguacaucgacaucaacgggaaccugcaccccgacuccgccacccucgugagcgacaucgacaucaccuuccugaagaaggacgcccccuacaucgugggcgacgucgugcaggagggcgugcugaccgccgucgugauccccacgaagaaggccgggggcaccaccgagaugcucgcgaaggcccugcgcaaggugccgaccgacaacuacaucacgaccuaccccgggcagggccugaacggguacaccgucgaggaggccaagaccgugcucaagaagugcaaguccgccuucuacauccugcccagcaucaucuccaacgagaagcaggagauccugggcaccgugagcuggaaccuccgggagaugcuggcgcacgccgaggagacgcgcaagcugaugcccgucugcguggagaccaaggccaucguguccaccauccagcggaaguacaagggcaucaagauccaggagggggucguggacuacggcgcccgcuucuacuucuacaccagcaagacgaccguggccucccugaucaacacccucaacgaccugaacgagacccuggucacgaugccgcucggguacgugacccacggccugaaccuggaggaggcggcccgguacaugcgcagccucaaggugcccgccaccgucuccgugagcucccccgacgccgugaccgccuacaacggguaccugacgagcuccagcaagacccccgaggagcacuucaucgagaccaucucccuggcgggcagcuacaaggacuggagcuacuccggccagagcacccagcucgggaucgaguuccugaagcggggcgacaaguccgucuacuacacgagcaacccgaccaccuuccaccuggacggggaggugaucaccuucgacaaccucaagacguuccugucccugcgcgaggugcggaccaucaaggucuucaccaccguggacaacaucaaccuccacacgcagguggucgacaugagcaugaccuacggccagcaguucggccccaccuaccuggacggggccgacgugaccaagaucaagccccacaacucccacgagggcaagacguucuacgugcugccgaacgacgacacccuccgcgucgaggccuucgaguacuaccacaccaccgaccccagcuuccuggggcgguacauguccgcccugaaccacacgaagaaguggaaguacccccaggugaacggccucaccagcaucaagugggccgacaacaacugcuaccuggcgaccgcccugcucacccugcagcagaucgagcugaaguucaaccccccggcccuccaggacgccuacuaccgcgcgcgggccggggaggccgccaacuucugcgcccugauccuggcguacugcaacaagacggugggcgagcucggcgacguccgcgagaccauguccuaccuguuccagcacgccaaccuggacagcugcaagcgggugcucaacgucgugugcaagaccugcgggcagcagcagaccacccugaagggcguggaggccgucauguacauggggacgcuguccuacgagcaguucaagaagggcgugcagauccccugcaccugcgggaagcaggccaccaaguaccucgugcagcaggagagccccuucgucaugauguccgcccccccggcgcaguacgagcugaagcacggcaccuucacgugcgccagcgaguacaccggcaacuaccagugcgggcacuacaagcacaucaccuccaaggagacccuguacugcaucgacggcgcccuccugacgaagagcagcgaguacaaggggcccaucaccgacguguucuacaaggagaacuccuacaccaccacgaucaagcccgugaccuacaagcuggacggcgucgugugcaccgagaucgaccccaagcucgacaacuacuacaagaaggacaacagcuacuucaccgagcagccgaucgaccuggugcccaaccagcccuaccccaacgccuccuucgacaacuucaaguucgucugcgacaacaucaaguucgccgacgaccugaaccagcucacgggguacaagaagccggcgagccgcgagcugaaggugaccuucuuccccgaccugaacggcgacguggucgccaucgacuacaagcacuacacccccuccuucaagaagggcgccaagcuccugcacaagcccaucguguggcacgugaacaacgccaccaacaaggcgacguacaagccgaacaccuggugcauccggugccuguggagcaccaagcccgucgagaccuccaacagcuucgacgugcucaaguccgaggacgcccaggggauggacaaccuggccugcgaggaccugaagcccgugagcgaggaggucguggagaaccccacgauccagaaggacgugcucgagugcaacgucaagaccaccgagguggugggcgacaucauccugaagccggccaacaacucccugaagaucaccgaggaggucgggcacacggaccucauggccgcguacguggacaacagcucccugaccaucaagaagcccaacgagcugagccgcgugcucggccugaagacccuggccacccacgggcucgccgccgucaacuccgugcccugggacacgaucgccaacuacgcgaagccguuccugaacaagguggucagcaccaccaccaacaucgugacgcgcugccugaaccgggugugcaccaacuacaugcccuacuucuucacccuccugcugcagcucugcaccuucacccgcuccacgaacagccggaucaaggccuccaugcccaccaccaucgccaagaacaccgucaagagcgugggcaaguucugccuggaggccagcuucaacuaccugaagucccccaacuucagcaagcucaucaacaucaucaucugguuccugcugcucuccgugugccugggcagccugaucuacuccacggccgcgcucgggguccugaugagcaaccugggcaugccguccuacugcaccggguaccgcgagggcuaccucaacagcaccaacgugaccaucgccacguacugcaccggcuccauccccugcagcgugugccuguccgggcuggacagccucgacaccuaccccucccuggagaccauccagaucacgaucagcuccuucaagugggaccugaccgccuucggccucgucgccgagugguuccuggccuacauccuguucacccgguucuucuacgugcucgggcuggcggccaucaugcagcuguucuucagcuacuucgccgugcacuucaucuccaacagcuggcucauguggcugaucaucaaccugguccagauggcccccaucuccgcgauggugcgcauguacaucuucuucgccagcuucuacuacguguggaagagcuacguccacgugguggacggcugcaacuccagcaccugcaugaugugcuacaagcggaaccgcgccacgcgggucgagugcaccaccaucgugaacgggguccgccgguccuucuacguguacgccaacggcggcaagggguucugcaagcugcacaacuggaacugcgugaacugcgacaccuucugcgccggcagcacguucaucuccgacgaggucgcgcgcgaccucagccugcaguucaagcggccgaucaaccccaccgaccaguccagcuacaucguggacuccgugaccgucaagaacgggagcauccaccuguacuucgacaaggccggccagaagaccuacgagcgccacucccucagccacuucgugaaccuggacaaccugcgggccaacaacacgaaggggucccuccccaucaacgugaucgucuucgacggcaagagcaagugcgaggaguccagcgccaaguccgccagcguguacuacucccagcugaugugccagcccauccugcuccuggaccaggcgcuggugagcgacgucggcgacagcgccgagguggccgugaagauguucgacgccuacgucaacaccuucuccagcaccuucaacgugccgauggagaagcucaagacccugguggccacggcggaggccgagcuggccaagaacgucucccucgacaacgugcugagcaccuucaucuccgccgcgcgccagggguucguggacagcgacgucgagaccaaggacgugguggagugccugaagcucucccaccagagcgacaucgaggucaccggcgacuccugcaacaacuacaugcugacguacaacaagguggagaacaugaccccccgggaccugggggccugcaucgacugcagcgcccgccacaucaacgcccagguggccaagucccacaacaucgcgcucaucuggaacgucaaggacuucaugagccuguccgagcagcugcggaagcagauccgcagcgccgccaagaagaacaaccuccccuucaagcugaccugcgccaccacgcgccagguggugaacgucgugaccaccaagaucgcccugaagggcgggugaggacuaguuauaagacugacuagcccgaugggccucccaacgggcccuccuccccuccuugcaccgagauuaauaaaaaaaaaaaaaaaaaaaaaaaaaaaaaaaaaaaaaaaaaaaaaaaaaaaaaaaaaaaaaaaaugcaucccccccccccccccccccccccccccccccaaaggcucuuuucagagccaccagaauu

SEQ ID NO: 21651 - RNA, 6058 nt, Artificial Sequence
  SARS-CoV-2__MT811755.1__non-structural protein 3 (NSP3) mRNA gc
aggagaaagcuuaccauggcccccaccaaggugaccuucggcgacgacacggucaucgaggugcagggguacaagagcgugaacaucaccuucgagcuggacgagcgcaucgacaagguccucaacgagaagugcuccgccuacaccguggagcugggcaccgaggugaacgaguucgcgugcgucguggccgacgccgugaucaagacgcugcagccggucagcgagcuccugaccccccuggggaucgaccucgacgagugguccauggccaccuacuaccuguucgacgagagcggcgaguucaagcuggccucccacauguacugcagcuucuacccccccgacgaggacgaggaggagggggacugcgaggaggaggaguucgagccguccacccaguacgaguacggcacggaggacgacuaccagggcaagccccucgaguucggggcgaccagcgccgcccugcagcccgaggaggagcaggaggaggacuggcuggacgacgacucccagcagaccgugggccagcaggacgggagcgaggacaaccagaccacgaccauccagaccaucguggagguccagccccagcucgagauggagcugaccccgguggugcagacgaucgaggucaacuccuucagcggcuaccugaagcucaccgacaacguguacaucaagaacgccgacaucguggaggaggcgaagaaggucaagcccaccgugguggucaacgccgccaacguguaccugaagcacgggggcggcguggccggggcccugaacaaggcgaccaacaacgccaugcaggucgaguccgacgacuacaucgccacgaacggcccccucaagguggggggcagcugcguccuguccggccacaaccuggccaagcacugccuccacgugguggggcccaacgucaacaagggcgaggacauccagcugcugaagagcgccuacgagaacuucaaccagcacgaggugcuccuggcgccgcugcucuccgccgggaucuucggcgccgaccccauccacagccugcgggugugcgucgacaccgugcgcaccaacguguaccuggccgucuucgacaagaaccucuacgacaagcugguguccagcuuccuggagaugaagagcgagaagcagguggagcagaagaucgccgagauccccaaggaggaggucaagcccuucaucaccgaguccaagccgagcguggagcagcggaagcaggacgacaagaagaucaaggcgugcguggaggaggucacgaccacccucgaggagaccaaguuccugacggagaaccugcuccuguacaucgacaucaacgggaaccugcaccccgacuccgccacccucgugagcgacaucgacaucaccuuccugaagaaggacgcccccuacaucgugggcgacgucgugcaggagggcgugcugaccgccgucgugauccccacgaagaaggccgggggcaccaccgagaugcucgcgaaggcccugcgcaaggugccgaccgacaacuacaucacgaccuaccccgggcagggccugaacggguacaccgucgaggaggccaagaccgugcucaagaagugcaaguccgccuucuacauccugcccagcaucaucuccaacgagaagcaggagauccugggcaccgugagcuggaaccuccgggagaugcuggcgcacgccgaggagacgcgcaagcugaugcccgucugcguggagaccaaggccaucguguccaccauccagcggaaguacaagggcaucaagauccaggagggggucguggacuacggcgcccgcuucuacuucuacaccagcaagacgaccguggccucccugaucaacacccucaacgaccugaacgagacccuggucacgaugccgcucggguacgugacccacggccugaaccuggaggaggcggcccgguacaugcgcagccucaaggugcccgccaccgucuccgugagcucccccgacgccgugaccgccuacaacggguaccugacgagcuccagcaagacccccgaggagcacuucaucgagaccaucucccuggcgggcagcuacaaggacuggagcuacuccggccagagcacccagcucgggaucgaguuccugaagcggggcgacaaguccgucuacuacacgagcaacccgaccaccuuccaccuggacggggaggugaucaccuucgacaaccucaagacgcugcugucccuccgcgaggugcggaccaucaaggucuucaccaccguggacaacaucaaccugcacacgcagguggucgacaugagcaugaccuacggccagcaguucggccccaccuaccuggacggggccgacgugaccaagaucaagccccacaacucccacgagggcaagacguucuacgugcucccgaacgacgacacccugcgcgucgaggccuucgaguacuaccacaccaccgaccccagcuuccuggggcgguacauguccgcccucaaccacacgaagaaguggaaguacccccaggugaacggccugaccagcaucaagugggccgacaacaacugcuaccuggcgaccgcccuccugacccugcagcagaucgagcucaaguucaaccccccggcccugcaggacgccuacuaccgcgcgcgggccggggaggccgccaacuucugcgcccugauccucgcguacugcaacaagacggugggcgagcugggcgacguccgcgagaccauguccuaccuguuccagcacgccaaccucgacagcugcaagcgggugcugaacgucgugugcaagaccugcgggcagcagcagaccacccugaagggcguggaggccgucauguacauggggacgcucuccuacgagcaguucaagaagggcgugcagauccccugcaccugcgggaagcaggccaccaaguaccuggugcagcaggagagccccuucgucaugauguccgcccccccggcgcaguacgagcugaagcacggcaccuucacgugcgccagcgaguacaccggcaacuaccagugcgggcacuacaagcacaucaccuccaaggagacccucuacugcaucgacggcgcccugcugacgaagagcagcgaguacaaggggcccaucaccgacguguucuacaaggagaacuccuacaccaccacgaucaagcccgugaccuacaagcucgacggcgucgugugcaccgagaucgaccccaagcuggacaacuacuacaagaaggacaacagcuacuucaccgagcagccgaucgaccuggugcccaaccagcccuaccccaacgccuccuucgacaacuucaaguucgucugcgacaacaucaaguucgccgacgaccucaaccagcugacgggguacaagaagccggcgagccgcgagcugaaggugaccuucuuccccgaccucaacggcgacguggucgccaucgacuacaagcacuacacccccuccuucaagaagggcgccaagcugcugcacaagcccaucguguggcacgugaacaacgccaccaacaaggcgacguacaagccgaacaccuggugcauccggugccucuggagcaccaagcccgucgagaccuccaacagcuucgacgugcugaaguccgaggacgcccaggggauggacaaccuggccugcgaggaccucaagcccgugagcgaggaggucguggagaaccccacgauccagaaggacgugcuggagugcaacgucaagaccaccgagguggugggcgacaucauccugaagccggccaacaacucccucaagaucaccgaggaggucgggcacacggaccugauggccgcguacguggacaacagcucccugaccaucaagaagcccaacgagcucagccgcgugcugggccugaagacccucgccacccacgggcuggccgccgucaacuccgugcccugggacacgaucgccaacuacgcgaagccguuccugaacaagguggucagcaccaccaccaacaucgugacgcgcugccucaaccgggugugcaccaacuacaugcccuacuucuucacccugcugcuccagcugugcaccuucacccgcuccacgaacagccggaucaaggccuccaugcccaccaccaucgccaagaacaccgucaagagcgugggcaaguucugccuggaggccagcuucaacuaccucaagucccccaacuucagcaagcugaucaacaucaucaucugguuccugcuccuguccgugugccugggcagccucaucuacuccacggccgcgcuggggguccugaugagcaaccucggcaugccguccuacugcaccggguaccgcgagggcuaccugaacagcaccaacgugaccaucgccacguacugcaccggcuccauccccugcagcgugugccuguccgggcucgacagccuggacaccuaccccucccuggagaccauccagaucacgaucagcuccuucaagugggaccucaccgccuucggccuggucgccgagugguuccuggccuacauccucuucacccgguucuucuacgugcuggggcuggcggccaucaugcagcucuucuucagcuacuucgccgugcacuucaucuccaacagcuggcugauguggcugaucaucaaccugguccagauggcccccaucuccgcgauggugcgcauguacaucuucuucgccagcuucuacuacguguggaagagcuacguccacgugguggacggcugcaacaccuccacgugcaugaugugcuacaagcggaaccgcgccacccgggucgagugcaccaccaucgugaacgggguccgccggagcuucuacguguacgccaacggcggcaagggguucugcaagcuccacaacuggaacugcgugaacugcgacacguucugcgccggcuccaccuucaucagcgacgaggucgcgcgcgaccugucccugcaguucaagcggccgaucaaccccaccgaccagagcuccuacaucguggacagcgugaccgucaagaacggguccauccaccucuacuucgacaaggccggccagaagacguacgagcgccacagccugucccacuucgugaaccuggacaaccuccgggccaacaacaccaaggggagccugcccaucaacgugaucgucuucgacggcaaguccaagugcgaggagagcuccgccaagagcgccuccguguacuacagccagcugaugugccagcccauccuccugcuggaccaggcgcucguguccgacgucggcgacagcgccgagguggccgugaagauguucgacgccuacgucaacaccuucagcuccaccuucaacgugccgauggagaagcugaagacgcugguggccaccgcggaggccgagcucgccaagaacgucagccuggacaacgugcuguccaccuucaucagcgccgcgcgccagggguucguggacuccgacgucgagaccaaggacgugguggagugccucaagcugagccaccaguccgacaucgaggucacgggcgacagcugcaacaacuacaugcugaccuacaacaagguggagaacaugaccccccgggaccucggggccugcaucgacugcuccgcccgccacaucaacgcccagguggccaagagccacaacaucgcgcugaucuggaacgucaaggacuucaugucccugagcgagcagcuccggaagcagauccgcuccgccgccaagaagaacaaccugcccuucaagcugaccugcgccacgacccgccagguggugaacgucgugaccaccaagaucgcccucaagggcgggugaggacuaguuauaagacugacuagcccgaugggccucccaacgggcccuccuccccuccuugcaccgagauuaauaaaaaaaaaaaaaaaaaaaaaaaaaaaaaaaaaaaaaaaaaaaaaaaaaaaaaaaaaaaaaaaaugcaucccccccccccccccccccccccccccccccaaaggcucuuuucagagccaccagaauu

SEQ ID NO: 21652 - RNA, 6058 nt, Artificial Sequence
  SARS-CoV-2__MT806104.1__non-structural protein 3 (NSP3) mRNA gc
aggagaaagcuuaccauggcccccaccaaggugaccuucggcgacgacacggucaucgaggugcagggguacaagagcgugaacaucaccuucgagcuggacgagcgcaucgacaagguccucaacgagaagugcuccgccuacaccguggagcugggcaccgaggugaacgaguucgcgugcgucguggccgacgccgugaucaagacgcugcagccggucagcgagcuccugaccccccuggggaucgaccucgacgagugguccauggccaccuacuaccuguucgacgagagcggcgaguucaagcuggccucccacauguacugcagcuucuacccccccgacgaggacgaggaggagggggacugcgaggaggaggaguucgagccguccacccaguacgaguacggcacggaggacgacuaccagggcaagccccucgaguucggggcgaccagcgccgcccugcagcccgaggaggagcaggaggaggacuggcuggacgacgacucccagcagaccgugggccagcaggacgggagcgaggacaaccagaccacgaccauccagaccaucguggagguccagccccagcucgagauggagcugaccccgguggugcagacgaucgaggucaacuccuucagcggcuaccugaagcucaccgacaacguguacaucaagaacgccgacaucguggaggaggcgaagaaggucaagcccaccgugguggucaacgccgccaacguguaccugaagcacgggggcggcguggccggggcccugaacaaggcgaccaacaacgccaugcaggucgaguccgacgacuacaucgccacgaacggcccccucaagguggggggcagcugcguccuguccggccacaaccuggccaagcacugccuccacgugguggggcccaacgucaacaagggcgaggacauccagcugcugaagagcgccuacgagaacuucaaccagcacgaggugcuccuggcgccgcugcucuccgccgggaucuucggcgccgaccccauccacagccugcgggugugcgucgacaccgugcgcaccaacguguaccuggccgucuucgacaagaaccucuacgacaagcugguguccagcuuccuggagaugaagagcgagaagcagguggagcagaagaucgccgagauccccaaggaggaggucaagcccuucaucaccgaguccaagccgagcguggagcagcggaagcaggacgacaagaagaucaaggcgugcguggaggaggucacgaccacccucgaggagaccaaguuccugacggagaaccugcuccuguacaucgacaucaacgggaaccugcaccccgacuccgccacccucgugagcgacaucgacaucaccuuccugaagaaggacgcccccuacaucgugggcgacgucgugcaggagggcgugcugaccgccgucgugauccccacgaagaaggccgggggcaccaccgagaugcucgcgaaggcccugcgcaaggugccgaccgacaacuacaucacgaccuaccccgggcagggccugaacggguacaccgucgaggaggccaagaccgugcucaagaagugcaaguccgccuucuacauccugcccagcaucaucuccaacgagaagcaggagauccugggcaccgugagcuggaaccuccgggagaugcuggcgcacgccgaggagacgcgcaagcugaugcccgucugcguggagaccaaggccaucguguccaccauccagcggaaguacaagggcaucaagauccaggagggggucguggacuacggcgcccgcuucuacuucuacaccagcaagacgaccguggccucccugaucaacacccucaacgaccugaacgagacccuggucacgaugccgcucggguacgugacccacggccugaaccuggaggaggcggcccgguacaugcgcagccucaaggugcccgccaccgucuccgugagcucccccgacgccgugaccgccuacaacggguaccugacgagcuccagcaagacccccgaggagcacuucaucgagaccaucucccuggcgggcagcuacaaggacuggagcuacuccggccagagcacccagcucgggaucgaguuccugaagcggggcgacaaguccgucuacuacacgagcaacccgaccaccuuccaccuggacggggaggugaucaccuucgacaaccucaagacgcugcugucccuccgcgaggugcggaccaucaaggucuucaccaccguggacaacaucaaccugcacacgcagguggucgacaugagcaugaccuacggccagcaguucggccccaccuaccuggacggggccgacgugaccaagaucaagccccacaacucccacgagggcaagacguucuacgugcucccgaacgacgacacccugcgcgucgaggccuucgaguacuaccacaccaccgaccccagcuuccuggggcgguacauguccgcccucaaccacacgaagaaguggaaguacccccaggugaacggccugaccagcaucaagugggccgacaacaacugcuaccuggcgaccgcccuccugacccugcagcagaucgagcucaaguucaaccccccggcccugcaggacgccuacuaccgcgcgcgggccggggaggccgccaacuucugcgcccugauccucgcguacugcaacaagacggugggcgagcugggcgacguccgcgagaccauguccuaccuguuccagcacgccaaccucgacagcugcaagcgggugcugaacgucgugugcaagaccugcgggcagcagcagaccacccugaagggcguggaggccgucauguacauggggacgcucuccuacgagcaguucaagaagggcgugcagauccccugcaccugcgggaagcaggccaccaaguaccuggugcagcaggagagccccuucgucaugauguccgcccccccggcgcaguacgagcugaagcacggcaccuucacgugcgccagcgaguacaccggcaacuaccagugcgggcacuacaagcacaucaccuccaaggagacccucuacugcaucgacggcgcccugcugacgaagagcagcgaguacaaggggcccaucaccgacguguucuacaaggagaacuccuacaccaccacgaucaagcccgugaccuacaagcucgacggcgucgugugcaccgagaucgaccccaagcuggacaacuacuacaagaaggacaacagcuacuucaccgagcagccgaucgaccuggugcccaaccagcccuaccccaacgccuccuucgacaacuucaaguucgucugcgacaacaucaaguucgccgacgaccucaaccagcugacgggguacaagaagccggcgagccgcgagcugaaggugaccuucuuccccgaccucaacggcgacguggucgccaucgacuacaagcacuacacccccuccuucaagaagggcgccaagcugcugcacaagcccaucguguggcacgugaacaacgccaccaacaaggcgacguacaagccgaacaccuggugcauccggugccucuggagcaccaagcccgucgagaccuccaacagcuucgacgugcugaacuccgaggacgcccaggggauggacaaccuggccugcgaggaccucaagcccgugagcgaggaggucguggagaaccccacgauccagaaggacgugcuggagugcaacgucaagaccaccgagguggugggcgacaucauccugaagccggccaacaacucccucaagaucaccgaggaggucgggcacacggaccugauggccgcguacguggacaacagcucccugaccaucaagaagcccaacgagcucagccgcgugcugggccugaagacccucgccacccacgggcuggccgccgucaacuccgugcccugggacacgaucgccaacuacgcgaagccguuccugaacaagguggucagcaccaccaccaacaucgugacgcgcugccucaaccgggugugcaccaacuacaugcccuacuucuucacccugcugcuccagcugugcaccuucacccgcuccacgaacagccggaucaaggccuccaugcccaccaccaucgccaagaacaccgucaagagcgugggcaaguucugccuggaggccagcuucaacuaccucaagucccccaacuucagcaagcugaucaacaucaucaucugguuccugcuccuguccgugugccugggcagccucaucuacuccacggccgcgcuggggguccugaugagcaaccucggcaugccguccuacugcaccggguaccgcgagggcuaccugaacagcaccaacgugaccaucgccacguacugcaccggcuccauccccugcagcgugugccuguccgggcucgacagccuggacaccuaccccucccuggagaccauccagaucacgaucagcuccuucaagugggaccucaccgccuucggccuggucgccgagugguuccuggccuacauccucuucacccgguucuucuacgugcuggggcuggcggccaucaugcagcucuucuucagcuacuucgccgugcacuucaucuccaacagcuggcugauguggcugaucaucaaccugguccagauggcccccaucuccgcgauggugcgcauguacaucuucuucgccagcuucuacuacguguggaagagcuacguccacgugguggacggcugcaacuccagcaccugcaugaugugcuacaagcggaaccgcgccacgcgggucgagugcaccaccaucgugaacgggguccgccgguccuucuacguguacgccaacggcggcaagggguucugcaagcuccacaacuggaacugcgugaacugcgacaccuucugcgccggcagcacguucaucuccgacgaggucgcgcgcgaccugagccugcaguucaagcggccgaucaaccccaccgaccaguccagcuacaucguggacuccgugaccgucaagaacgggagcauccaccucuacuucgacaaggccggccagaagaccuacgagcgccacucccugagccacuucgugaaccuggacaaccuccgggccaacaacacgaaggggucccugcccaucaacgugaucgucuucgacggcaagagcaagugcgaggaguccagcgccaaguccgccagcguguacuacucccagcugaugugccagcccauccuccugcuggaccaggcgcucgugagcgacgucggcgacagcgccgagguggccgugaagauguucgacgccuacgucaacaccuucuccagcaccuucaacgugccgauggagaagcugaagacccugguggccacggcggaggccgagcucgccaagaacgucucccuggacaacgugcugagcaccuucaucuccgccgcgcgccagggguucguggacagcgacgucgagaccaaggacgugguggagugccucaagcugucccaccagagcgacaucgaggucaccggcgacuccugcaacaacuacaugcugacguacaacaagguggagaacaugaccccccgggaccucggggccugcaucgacugcagcgcccgccacaucaacgcccagguggccaagucccacaacaucgcgcugaucuggaacgucaaggacuucaugagccuguccgagcagcuccggaagcagauccgcagcgccgccaagaagaacaaccugcccuucaagcugaccugcgccaccacgcgccagguggugaacgucgugaccaccaagaucgcccucaagggcgggugaggacuaguuauaagacugacuagcccgaugggccucccaacgggcccuccuccccuccuugcaccgagauuaauaaaaaaaaaaaaaaaaaaaaaaaaaaaaaaaaaaaaaaaaaaaaaaaaaaaaaaaaaaaaaaaaugcaucccccccccccccccccccccccccccccccaaaggcucuuuucagagccaccagaauu

SEQ ID NO: 21653 - RNA, 6058 nt, Artificial Sequence
  SARS-CoV-2__MT806765.1__non-structural protein 3 (NSP3) mRNA gc
aggagaaagcuuaccauggcccccaccaaggugaccuucggcgacgacacggucaucgaggugcagggguacaagagcgugaacaucaccuucgagcuggacgagcgcaucgacaagguccucaacgagaagugcuccgccuacaccguggagcugggcaccgaggugaacgaguucgcgugcgucguggccgacgccgugaucaagacgcugcagccggucagcgagcuccugaccccccuggggaucgaccucgacgagugguccauggccaccuacuaccuguucgacgagagcggcgaguucaagcuggccucccacauguacugcagcuucuacccccccgacgaggacgaggaggagggggacugcgaggaggaggaguucgagccguccacccaguacgaguacggcacggaggacgacuaccagggcaagccccucgaguucggggcgaccagcgccgcccugcagcccgaggaggagcaggaggaggacuggcuggacgacgacucccagcagaccgugggccagcaggacgggagcgaggacaaccagaccacgaccauccagaccaucguggagguccagccccagcucgagauggagcugaccccgguggugcagacgaucgaggucaacuccuucagcggcuaccugaagcucaccgacaacguguacaucaagaacgccgacaucguggaggaggcgaagaaggucaagcccaccgugguggucaacgccgccaacguguaccugaagcacgggggcggcguggccggggcccugaacaaggcgaccaacaacgccaugcaggucgaguccgacgacuacaucgccacgaacggcccccucaagguggggggcagcugcguccuguccggccacaaccuggccaagcacugccuccacgugguggggcccaacgucaacaagggcgaggacauccagcugcugaagagcgccuacgagaacuucaaccagcacgaggugcuccuggcgccgcugcucuccgccgggaucuucggcgccgaccccauccacagccugcgggugugcgucgacaccgugcgcaccaacguguaccuggccgucuucgacaagaaccucuacgacaagcugguguccagcuuccuggagaugaagagcgagaagcagguggagcagaagaucgccgagauccccaaggaggaggucaagcccuucaucaccgaguccaagccgagcguggagcagcggaagcaggacgacaagaagaucaaggcgugcguggaggaggucacgaccacccucgaggagaccaaguuccugacggagaaccugcuccuguacaucgacaucaacgggaaccugcaccccgacuccgccacccucgugagcgacaucgacaucaccuuccugaagaaggacgcccccuacaucgugggcgacgucgugcaggagggcgugcugaccgccgucgugauccccacgaagaaggccgggggcaccaccgagaugcucgcgaaggcccugcgcaaggugccgaccgacaacuacaucacgaccuaccccgggcagggccugaacggguacaccgucgaggaggccaagaccgugcucaagaagugcaaguccgccuucuacauccugcccagcaucaucuccaacgagaagcaggagauccugggcaccgugagcuggaaccuccgggagaugcuggcgcacgccgaggagacgcgcaagcugaugcccgucugcguggagaccaaggccaucguguccaccauccagcggaaguacaagggcaucaagauccaggagggggucguggacuacggcgcccgcuucuacuucuacaccagcaagacgaccguggccucccugaucaacacccucaacgaccugaacgagacccuggucacgaugccgcucggguacgugacccacggccugaaccuggaggaggcggcccgguacaugcgcagccucaaggugcccgccaccgucuccgugagcucccccgacgccgugaccgccuacaacggguaccugacgagcuccagcaagacccccgaggagcacuucaucgagaccaucucccuggcgggcagcuacaaggacuggagcuacuccggccagagcacccagcucgggaucgaguuccugaagcggggcgacaaguccgucuacuacacgagcaacccgaccaccuuccaccuggacggggaggugaucaccuucgacaaccucaagacgcugcugucccuccgcgaggugcggaccaucaaggucuucaccaccguggacaacaucaaccugcacacgcagguggucgacaugagcaugaccuacggccagcaguucggccccaccuaccuggacggggccgacgugaccaagaucaagccccacaacucccacgagggcaagacguucuacgugcucccgaacgacgacacccugcgcgucgaggccuucgaguacuaccacaccaccgaccccagcuuccuggggcgguacauguccgcccucaaccacacgaagaaguggaaguacccccaggugaacggccugaccagcaucaagugggccgacaacaacugcuaccuggcgaccgcccuccugacccugcagcagaucgagcucaaguucaaccccccggcccugcaggacgccuacuaccgcgcgcgggccggggaggccgccaacuucugcgcccugauccucgcguacugcaacaagacggugggcgagcugggcgacguccgcgagaccauguccuaccuguuccagcacgccaaccucgacagcugcaagcgggugcugaacgucgugugcaagaccugcgggcagcagcagaccacccugaagggcguggaggccgucauguacauggggacgcucuccuacgagcaguucaagaagggcgugcagauccccugcaccugcgggaagcaggccaccaaguaccuggugcagcaggagagccccuucgucaugauguccgcccccccggcgcaguacgagcugaagcacggcaccuucacgugcgccagcgaguacaccggcaacuaccagugcgggcacuacaagcacaucaccuccaaggagacccucuacugcaucgacggcgcccugcugacgaagagcagcgaguacaaggggcccaucaccgacguguucuacaaggagaacuccuacaccaccacgaucaagcccgugaccuacaagcucgacggcgucgugugcaccgagaucgaccccaagcuggacaacuacuacaagaaggacaacagcuacuucaccgagcagccgaucgaccuggugcccaaccagcccuaccccaacgccuccuucgacaacuucaaguucgucugcgacaacaucaaguucgccgacgaccucaaccagcugacgggguacaagaagccggcgagccgcgagcugaaggugaccuucuuccccgaccucaacggcgacguggucgccaucgacuacaagcacuacacccccuccuucaagaagggcgccaagcugcugcacaagcccaucguguggcacgugaacaacgccaccaacaaggcgacguacaagccgaacaccuggugcauccggugccucuggagcaccaagcccgucgagaccuccaacagccuggacgugcugaaguccgaggacgcccaggggauggacaaccucgccugcgaggaccugaagcccgugagcgaggaggucguggagaaccccacgauccagaaggacgugcuggagugcaacgucaagaccaccgagguggugggcgacaucauccucaagccggccaacaacucccugaagaucaccgaggaggucgggcacacggaccugauggccgcguacguggacaacagcucccucaccaucaagaagcccaacgagcugagccgcgugcugggccucaagacccuggccacccacgggcuggccgccgucaacuccgugcccugggacacgaucgccaacuacgcgaagccguuccucaacaagguggucagcaccaccaccaacaucgugacgcgcugccugaaccgggugugcaccaacuacaugcccuacuucuucacccugcuccugcagcugugcaccuucacccgcuccacgaacagccggaucaaggccuccaugcccaccaccaucgccaagaacaccgucaagagcgugggcaaguucugccucgaggccagcuucaacuaccugaagucccccaacuucagcaagcugaucaacaucaucaucugguuccuccugcuguccgugugccucggcagccugaucuacuccacggccgcgcuggggguccucaugagcaaccugggcaugccguccuacugcaccggguaccgcgagggcuaccugaacagcaccaacgugaccaucgccacguacugcaccggcuccauccccugcagcgugugccucuccgggcuggacagccuggacaccuaccccucccucgagaccauccagaucacgaucagcuccuucaagugggaccugaccgccuucggccuggucgccgagugguuccucgccuacauccuguucacccgguucuucuacgugcuggggcucgcggccaucaugcagcuguucuucagcuacuucgccgugcacuucaucuccaacagcuggcugauguggcugaucaucaaccucguccagauggcccccaucuccgcgauggugcgcauguacaucuucuucgccagcuucuacuacguguggaagagcuacguccacgugguggacggcugcaacuccagcaccugcaugaugugcuacaagcggaaccgcgccacgcgggucgagugcaccaccaucgugaacgggguccgccgguccuucuacguguacgccaacggcggcaagggguucugcaagcugcacaacuggaacugcgugaacugcgacaccuucugcgccggcagcacguucaucuccgacgaggucgcgcgcgaccugagccuccaguucaagcggccgaucaaccccaccgaccaguccagcuacaucguggacuccgugaccgucaagaacgggagcauccaccuguacuucgacaaggccggccagaagaccuacgagcgccacucccugagccacuucgugaaccucgacaaccugcgggccaacaacacgaaggggucccugcccaucaacgugaucgucuucgacggcaagagcaagugcgaggaguccagcgccaaguccgccagcguguacuacucccagcucaugugccagcccauccugcugcucgaccaggcgcuggugagcgacgucggcgacagcgccgagguggccgugaagauguucgacgccuacgucaacaccuucuccagcaccuucaacgugccgauggagaagcugaagacccucguggccacggcggaggccgagcuggccaagaacgucucccuggacaacgugcucagcaccuucaucuccgccgcgcgccagggguucguggacagcgacgucgagaccaaggacgugguggagugccugaagcugucccaccagagcgacaucgaggucaccggcgacuccugcaacaacuacaugcucacguacaacaagguggagaacaugaccccccgggaccugggggccugcaucgacugcagcgcccgccacaucaacgcccagguggccaagucccacaacaucgcgcugaucuggaacgucaaggacuucaugagccucuccgagcagcugcggaagcagauccgcagcgccgccaagaagaacaaccugcccuucaagcucaccugcgccaccacgcgccagguggugaacgucgugaccaccaagaucgcccugaagggcgggugaggacuaguuauaagacugacuagcccgaugggccucccaacgggcccuccuccccuccuugcaccgagauuaauaaaaaaaaaaaaaaaaaaaaaaaaaaaaaaaaaaaaaaaaaaaaaaaaaaaaaaaaaaaaaaaaugcaucccccccccccccccccccccccccccccccaaaggcucuuuucagagccaccagaauu

SEQ ID NO: 21654 - RNA, 6058 nt, Artificial Sequence
  SARS-CoV-2__MT806772.1__non-structural protein 3 (NSP3) mRNA gc
aggagaaagcuuaccauggcccccaccaaggugaccuucggcgacgacacggucaucgaggugcagggguacaagagcgugaacaucaccuucgagcuggacgagcgcaucgacaagguccucaacgagaagugcuccgccuacaccguggagcugggcaccgaggugaacgaguucgcgugcgucguggccgacgccgugaucaagacgcugcagccggucagcgagcuccugaccccccuggggaucgaccucgacgagugguccauggccaccuacuaccuguucgacgagagcggcgaguucaagcuggccucccacauguacugcagcuucuacccccccgacgaggacgaggaggagggggacugcgaggaggaggaguucgagccguccacccaguacgaguacggcacggaggacgacuaccagggcaagccccucgaguucggggcgaccagcgccgcccugcagcccgaggaggagcaggaggaggacuggcuggacgacgacucccagcagaccgugggccagcaggacgggagcgaggacaaccagaccacgaccauccagaccaucguggagguccagccccagcucgagauggagcugaccccgguggugcagacgaucgaggucaacuccuucagcggcuaccugaagcucaccgacaacguguacaucaagaacgccgacaucguggaggaggcgaagaaggucaagcccaccgugguggucaacgccgccaacguguaccugaagcacgggggcggcguggccggggcccugaacaaggcgaccaacaacgccaugcaggucgaguccgacgacuacaucgccacgaacggcccccucaagguggggggcagcugcguccuguccggccacaaccuggccaagcacugccuccacgugguggggcccaacgucaacaagggcgaggacauccagcugcugaagagcgccuacgagaacuucaaccagcacgaggugcuccuggcgccgcugcucuccgccgggaucuucggcgccgaccccauccacagccugcgggugugcgucgacaccgugcgcaccaacguguaccuggccgucuucgacaagaaccucuacgacaagcugguguccagcuuccuggagaugaagagcgagaagcagguggagcagaagaucgccgagauccccaaggaggaggucaagcccuucaucaccgaguccaagccgagcguggagcagcggaagcaggacgacaagaagaucaaggcgugcguggaggaggucacgaccacccucgaggagaccaaguuccugacggagaaccugcuccuguacaucgacaucaacgggaaccugcaccccgacuccgccacccucgugagcgacaucgacaucaccuuccugaagaaggacgcccccuacaucgugggcgacgucgugcaggagggcgugcugaccgccgucgugauccccacgaagaaggccgggggcaccaccgagaugcucgcgaaggcccugcgcaaggugccgaccgacaacuacaucacgaccuaccccgggcagggccugaacggguacaccgucgaggaggccaagaccgugcucaagaagugcaaguccgccuucuacauccugcccagcaucaucuccaacgagaagcaggagauccugggcaccgugagcuggaaccuccgggagaugcuggcgcacgccgaggagacgcgcaagcugaugcccgucugcguggagaccaaggccaucguguccaccauccagcggaaguacaagggcaucaagauccaggagggggucguggacuacggcgcccgcuucuacuucuacaccagcaagacgaccguggccucccugaucaacacccucaacgaccugaacgagacccuggucacgaugccgcucggguacgugacccacggccugaaccuggaggaggcggcccgguacaugcgcagccucaaggugcccgccaccgucuccgugagcucccccgacgccgugaccgccuacaacggguaccugacgagcuccagcaagacccccgaggagcacuucaucgagaccaucucccuggcgggcagcuacaaggacuggagcuacuccggccagagcacccagcucgggaucgaguuccugaagcggggcgacaaguccgucuacuacacgagcaacccgaccaccuuccaccuggacggggaggugaucaccuucgacaaccucaagacgcugcugucccuccgcgaggugcggaccaucaaggucuucaccaccguggacaacaucaaccugcacacgcagguggucgacaugagcaugaccuacggccagcaguucggccccaccuaccuggacggggccgacgugaccaagaucaagccccacaacucccacgagggcaagacguucuacgugcucccgaacgacgacacccugcgcgucgaggccuucgaguacuaccacaccaccgaccccagcuuccuggggcgguacauguccgcccucaaccacacgaagaaguggaaguacccccaggugaacggccugaccagcaucaagugggccgacaacaacugcuaccuggcgaccgcccuccugacccugcagcagaucgagcucaaguucaaccccccggcccugcaggacgccuacuaccgcgcgcgggccggggaggccgccaacuucugcgcccugauccucgcguacugcaacaagacggugggcgagcugggcgacguccgcgagaccauguccuaccuguuccagcacgccaaccucgacagcugcaagcgggugcugaacgucgugugcaagaccugcgggcagcagcagaccacccugaagggcguggaggccgucauguacauggggacgcucuccuacgagcaguucaagaagggcgugcagauccccugcaccugcgggaagcaggccaccaaguaccuggugcagcaggagagccccuucgucaugauguccgcccccccggcgcaguacgagcugaagcacggcaccuucacgugcgccagcgaguacaccggcaacuaccagugcgggcacuacaagcacaucaccuccaaggagacccucuacugcaucgacggcgcccugcugacgaagagcagcgaguacaaggggcccaucaccgacguguucuacaaggagaacuccuacaccaccacgaucaagcccgugaccuacaagcucgacggcgucgugugcaccgagaucgaccccaagcuggacaacuacuacaagaaggacaacagcuacuucaccgagcagccgaucgaccuggugcccaaccagcccuaccccaacgccuccuucgacaacuucaaguucgucugcgacaacaucaaguucgccgacgaccucaaccagcugacgggguacaagaagccggcgagccgcgagcugaaggugaccuucuuccccgaccucaacggcgacguggucgccaucgacuacaagcacuacacccccuccuucaagaagggcgccaagcugcugcacaagcccaucguguggcacgugaacaacgccaccaacaaggcgacguacaagccgaacaccuggugcauccggugccucuggagcaccaagcccgucgagaccuccaacagcuucgacgugcugaaguccgaggacgcccaggggauggacaaccuggccugcgaggaccucaagcccgugagcgaggaggucguggagaaccccacgauccagaaggacgugcuggagugcaacgucaagaccaccgagguggugggcgacaucauccugaagccggccaacaacucccucaagaucaccgaggaggucgggcacacggaccugauggccgcguacguggacaacagcucccugaccaucaagaagcccaacgagcucagccgcgugcugggccugaagauccucgccacccacgggcuggccgccgucaacuccgugcccugggacaccaucgccaacuacgcgaagccguuccugaacaagguggucagcacgaccaccaacaucgugacccgcugccucaaccgggugugcacgaacuacaugcccuacuucuucacccugcugcuccagcugugcaccuucacccgcuccaccaacagccggaucaaggccuccaugcccacgaccaucgccaagaacaccgucaagagcgugggcaaguucugccuggaggccagcuucaacuaccucaagucccccaacuucagcaagcugaucaacaucaucaucugguuccugcuccuguccgugugccugggcagccucaucuacuccaccgccgcgcuggggguccugaugagcaaccucggcaugccguccuacugcacgggguaccgcgagggcuaccugaacagcaccaacgugaccaucgccaccuacugcacgggcuccauccccugcagcgugugccuguccgggcucgacagccuggacaccuaccccucccuggagaccauccagaucaccaucagcuccuucaagugggaccucacggccuucggccuggucgccgagugguuccuggccuacauccucuucacccgguucuucuacgugcuggggcuggcggccaucaugcagcucuucuucagcuacuucgccgugcacuucaucuccaacagcuggcugauguggcugaucaucaaccugguccagauggcccccaucuccgcgauggugcgcauguacaucuucuucgccagcuucuacuacguguggaagagcuacguccacgugguggacggcugcaacuccagcaccugcaugaugugcuacaagcggaaccgcgccacccgggucgagugcacgaccaucgugaacgggguccgccgguccuucuacguguacgccaacggcggcaagggguucugcaagcuccacaacuggaacugcgugaacugcgacaccuucugcgccggcagcaccuucaucuccgacgaggucgcgcgcgaccugagccugcaguucaagcggccgaucaaccccacggaccaguccagcuacaucguggacuccgugaccgucaagaacgggagcauccaccucuacuucgacaaggccggccagaagaccuacgagcgccacucccugagccacuucgugaaccuggacaaccuccgggccaacaacaccaaggggucccugcccaucaacgugaucgucuucgacggcaagagcaagugcgaggaguccagcgccaaguccgccagcguguacuacucccagcugaugugccagcccauccuccugcuggaccaggcgcucgugagcgacgucggcgacagcgccgagguggccgugaagauguucgacgccuacgucaacacguucuccagcaccuucaacgugccgauggagaagcugaagacccugguggccaccgcggaggccgagcucgccaagaacgucucccuggacaacgugcugagcacguucaucuccgccgcgcgccagggguucguggacagcgacgucgagaccaaggacgugguggagugccucaagcugucccaccagagcgacaucgaggucaccggcgacuccugcaacaacuacaugcugaccuacaacaagguggagaacaugacgccccgggaccucggggccugcaucgacugcagcgcccgccacaucaacgcccagguggccaagucccacaacaucgcgcugaucuggaacgucaaggacuucaugagccuguccgagcagcuccggaagcagauccgcagcgccgccaagaagaacaaccugcccuucaagcugaccugcgccaccacccgccagguggugaacgucgugacgaccaagaucgcccucaagggcgggugaggacuaguuauaagacugacuagcccgaugggccucccaacgggcccuccuccccuccuugcaccgagauuaauaaaaaaaaaaaaaaaaaaaaaaaaaaaaaaaaaaaaaaaaaaaaaaaaaaaaaaaaaaaaaaaaugcaucccccccccccccccccccccccccccccccaaaggcucuuuucagagccaccagaauu

SEQ ID NO: 21655 - RNA, 6058 nt, Artificial Sequence
  SARS-CoV-2__MT806773.1__non-structural protein 3 (NSP3) mRNA gc
aggagaaagcuuaccauggcccccaccaaggugaccuucggcgacgacacggucaucgaggugcagggguacaagagcgugaacaucaccuucgagcuggacgagcgcaucgacaagguccucaacgagaagugcuccgccuacaccguggagcugggcaccgaggugaacgaguucgcgugcgucguggccgacgccgugaucaagacgcugcagccggucagcgagcuccugaccccccuggggaucgaccucgacgagugguccauggccaccuacuaccuguucgacgagagcggcgaguucaagcuggccucccacauguacugcagcuucuacccccccgacgaggacgaggaggagggggacugcgaggaggaggaguucgagccguccacccaguacgaguacggcacggaggacgacuaccagggcaagccccucgaguucggggcgaccagcgccgcccugcagcccgaggaggagcaggaggaggacuggcuggacgacgacucccagcagaccgugggccagcaggacgggagcgaggacaaccagaccacgaccauccagaccaucguggagguccagccccagcucgagauggagcugaccccgguggugcagacgaucgaggucaacuccuucagcggcuaccugaagcucaccgacaacguguacaucaagaacgccgacaucguggaggaggcgaagaaggucaagcccaccgugguggucaacgccgccaacguguaccugaagcacgggggcggcguggccggggcccugaacaaggcgaccaacaacgccaugcaggucgaguccgacgacuacaucgccacgaacggcccccucaagguggggggcagcugcguccuguccggccacaaccuggccaagcacugccuccacgugguggggcccaacgucaacaagggcgaggacauccagcugcugaagagcgccuacgagaacuucaaccagcacgaggugcuccuggcgccgcugcucuccgccgggaucuucggcgccgaccccauccacagccugcgggugugcgucgacaccgugcgcaccaacguguaccuggccgucuucgacaagaaccucuacgacaagcugguguccagcuuccuggagaugaagagcgagaagcagguggagcagaagaucgccgagauccccaaggaggaggucaagcccuucaucaccgaguccaagccgagcguggagcagcggaagcaggacgacaagaagaucaaggcgugcguggaggaggucacgaccacccucgaggagaccaaguuccugacggagaaccugcuccuguacaucgacaucaacgggaaccugcaccccgacuccgccacccucgugagcgacaucgacaucaccuuccugaagaaggacgcccccuacaucgugggcgacgucgugcaggagggcgugcugaccgccgucgugauccccacgaagaaggccgggggcaccaccgagaugcucgcgaaggcccugcgcaaggugccgaccgacaacuacaucacgaccuaccccgggcagggccugaacggguacaccgucgaggaggccaagaccgugcucaagaagugcaaguccgccuucuacauccugcccagcaucaucuccaacgagaagcaggagauccugggcaccgugagcuggaaccuccgggagaugcuggcgcacgccgaggagacgcgcaagcugaugcccgucugcguggagaccaaggccaucguguccaccauccagcggaaguacaagggcaucaagauccaggagggggucguggacuacggcgcccgcuucuacuucuacaccagcaagacgaccguggccucccugaucaacacccucaacgaccugaacgagacccuggucacgaugccgcucggguacgugacccacggccugaaccuggaggaggcggcccgguacaugcgcagccucaaggugcccgccaccgucuccgugagcucccccgacgccgugaccgccuacaacggguaccugacgagcuccagcaagacccccgaggagcacuucaucgagaccaucucccuggcgggcagcuacaaggacuggagcuacuccggccagagcacccagcucgggaucgaguuccugaagcggggcgacaaguccgucuacuacacgagcaacccgaccaccuuccaccuggacggggaggugaucaccuucgacaaccucaagacgcugcugucccuccgcgaggugcggaccaucaaggucuucaccaccguggacaacaucaaccugcacacgcagguggucgacaugagcaugaccuacggccagcaguucggccccaccuaccuggacggggccgacgugaccaagaucaagccccacaacucccacgagggcaagacguucuacgugcucccgaacgacgacacccugcgcgucgaggccuucgaguacuaccacaccaccgaccccagcuuccuggggcgguacauguccgcccucaaccacacgaagaaguggaaguacccccaggugaacggccugaccagcaucaagugggccgacaacaacugcuaccuggcgaccgcccuccugacccugcagcagaucgagcucaaguucaaccccccggcccugcaggacgccuacuaccgcgcgcgggccggggaggccgccaacuucugcgcccugauccucgcguacugcaacaagacggugggcgagcugggcgacguccgcgagaccauguccuaccuguuccagcacgccaaccucgacagcugcaagcgggugcugaacgucgugugcaagaccugcgggcagcagcagaccacccugaagggcguggaggccgucauguacauggggacgcucuccuacgagcaguucaagaagggcgugcagauccccugcaccugcgggaagcaggccaccaaguaccuggugcagcaggagagccccuucgucaugauguccgcccccccggcgcaguacgagcugaagcacggcaccuucacgugcgccagcgaguacaccggcaacuaccagugcgggcacuacaagcacaucaccuccaaggagacccucuacugcaucgacggcgcccugcugacgaagagcagcgaguacaaggggcccaucaccgacguguucuacaaggagaacuccuacaccaccacgaucaagcccgugaccuacaagcucgacggcgucgugugcaccgagaucgaccccaagcuggacaacuacuacaagaaggacaacagcuacuucaccgagcagccgaucgaccuggugcccaaccagcccuaccccaacgccuccuucgacaacuucaaguucgucugcgacaacaucaaguucgccgacgaccucaaccagcugacgggguacaagaagccggcgagccgcgagcugaaggugaccuucuuccccgaccucaacggcgacguggucgccaucgacuacaagcacuacacccccuccuucaagaagggcgccaagcugcugcacaagcccaucguguggcacgugaacaacgccaccaacaaggcgacguacaagccgaacaccuggugcauccggugccucuggagcaucaagcccgucgagaccuccaacagcuucgacgugcugaaguccgaggacgcccaggggauggacaaccuggccugcgaggaccucaagcccgugagcgaggaggucguggagaaccccaccauccagaaggacgugcuggagugcaacgucaagacgaccgagguggugggcgacaucauccugaagccggccaacaacucccucaagaucaccgaggaggucgggcacaccgaccugauggccgcguacguggacaacagcucccugacgaucaagaagcccaacgagcucagccgcgugcugggccugaagacccucgccacccacgggcuggccgccgucaacuccgugcccugggacaccaucgccaacuacgcgaagccguuccugaacaagguggucagcacgaccaccaacaucgugacccgcugccucaaccgggugugcacgaacuacaugcccuacuucuucacccugcugcuccagcugugcaccuucacccgcuccaccaacagccggaucaaggccuccaugcccacgaccaucgccaagaacaccgucaagagcgugggcaaguucugccuggaggccagcuucaacuaccucaagucccccaacuucagcaagcugaucaacaucaucaucugguuccugcuccuguccgugugccugggcagccucaucuacuccaccgccgcgcuggggguccugaugagcaaccucggcaugccguccuacugcacgggguaccgcgagggcuaccugaacagcaccaacgugaccaucgccaccuacugcacgggcuccauccccugcagcgugugccuguccgggcucgacagccuggacaccuaccccucccuggagaccauccagaucaccaucagcuccuucaagugggaccucacggccuucggccuggucgccgagugguuccuggccuacauccucuucacccgguucuucuacgugcuggggcuggcggccaucaugcagcucuucuucagcuacuucgccgugcacuucaucuccaacagcuggcugauguggcugaucaucaaccugguccagauggcccccaucuccgcgauggugcgcauguacaucuucuucgccagcuucuacuacguguggaagagcuacguccacgugguggacggcugcaacuccagcaccugcaugaugugcuacaagcggaaccgcgccacccgggucgagugcacgaccaucgugaacgggguccgccgguccuucuacguguacgccaacggcggcaagggguucugcaagcuccacaacuggaacugcgugaacugcgacaccuucugcgccggcagcaccuucaucuccgacgaggucgcgcgcgaccugagccugcaguucaagcggccgaucaaccccacggaccaguccagcuacaucguggacuccgugaccgucaagaacgggagcauccaccucuacuucgacaaggccggccagaagaccuacgagcgccacucccugagccacuucgugaaccuggacaaccuccgggccaacaacaccaaggggucccugcccaucaacgugaucgucuucgacggcaagagcaagugcgaggaguccagcgccaaguccgccagcguguacuacucccagcugaugugccagcccauccuccugcuggaccaggcgcucgugagcgacgucggcgacagcgccgagguggccgugaagauguucgacgccuacgucaacacguucuccagcaccuucaacgugccgauggagaagcugaagacccugguggccaccgcggaggccgagcucgccaagaacgucucccuggacaacgugcugagcacguucaucuccgccgcgcgccagggguucguggacagcgacgucgagaccaaggacgugguggagugccucaagcugucccaccagagcgacaucgaggucaccggcgacuccugcaacaacuacaugcugaccuacaacaagguggagaacaugacgccccgggaccucggggccugcaucgacugcagcgcccgccacaucaacgcccagguggccaagucccacaacaucgcgcugaucuggaacgucaaggacuucaugagccuguccgagcagcuccggaagcagauccgcagcgccgccaagaagaacaaccugcccuucaagcugaccugcgccaccacccgccagguggugaacgucgugacgaccaagaucgcccucaagggcgggugaggacuaguuauaagacugacuagcccgaugggccucccaacgggcccuccuccccuccuugcaccgagauuaauaaaaaaaaaaaaaaaaaaaaaaaaaaaaaaaaaaaaaaaaaaaaaaaaaaaaaaaaaaaaaaaaugcaucccccccccccccccccccccccccccccccaaaggcucuuuucagagccaccagaauu

SEQ ID NO: 21656 - RNA, 6058 nt, Artificial Sequence
  SARS-CoV-2__MT806774.1__non-structural protein 3 (NSP3) mRNA gc
aggagaaagcuuaccauggcccccaccaaggugaccuucggcgacgacacggucaucgaggugcagggguacaagagcgugaacaucaccuucgagcuggacgagcgcaucgacaagguccucaacgagaagugcuccgccuacaccguggagcugggcaccgaggugaacgaguucgcgugcgucguggccgacgccgugaucaagacgcugcagccggucagcgagcuccugaccccccuggggaucgaccucgacgagugguccauggccaccuacuaccuguucgacgagagcggcgaguucaagcuggccucccacauguacugcagcuucuacccccccgacgaggacgaggaggagggggacugcgaggaggaggaguucgagccguccacccaguacgaguacggcacggaggacgacuaccagggcaagccccucgaguucggggcgaccagcgccgcccugcagcccgaggaggagcaggaggaggacuggcuggacgacgacucccagcagaccgugggccagcaggacgggagcgaggacaaccagaccacgaccauccagaccaucguggagguccagccccagcucgagauggagcugaccccgguggugcagacgaucgaggucaacuccuucagcggcuaccugaagcucaccgacaacguguacaucaagaacgccgacaucguggaggaggcgaagaaggucaagcccaccgugguggucaacgccgccaacguguaccugaagcacgggggcggcguggccggggcccugaacaaggcgaccaacaacgccaugcaggucgaguccgacgacuacaucgccacgaacggcccccucaagguggggggcagcugcguccuguccggccacaaccuggccaagcacugcuuccacgugguggggcccaacgucaacaagggcgaggacauccagcuccugaagagcgccuacgagaacuucaaccagcacgaggugcugcucgcgccgcugcuguccgccgggaucuucggcgccgaccccauccacagccuccgggugugcgucgacaccgugcgcaccaacguguaccuggccgucuucgacaagaaccuguacgacaagcucguguccagcuuccuggagaugaagagcgagaagcagguggagcagaagaucgccgagauccccaaggaggaggucaagcccuucaucaccgaguccaagccgagcguggagcagcggaagcaggacgacaagaagaucaaggcgugcguggaggaggucacgaccacccuggaggagaccaaguuccucacggagaaccugcugcucuacaucgacaucaacgggaaccugcaccccgacuccgccacccuggugagcgacaucgacaucaccuuccucaagaaggacgcccccuacaucgugggcgacgucgugcaggagggcgugcugaccgccgucgugauccccacgaagaaggccgggggcaccaccgagaugcuggcgaaggcccuccgcaaggugccgaccgacaacuacaucacgaccuaccccgggcagggccugaacggguacaccgucgaggaggccaagaccgugcugaagaagugcaaguccgccuucuacauccuccccagcaucaucuccaacgagaagcaggagauccugggcaccgugagcuggaaccugcgggagaugcucgcgcacgccgaggagacgcgcaagcugaugcccgucugcguggagaccaaggccaucguguccaccauccagcggaaguacaagggcaucaagauccaggagggggucguggacuacggcgcccgcuucuacuucuacaccagcaagacgaccguggccucccugaucaacacccugaacgaccucaacgagacccuggucacgaugccgcugggguacgugacccacggccucaaccuggaggaggcggcccgguacaugcgcagccugaaggugcccgccaccgucuccgugagcucccccgacgccgugaccgccuacaacggguaccucacgagcuccagcaagacccccgaggagcacuucaucgagaccaucucccuggcgggcagcuacaaggacuggagcuacuccggccagagcacccagcuggggaucgaguuccucaagcggggcgacaaguccgucuacuacacgagcaacccgaccaccuuccaccuggacggggaggugaucaccuucgacaaccugaagacgcuccugucccugcgcgaggugcggaccaucaaggucuucaccaccguggacaacaucaaccuccacacgcagguggucgacaugagcaugaccuacggccagcaguucggccccaccuaccuggacggggccgacgugaccaagaucaagccccacaacucccacgagggcaagacguucuacgugcugccgaacgacgacacccuccgcgucgaggccuucgaguacuaccacaccaccgaccccagcuuccuggggcgguacauguccgcccugaaccacacgaagaaguggaaguacccccaggugaacggccucaccagcaucaagugggccgacaacaacugcuaccuggcgaccgcccugcucacccugcagcagaucgagcugaaguucaaccccccggcccuccaggacgccuacuaccgcgcgcgggccggggaggccgccaacuucugcgcccugauccuggcguacugcaacaagacggugggcgagcucggcgacguccgcgagaccauguccuaccuguuccagcacgccaaccuggacagcugcaagcgggugcucaacgucgugugcaagaccugcgggcagcagcagaccacccugaagggcguggaggccgucauguacauggggacgcuguccuacgagcaguucaagaagggcgugcagauccccugcaccugcgggaagcaggccaccaaguaccucgugcagcaggagagccccuucgucaugauguccgcccccccggcgcaguacgagcugaagcacggcaccuucacgugcgccagcgaguacaccggcaacuaccagugcgggcacuacaagcacaucaccuccaaggagacccuguacugcaucgacggcgcccuccugacgaagagcagcgaguacaaggggcccaucaccgacguguucuacaaggagaacuccuacaccaccacgaucaagcccgugaccuacaagcuggacggcgucgugugcaccgagaucgaccccaagcucgacaacuacuacaagaaggacaacagcuacuucaccgagcagccgaucgaccuggugcccaaccagcccuaccccaacgccuccuucgacaacuucaaguucgucugcgacaacaucaaguucgccgacgaccugaaccagcucacgggguacaagaagccggcgagccgcgagcugaaggugaccuucuuccccgaccugaacggcgacguggucgccaucgacuacaagcacuacacccccuccuucaagaagggcgccaagcuccugcacaagcccaucguguggcacgugaacaacgccaccaacaaggcgacguacaagccgaacaccuggugcauccggugccuguggagcaccaagcccgucgagaccuccaacagcuucgacgugcucaaguccgaggacgcccaggggauggacaaccuggccugcgaggaccugaagcccgugagcgaggaggucguggagaaccccacgauccagaaggacgugcucgagugcaacgucaagaccaccgagguggugggcgacaucauccugaagccggccaacaacucccugaagaucaccgaggaggucgggcacacggaccucauggccgcguacguggacaacagcucccugaccaucaagaagcccaacgagcugagccgcgugcucggccugaagacccuggccacccacgggcucgccgccgucaacuccgugcccugggacacgaucgccaacuacgcgaagccguuccugaacaagguggucagcaccaccaccaacaucgugacgcgcugccugaaccgggugugcaccaacuacaugcccuacuucuucacccuccugcugcagcucugcaccuucacccgcuccacgaacagccggaucaaggccuccaugcccaccaccaucgccaagaacaccgucaagagcgugggcaaguucugccuggaggccagcuucaacuaccugaagucccccaacuucagcaagcucaucaacaucaucaucugguuccugcugcucuccgugugccugggcagccugaucuacuccacggccgcgcucgggguccugaugagcaaccugggcaugccguccuacugcaccggguaccgcgagggcuaccucaacagcaccaacgugaccaucgccacguacugcaccggcuccauccccugcagcgugugccuguccgggcuggacagccucgacaccuaccccucccuggagaccauccagaucacgaucagcuccuucaagugggaccugaccgccuucggccucgucgccgagugguuccuggccuacauccuguucacccgguucuucuacgugcucgggcuggcggccaucaugcagcuguucuucagcuacuucgccgugcacuucaucuccaacagcuggcucauguggcugaucaucaaccugguccagauggcccccaucuccgcgauggugcgcauguacaucuucuucgccagcuucuacuacguguggaagagcuacguccacgugguggacggcugcaacuccagcaccugcaugaugugcuacaagcggaaccgcgccacgcgggucgagugcaccaccaucgugaacgggguccgccgguccuucuacguguacgccaacggcggcaagggguucugcaagcugcacaacuggaacugcgugaacugcgacaccuucugcgccggcagcacguucaucuccgacgaggucgcgcgcgaccucagccugcaguucaagcggccgaucaaccccaccgaccaguccagcuacaucguggacuccgugaccgucaagaacgggagcauccaccuguacuucgacaaggccggccagaagaccuacgagcgccacucccucagccacuucgugaaccuggacaaccugcgggccaacaacacgaaggggucccuccccaucaacgugaucgucuucgacggcaagagcaagugcgaggaguccagcgccaaguccgccagcguguacuacucccagcugaugugccagcccauccugcuccuggaccaggcgcuggugagcgacgucggcgacagcgccgagguggccgugaagauguucgacgccuacgucaacaccuucuccagcaccuucaacgugccgauggagaagcucaagacccugguggccacggcggaggccgagcuggccaagaacgucucccucgacaacgugcugagcaccuucaucuccgccgcgcgccagggguucguggacagcgacgucgagaccaaggacgugguggagugccugaagcucucccaccagagcgacaucgaggucaccggcgacuccugcaacaacuacaugcugacguacaacaagguggagaacaugaccccccgggaccugggggccugcaucgacugcagcgcccgccacaucaacgcccagguggccaagucccacaacaucgcgcucaucuggaacgucaaggacuucaugagccuguccgagcagcugcggaagcagauccgcagcgccgccaagaagaacaaccuccccuucaagcugaccugcgccaccacgcgccagguggugaacgucgugaccaccaagaucgcccugaagggcgggugaggacuaguuauaagacugacuagcccgaugggccucccaacgggcccuccuccccuccuugcaccgagauuaauaaaaaaaaaaaaaaaaaaaaaaaaaaaaaaaaaaaaaaaaaaaaaaaaaaaaaaaaaaaaaaaaugcaucccccccccccccccccccccccccccccccaaaggcucuuuucagagccaccagaauu

SEQ ID NO: 21657 - RNA, 6058 nt, Artificial Sequence
  SARS-CoV-2__MT806787.1__non-structural protein 3 (NSP3) mRNA gc
aggagaaagcuuaccauggcccccaccaaggugaccuucggcgacgacacggucaucgaggugcagggguacaagagcgugaacaucaccuucgagcuggacgagcgcaucgacaagguccucaacgagaagugcuccgccuacaccguggagcugggcaccgaggugaacgaguucgcgugcgucguggccgacgccgugaucaagacgcugcagccggucagcgagcuccugaccccccuggggaucgaccucgacgagugguccauggccaccuacuaccuguucgacgagagcggcgaguucaagcuggccucccacauguacugcagcuucuacccccccgacgaggacgaggaggagggggacugcgaggaggaggaguucgagccguccacccaguacgaguacggcacggaggacgacuaccagggcaagccccucgaguucggggcgaccagcgccgcccugcagcccgaggaggagcaggaggaggacuggcuggacgacgacucccagcagaccgugggccagcaggacgggagcgaggacaaccagaccacgaccauccagaccaucguggagguccagccccagcucgagauggagcugaccccgguggugcagacgaucgaggucaacuccuucagcggcuaccugaagcucaccgacaacguguacaucaagaacgccgacaucguggaggaggcgaagaaggucaagcccaccgugguggucaacgccgccaacguguaccugaagcacgggggcggcguggccggggcccugaacaaggcgaccaacaacgccaugcaggucgaguccgacgacuacaucgccacgaacggcccccucaagguggggggcagcugcguccuguccggccacaaccuggccaagcacugccuccacgugguggggcccaacgucaacaagggcgaggacauccagcugcugaagagcgccuacgagaacuucaaccagcacgaggugcuccuggcgccgcugcucuccgccgggaucuucggcgccgaccccauccacagccugcgggugugcgucgacaccgugcgcaccaacguguaccuggccgucuucgacaagaaccucuacgacaagcugguguccagcuuccuggagaugaagagcgagaagcagguggagcagaagaucgccgagauccccaaggaggaggucaagcccuucaucaccgaguccaagccgagcguggagcagcggaagcaggacgacaagaagaucaaggcgugcguggaggaggucacgaccacccucgaggagaccaaguuccugacggagaaccugcuccuguacaucgacaucaacgggaaccugcaccccgacuccgccacccucgugagcgacaucgacaucaccuuccugaagaaggacgcccccuacaucgugggcgacgucgugcaggagggcgugcugaccgccgucgugauccccacgaagaaggccgggggcaccaccgagaugcucgcgaaggcccugcgcaaggugccgaccgacaacuacaucacgaccuaccccgggcagggccugaacggguacaccgucgaggaggccaagaccgugcucaagaagugcaaguccgccuucuacauccugcccagcaucaucuccaacgagaagcaggagauccugggcaccgugagcuggaaccuccgggagaugcuggcgcacgccgaggagacgcgcaagcugaugcccgucugcguggagaccaaggccaucguguccaccauccagcggaaguacaagggcaucaagauccaggagggggucguggacuacggcgcccgcuucuacuucuacaccagcaagacgaccguggccucccugaucaacacccucaacgaccugaacgagacccuggucacgaugccgcucggguacgugacccacggccugaaccuggaggaggcggcccgguacaugcgcagccucaaggugcccgccaccgucuccgugagcucccccgacgccgugaccgccuacaacggguaccugacgagcuccagcaagacccccgaggagcacuucaucgagaccaucucccuggcgggcagcuacaaggacuggagcuacuccggccagagcacccagcucgggaucgaguuccugaagcggggcgacaaguccgucuacuacacgagcaacccgaccaccuuccaccuggacggggaggugaucaccuucgacaaccucaagacgcugcugucccuccgcgaggugcggaccaucaaggucuucaccaccguggacaacaucaaccugcacacgcagguggucgacaugagcaugaccuacggccagcaguucggccccaccuaccuggacggggccgacgugaccaagaucaagccccacaacucccacgagggcaagacguucuacgugcucccgaacgacgacacccugcgcgucgaggccuucgaguacuaccacaccaccgaccccagcuuccuggggcgguacauguccgcccucaaccacacgaagaaguggaaguacccccaggugaacggccugaccagcaucaagugggccgacaacaacugcuaccuggcgaccgcccuccugacccugcagcagaucgagcucaaguucaaccccccggcccugcaggacgccuacuaccgcgcgcgggccggggaggccgccaacuucugcgcccugauccucgcguacugcaacaagacggugggcgagcugggcgacguccgcgagaccauguccuaccuguuccagcacgccaaccucgacagcugcaagcgggugcugaacgucgugugcaagaccugcgggcagcagcagaccacccugaagggcguggaggccgucauguacauggggacgcucuccuacgagcaguucaagaagggcgugcagauccccugcaccugcgggaagcaggccaccaaguaccuggugcagcaggagagccccuucgucaugauguccgcccccccggcgcaguacgagcugaagcacggcaccuucacgugcgccagcgaguacaccggcaacuaccagugcgggcacuacaagcacaucaccuccaaggagacccucuacugcaucgacggcgcccugcugacgaagagcagcgaguacaaggggcccaucaccgacguguucuacaaggagaacuccuacaccaccacgaucaagcccgugaccuacaagcucgacggcgucgugugcaccgagaucgaccccaagcuggacaacuacuacaagaaggacaacagcuacuucaccgagcagccgaucgaccuggugcccaaccagcccuaccccaacgccuccuucgacaacuucaaguucgucugcgacaacaucaaguucgccgacgaccucaaccagcugacgggguacaagaagccggcgagccgcgagcugaaggugaccuucuuccccgaccucaacggcgacguggucgccaucgacuacaagcacuacacccccuccuucaagaagggcgccaagcugcugcacaagcccaucguguggcacgugaacaacgccaccaacaaggcgacguacaagccgaacaccuggugcauccggugccucuggagcaccaagcccgucgagaccuccaacagcuucgacgugcugaaguccgaggacgcccaggggauggacaaccuggccugcgaggaccucaagcccgugagcgaggaggucguggagaaccccacgauccagaaggacgugcuggagugcaacgucaagaccaccgagguggugggcgacaucauccugaagccggccaacaacucccucaagaucaccgaggaggucgggcacacggaccugauggccgcguacguggacaacagcucccugaccaucaagaagcccaacgagcucagccgcgugcugggccugaagacccucgccacccacgggcuggccgccgucaacuccgugcccugggacacgaucgccaacuacgcgaagccguuccugaacaagguggucagcaccaccaccaacaucgugacgcgcugccucaaccgggugugcaccaacuacaugcccuacuucuucacccugcugcuccagcugugcaccuucacccgcuccacgaacagccggaucaaggccuccaugcccaccaccaucgccaagaacaccgucaagagcgugggcaaguucugccuggaggccagcuucaacuaccucaagucccccaacuucagcaagcugaucaacaucaucaucugguuccugcuccuguccgugugccugggcagccucaucuacuccacggccgcgcuggggguccugaugagcaaccucggcaugccguccuacugcaccggguaccgcgagggcuaccugaacagcaccaacgugaccaucgccacguacugcaccggcuccauccccugcagcgugugccuguccgggcucgacagccuggacaccuaccccucccuggagaccauccagaucacgaucagcuccuucaagugggaccucaccgccuucggccuggucgccgagugguuccuggccuacauccucuucacccgguucuucuacgugcuggggcuggcggccaucaugcagcucuucuucagcuacuucgccgugcacuucaucuccaacagcuggcugauguggcugaucaucaaccugguccagauggcccccaucuccgcgauggugcgcauguacaucuucuucgccagcuucuacuacguguggaagagcuacguccacgugguggacggcugcaacuccagcaccugcaugaugugcuacaagcggaaccgcgccacgcgggucgagugcaccaccaucgugaacgggguccgccgguccuucuacguguacgccaacggcggcaagggguucugcaagcuccacaacuggaacugcgugaacugcgacaccuucugcgccggcagcacguucaucuccgacgaggucgcgcgcgaccugagccugcaguucaagcggccgaucaaccccaccgaccaguccagcuacaucguggacuccgugaccgucaagaacgggagcauccaccucuacuucgacaaggccggccagaagaccuacgagcgccacucccugagccacuucgugaaccuggacaaccuccgggccaacaacacgaaggggucccugcccaucaacgugaucguccuggacggcaagagcaagugcgaggaguccagcgccaaguccgccagcguguacuacucccagcucaugugccagcccauccugcugcucgaccaggcgcuggugagcgacgucggcgacagcgccgagguggccgugaagauguucgacgccuacgucaacaccuucuccagcaccuucaacgugccgauggagaagcugaagacccucguggccacggcggaggccgagcuggccaagaacgucucccuggacaacgugcucagcaccuucaucuccgccgcgcgccagggguucguggacagcgacgucgagaccaaggacgugguggagugccugaagcugucccaccagagcgacaucgaggucaccggcgacuccugcaacaacuacaugcucacguacaacaagguggagaacaugaccccccgggaccugggggccugcaucgacugcagcgcccgccacaucaacgcccagguggccaagucccacaacaucgcgcugaucuggaacgucaaggacuucaugagccucuccgagcagcugcggaagcagauccgcagcgccgccaagaagaacaaccugcccuucaagcucaccugcgccaccacgcgccagguggugaacgucgugaccaccaagaucgcccugaagggcgggugaggacuaguuauaagacugacuagcccgaugggccucccaacgggcccuccuccccuccuugcaccgagauuaauaaaaaaaaaaaaaaaaaaaaaaaaaaaaaaaaaaaaaaaaaaaaaaaaaaaaaaaaaaaaaaaaugcaucccccccccccccccccccccccccccccccaaaggcucuuuucagagccaccagaauu

SEQ ID NO: 21658 - RNA, 6058 nt, Artificial Sequence
  SARS-CoV-2__MT806789.1__non-structural protein 3 (NSP3) mRNA gc
aggagaaagcuuaccauggcccccaccaaggugaccuucggcgacgacacggucaucgaggugcagggguacaagagcgugaacaucaccuucgagcuggacgagcgcaucgacaagguccucaacgagaagugcuccgccuacaccguggagcugggcaccgaggugaacgaguucgcgugcgucguggccgacgccgugaucaagacgcugcagccggucagcgagcuccugaccccccuggggaucgaccucgacgagugguccauggccaccuacuaccuguucgacgagagcggcgaguucaagcuggccucccacauguacugcagcuucuacccccccgacgaggacgaggaggagggggacugcgaggaggaggaguucgagccguccacccaguacgaguacggcacggaggacgacuaccagggcaagccccucgaguucggggcgaccagcgccgcccugcagcccgaggaggagcaggaggaggacuggcuggacgacgacucccagcagaccgugggccagcaggacgggagcgaggacaaccagaccacgaccauccagaccaucguggagguccagccccagcucgagauggagcugaccccgguggugcagacgaucgaggucaacuccuucagcggcuaccugaagcucaccgacaacguguacaucaagaacgccgacaucguggaggaggcgaagaaggucaagcccaccgugguggucaacgccgccaacguguaccugaagcacgggggcggcguggccggggcccugaacaaggcgaccaacaacgccaugcaggucgaguccgacgacuacaucgccacgaacggcccccucaagguggggggcagcugcguccuguccggccacaaccuggccaagcacugccuccacgugguggggcccaacgucaacaagggcgaggacauccagcugcugaagagcgccuacgagaacuucaaccagcacgaggugcuccuggcgccgcugcucuccgccgggaucuucggcgccgaccccauccacagccugcgggugugcgucgacaccgugcgcaccaacguguaccuggccgucuucgacaagaaccucuacgacaagcugguguccagcuuccuggagaugaagagcgagaagcagguggagcagaagaucgccgagauccccaaggaggaggucaagcccuucaucaccgaguccaagccgagcguggagcagcggaagcaggacgacaagaagaucaaggcgugcguggaggaggucacgaccacccucgaggagaccaaguuccugacggagaaccugcuccuguacaucgacaucaacgggaaccugcaccccgacuccgccacccucgugagcgacaucgacaucaccuuccugaagaaggacgcccccuacaucgugggcgacgucgugcaggagggcgugcugaccgccgucgugauccccacgaagaaggccgggggcaccaccgagaugcucgcgaaggcccugcgcaaggugccgaccgacaacuacaucacgaccuaccccgggcagggccugaacggguacaccgucgaggaggccaagaccgugcucaagaagugcaaguccgccuucuacauccugcccagcaucaucuccaacgagaagcaggagauccugggcaccgugagcuggaaccuccgggagaugcuggcgcacgccgaggagacgcgcaagcugaugcccgucugcguggagaccaaggccaucguguccaccauccagcggaaguacaagggcaucaagauccaggagggggucguggacuacggcgcccgcuucuacuucuacaccagcaagacgaccguggccucccugaucaacacccucaacgaccugaacgagacccuggucacgaugccgcucggguacgugacccacggccugaaccuggaggaggcggcccgguacaugcgcagccucaaggugcccgccaccgucuccgugagcucccccgacgccgugaccgccuacaacggguaccugacgagcuccagcaagacccccgaggagcacuucaucgagaccaucucccuggcgggcagcuacaaggacuggagcuacuccggccagagcacccagcucgggaucgaguuccugaagcggggcgacaaguccgucuacuacacgagcaacccgaccaccuuccaccuggacggggaggugaucaccuucgacaaccucaagacgcugcugucccuccgcgaggugcggaccaucaaggucuucaccaccguggacaacaucaaccugcacacgcacguggucgacaugagcaugaccuacggccagcaguucggccccaccuaccuggacggggccgacgugaccaagaucaagccccacaacucccacgagggcaagacguucuacgugcucccgaacgacgacacccugcgcgucgaggccuucgaguacuaccacaccaccgaccccagcuuccuggggcgguacauguccgcccucaaccacacgaagaaguggaaguacccccaggugaacggccugaccagcaucaagugggccgacaacaacugcuaccuggcgaccgcccuccugacccugcagcagaucgagcucaaguucaaccccccggcccugcaggacgccuacuaccgcgcgcgggccggggaggccgccaacuucugcgcccugauccucgcguacugcaacaagacggugggcgagcugggcgacguccgcgagaccauguccuaccuguuccagcacgccaaccucgacagcugcaagcgggugcugaacgucgugugcaagaccugcgggcagcagcagaccacccugaagggcguggaggccgucauguacauggggacgcucuccuacgagcaguucaagaagggcgugcagauccccugcaccugcgggaagcaggccaccaaguaccuggugcagcaggagagccccuucgucaugauguccgcccccccggcgcaguacgagcugaagcacggcaccuucacgugcgccagcgaguacaccggcaacuaccagugcgggcacuacaagcacaucaccuccaaggagacccucuacugcaucgacggcgcccugcugacgaagagcagcgaguacaaggggcccaucaccgacguguucuacaaggagaacuccuacaccaccacgaucaagcccgugaccuacaagcucgacggcgucgugugcaccgagaucgaccccaagcuggacaacuacuacaagaaggacaacagcuacuucaccgagcagccgaucgaccuggugcccaaccagcccuaccccaacgccuccuucgacaacuucaaguucgucugcgacaacaucaaguucgccgacgaccucaaccagcugacgggguacaagaagccggcgagccgcgagcugaaggugaccuucuuccccgaccucaacggcgacguggucgccaucgacuacaagcacuacacccccuccuucaagaagggcgccaagcugcugcacaagcccaucguguggcacgugaacaacgccaccaacaaggcgacguacaagccgaacaccuggugcauccggugccucuggagcaccaagcccgucgagaccuccaacagcuucgacgugcugaaguccgaggacgcccaggggauggacaaccuggccugcgaggaccucaagcccgugagcgaggaggucguggagaaccccacgauccagaaggacgugcuggagugcaacgucaagaccaccgagguggugggcgacaucauccugaagccggccaacaacucccucaagaucaccgaggaggucgggcacacggaccugauggccgcguacguggacaacagcucccugaccaucaagaagcccaacgagcucagccgcgugcugggccugaagacccucgccacccacgggcuggccgccgucaacuccgugcccugggacacgaucgccaacuacgcgaagccguuccugaacaagguggucagcaccaccaccaacaucgugacgcgcugccucaaccgggugugcaccaacuacaugcccuacuucuucacccugcugcuccagcugugcaccuucacccgcuccacgaacagccggaucaaggccuccaugcccaccaccaucgccaagaacaccgucaagagcgugggcaaguucugccuggaggccagcuucaacuaccucaagucccccaacuucagcaagcugaucaacaucaucaucugguuccugcuccuguccgugugccugggcagccucaucuacuccacggccgcgcuggggguccugaugagcaaccucggcaugccguccuacugcaccggguaccgcgagggcuaccugaacagcaccaacgugaccaucgccacguacugcaccggcuccauccccugcagcgugugccuguccgggcucgacagccuggacaccuaccccucccuggagaccauccagaucacgaucagcuccuucaagugggaccucaccgccuucggccuggucgccgagugguuccuggccuacauccucuucacccgguucuucuacgugcuggggcuggcggccaucaugcagcucuucuucagcuacuucgccgugcacuucaucuccaacagcuggcugauguggcugaucaucaaccugguccagauggcccccaucuccgcgauggugcgcauguacaucuucuucgccagcuucuacuacguguggaagagcuacguccacgugguggacggcugcaacuccagcaccugcaugaugugcuacaagcggaaccgcgccacgcgggucgagugcaccaccaucgugaacgggguccgccgguccuucuacguguacgccaacggcggcaagggguucugcaagcuccacaacuggaacugcgugaacugcgacaccuucugcgccggcagcacguucaucuccgacgaggucgcgcgcgaccugagccugcaguucaagcggccgaucaaccccaccgaccaguccagcuacaucguggacuccgugaccgucaagaacgggagcauccaccucuacuucgacaaggccggccagaagaccuacgagcgccacucccugagccacuucgugaaccuggacaaccuccgggccaacaacacgaaggggucccugcccaucaacgugaucgucuucgacggcaagagcaagugcgaggaguccagcgccaaguccgccagcguguacuacucccagcugaugugccagcccauccuccugcuggaccaggcgcucgugagcgacgucggcgacagcgccgagguggccgugaagauguucgacgccuacgucaacaccuucuccagcaccuucaacgugccgauggagaagcugaagacccugguggccacggcggaggccgagcucgccaagaacgucucccuggacaacgugcugagcaccuucaucuccgccgcgcgccagggguucguggacagcgacgucgagaccaaggacgugguggagugccucaagcugucccaccagagcgacaucgaggucaccggcgacuccugcaacaacuacaugcugacguacaacaagguggagaacaugaccccccgggaccucggggccugcaucgacugcagcgcccgccacaucaacgcccagguggccaagucccacaacaucgcgcugaucuggaacgucaaggacuucaugagccuguccgagcagcuccggaagcagauccgcagcgccgccaagaagaacaaccugcccuucaagcugaccugcgccaccacgcgccagguggugaacgucgugaccaccaagaucgcccucaagggcgggugaggacuaguuauaagacugacuagcccgaugggccucccaacgggcccuccuccccuccuugcaccgagauuaauaaaaaaaaaaaaaaaaaaaaaaaaaaaaaaaaaaaaaaaaaaaaaaaaaaaaaaaaaaaaaaaaugcaucccccccccccccccccccccccccccccccaaaggcucuuuucagagccaccagaauu

SEQ ID NO: 21659 - RNA, 6058 nt, Artificial Sequence
  SARS-CoV-2__MT806792.1__non-structural protein 3 (NSP3) mRNA gc
aggagaaagcuuaccauggcccccaccaaggugaccuucggcgacgacacggucaucgaggugcagggguacaagagcgugaacaucaccuucgagcuggacgagcgcaucgacaagguccucaacgagaagugcuccgccuacaccguggagcugggcaccgaggugaacgaguucgcgugcgucguggccgacgccgugaucaagacgcugcagccggucagcgagcuccugaccccccuggggaucgaccucgacgagugguccauggccaccuacuaccuguucgacgagagcggcgaguucaagcuggccucccacauguacugcagcuucuacccccccgacgaggacgaggaggagggggacugcgaggaggaggaguucgagccguccacccaguacgaguacggcacggaggacgacuaccagggcaagccccucgaguucggggcgaccagcgccgcccugcagcccgaggaggagcaggaggaggacuggcuggacgacgacucccagcagaccgugggccagcaggacgggagcgaggacaaccagaccacgaccauccagaccaucguggagguccagccccagcucgagauggagcugaccccgguggugcagacgaucgaggucaacuccuucagcggcuaccugaagcucaccgacaacguguacaucaagaacgccgacaucguggaggaggcgaagaaggucaagcccaccgugguggucaacgccgccaacguguaccugaagcacgggggcggcguggccggggcccugaacaaggcgaccaacaacgccaugcaggucgaguccgacgacuacaucgccacgaacggcccccucaagguggggggcagcugcguccuguccggccacaaccuggccaagcacugccuccacgugguggggcccaacgucaacaagggcgaggacauccagcugcugaagagcgccuacgagaacuucaaccagcacgaggugcuccuggcgccgcugcucuccgccgggaucuucggcgccgaccccauccacagccugcgggugugcgucgacaccgugcgcaccaacguguaccuggccgucuucgacaagaaccucuacgacaagcugguguccagcuuccuggagaugaagagcgagaagcagguggagcagaagaucgccgagauccccaaggaggaggucaagcccuucaucaccgaguccaagccgagcguggagcagcggaagcaggacgacaagaagaucaaggcgugcguggaggaggucacgaccacccucgaggagaccaaguuccugacggagaaccugcuccuguacaucgacaucaacgggaaccugcaccccgacuccgccacccucgugagcgacaucgacaucaccuuccugaagaaggacgcccccuacaucgugggcgacgucgugcaggagggcgugcugaccgccgucgugauccccacgaagaaggccgggggcaccaccgagaugcucgcgaaggcccugcgcaaggugccgaccgacaacuacaucacgaccuaccccgggcagggccugaacggguacaccgucgaggaggccaagaccgugcucaagaagugcaaguccgccuucuacauccugcccagcaucaucuccaacgagaagcaggagauccugggcaccgugagcuggaaccuccgggagaugcuggcgcacgccgaggagacgcgcaagcugaugcccgucugcguggagaccaaggccaucguguccaccauccagcggaaguacaagggcaucaagauccaggagggggucguggacuacggcgcccgcuucuacuucuacaccagcaagacgaccguggccucccugaucaacacccucaacgaccugaacgagacccuggucacgaugccgcucggguacgugacccacggccugaaccuggaggaggcggcccgguacaugcgcagccucaaggugcccgccaccgucuccgugagcucccccgacgccgugaccgccuacaacggguaccugacgagcuccagcaagacccccgaggagcacuucaucgagaccaucucccuggcgggcagcuacaaggacuggagcuacuccggccagagcacccagcucgggaucgaguuccugaagcggggcgacaaguccgucuacuacacgagcaacccgaccaccuuccaccuggacggggaggugaucaccuucgacaaccucaagacgcugcugucccuccgcgaggugcggaccaucaaggucuucaccaccguggacaacaucaaccugcacacgcagguggucgacaugagcaugaccuacggccagcaguucggccccaccuaccuggacggggccgacgugaccaagaucaagccccacaacucccacgagggcaagacguucuacgugcucccgaacgacgacacccugcgcgucgaggccuucgaguacuaccacaccaccgaccccagcuuccuggggcgguacauguccgcccucaaccacacgaagaaguggaaguacccccaggugaacggccugaccagcaucaagugggccgacaacaacugcuaccuggcgaccgcccuccugacccugcagcagaucgagcucaaguucaaccccccggcccugcaggacgccuacuaccgcgcgcgggccggggaggccgccaacuucugcgcccugauccucgcguacugcaacaagacggugggcgagcugggcgacguccgcgagaccauguccuaccuguuccagcacgccaaccucgacagcugcaagcgggugcugaacgucgugugcaagaccugcgggcagcagcagaccacccugaagggcguggaggccgucauguacauggggacgcucuccuacgagcaguucaagaagggcgugcagauccccugcaccugcgggaagcaggccaccaaguaccuggugcagcaggagagccccuucgucaugauguccgcccccccggcgcaguacgagcugaagcacggcaccuucacgugcgccagcgaguacaccggcaacuaccagugcgggcacuacaagcacaucaccuccaaggagacccucuacugcaucgacggcgcccugcugacgaagagcagcgaguacaaggggcccaucaccgacguguucuacaaggagaacuccuacaccaccacgaucaagcccgugaccuacaagcucgacggcgucgugugcaccgagaucgaccccaagcuggacaacuacuacaagaaggacaacagcuacuucaccgagcagccgaucgaccuggugcccaaccagcccuaccccaacgccuccuucgacaacuucaaguucgucugcgacaacaucaaguucgccgacgaccucaaccagcugacgggguacaagaagccggcgagccgcgagcugaaggugaccuucuuccccgaccucaacggcgacguggucgccaucgacuacaagcacuacacccccuccuucaagaagggcgccaagcugcugcacaagcccaucguguggcacgugaacaacgccaucaacaaggcgaccuacaagccgaacacguggugcauccggugccucuggagcaccaagcccgucgagaccuccaacagcuucgacgugcugaaguccgaggacgcccaggggauggacaaccuggccugcgaggaccucaagcccgugagcgaggaggucguggagaaccccaccauccagaaggacgugcuggagugcaacgucaagacgaccgagguggugggcgacaucauccugaagccggccaacaacucccucaagaucaccgaggaggucgggcacaccgaccugauggccgcguacguggacaacagcucccugacgaucaagaagcccaacgagcucagccgcgugcugggccugaagacccucgccacccacgggcuggccgccgucaacuccgugcccugggacaccaucgccaacuacgcgaagccguuccugaacaagguggucagcacgaccaccaacaucgugacccgcugccucaaccgggugugcacgaacuacaugcccuacuucuucacccugcugcuccagcugugcaccuucacccgcuccaccaacagccggaucaaggccuccaugcccacgaccaucgccaagaacaccgucaagagcgugggcaaguucugccuggaggccagcuucaacuaccucaagucccccaacuucagcaagcugaucaacaucaucaucugguuccugcuccuguccgugugccugggcagccucaucuacuccaccgccgcgcuggggguccugaugagcaaccucggcaugccguccuacugcacgggguaccgcgagggcuaccugaacagcaccaacgugaccaucgccaccuacugcacgggcuccauccccugcagcgugugccuguccgggcucgacagccuggacaccuaccccucccuggagaccauccagaucaccaucagcuccuucaagugggaccucacggccuucggccuggucgccgagugguuccuggccuacauccucuucacccgguucuucuacgugcuggggcuggcggccaucaugcagcucuucuucagcuacuucgccgugcacuucaucuccaacagcuggcugauguggcugaucaucaaccugguccagauggcccccaucuccgcgauggugcgcauguacaucuucuucgccagcuucuacuacguguggaagagcuacguccacgugguggacggcugcaacuccagcaccugcaugaugugcuacaagcggaaccgcgccacccgggucgagugcacgaccaucgugaacgggguccgccgguccuucuacguguacgccaacggcggcaagggguucugcaagcuccacaacuggaacugcgugaacugcgacaccuucugcgccggcagcaccuucaucuccgacgaggucgcgcgcgaccugagccugcaguucaagcggccgaucaaccccacggaccaguccagcuacaucguggacuccgugaccgucaagaacgggagcauccaccucuacuucgacaaggccggccagaagaccuacgagcgccacucccugagccacuucgugaaccuggacaaccuccgggccaacaacaccaaggggucccugcccaucaacgugaucgucuucgacggcaagagcaagugcgaggaguccagcgccaaguccgccagcguguacuacucccagcugaugugccagcccauccuccugcuggaccaggcgcucgugagcgacgucggcgacagcgccgagguggccgugaagauguucgacgccuacgucaacacguucuccagcaccuucaacgugccgauggagaagcugaagacccugguggccaccgcggaggccgagcucgccaagaacgucucccuggacaacgugcugagcacguucaucuccgccgcgcgccagggguucguggacagcgacgucgagaccaaggacgugguggagugccucaagcugucccaccagagcgacaucgaggucaccggcgacuccugcaacaacuacaugcugaccuacaacaagguggagaacaugacgccccgggaccucggggccugcaucgacugcagcgcccgccacaucaacgcccagguggccaagucccacaacaucgcgcugaucuggaacgucaaggacuucaugagccuguccgagcagcuccggaagcagauccgcagcgccgccaagaagaacaaccugcccuucaagcugaccugcgccaccacccgccagguggugaacgucgugacgaccaagaucgcccucaagggcgggugaggacuaguuauaagacugacuagcccgaugggccucccaacgggcccuccuccccuccuugcaccgagauuaauaaaaaaaaaaaaaaaaaaaaaaaaaaaaaaaaaaaaaaaaaaaaaaaaaaaaaaaaaaaaaaaaugcaucccccccccccccccccccccccccccccccaaaggcucuuuucagagccaccagaauu

SEQ ID NO: 21660 - RNA, 6058 nt, Artificial Sequence
  SARS-CoV-2__MT806798.1__non-structural protein 3 (NSP3) mRNA gc
aggagaaagcuuaccauggcccccaccaaggugaccuucggcgacgacacggucaucgaggugcagggguacaagagcgugaacaucaccuucgagcuggacgagcgcaucgacaagguccucaacgagaagugcuccgccuacaccguggagcugggcaccgaggugaacgaguucgcgugcgucguggccgacgccgugaucaagacgcugcagccggucagcgagcuccugaccccccuggggaucgaccucgacgagugguccauggccaccuacuaccuguucgacgagagcggcgaguucaagcuggccucccacauguacugcagcuucuacccccccgacgaggacgaggaggagggggacugcgaggaggaggaguucgagccguccacccaguacgaguacggcacggaggacgacuaccagggcaagccccucgaguucggggcgaccagcgccgcccugcagcccgaggaggagcaggaggaggacuggcuggacgacgacucccagcagaccgugggccagcaggacgggagcgaggacaaccagaccacgaccauccagaccaucguggagguccagccccagcucgagauggagcugaccccgguggugcagacgaucgaggucaacuccuucagcggcuaccugaagcucaccgacaacguguacaucaagaacgccgacaucguggaggaggcgaagaaggucaagcccaccgugguggucaacgccgccaacguguaccugaagcacgggggcggcguggccggggcccugaacaaggcgaccaacaacgccaugcaggucgaguccgacgacuacaucgccacgaacggcccccucaagguggggggcagcugcguccuguccggccacaaccuggccaagcacugccuccacgugguggggcccaacgucaacaagggcgaggacauccagcugcugaagagcgccuacgagaacuucaaccagcacgaggugcuccuggcgccgcugcucuccgccgggaucuucggcgccgaccccauccacagccugcgggugugcgucgacaccgugcgcaccaacguguaccuggccgucuucgacaagaaccucuacgacaagcugguguccagcuuccuggagaugaagagcgagaagcagguggagcagaagaucgccgagauccccaaggaggaggucaagcccuucaucaccgaguccaagccgagcguggagcagcggaagcaggacgacaagaagaucaaggcgugcguggaggaggucacgaccacccucgaggagaccaaguuccugacggagaaccugcuccuguacaucgacaucaacgggaaccugcaccccgacuccgccacccucgugagcgacaucgacaucaccuuccugaagaaggacgcccccuacaucgagggcgacgugguccaggagggcgugcugaccgccguggucauccccacgaagaaggccgggggcaccaccgagaugcucgcgaaggcccugcgcaaggugccgaccgacaacuacaucacgaccuaccccgggcagggccugaacggguacaccguggaggaggccaagaccguccucaagaagugcaaguccgccuucuacauccugcccagcaucaucuccaacgagaagcaggagauccugggcaccgugagcuggaaccuccgggagaugcuggcgcacgccgaggagacgcgcaagcugaugcccgugugcgucgagaccaaggccaucguguccaccauccagcggaaguacaagggcaucaagauccaggaggggguggucgacuacggcgcccgcuucuacuucuacaccagcaagacgaccguggccucccugaucaacacccucaacgaccugaacgagacccuggugacgaugccgcucggguacgucacccacggccugaaccuggaggaggcggcccgguacaugcgcagccucaaggugcccgccaccguguccgucagcucccccgacgccgugaccgccuacaacggguaccugacgagcuccagcaagacccccgaggagcacuucaucgagaccaucucccuggcgggcagcuacaaggacuggagcuacuccggccagagcacccagcucgggaucgaguuccugaagcggggcgacaaguccguguacuacacgagcaacccgaccaccuuccaccuggacggggaggucaucaccuucgacaaccucaagacgcugcugucccuccgcgaggugcggaccaucaagguguucaccaccgucgacaacaucaaccugcacacgcaggugguggacaugagcaugaccuacggccagcaguucggccccaccuaccuggacggggccgacgucaccaagaucaagccccacaacucccacgagggcaagacguucuacgugcucccgaacgacgacacccugcgcguggaggccuucgaguacuaccacaccaccgaccccagcuuccuggggcgguacauguccgcccucaaccacacgaagaaguggaaguacccccaggucaacggccugaccagcaucaagugggccgacaacaacugcuaccuggcgaccgcccuccugacccugcagcagaucgagcucaaguucaaccccccggcccugcaggacgccuacuaccgcgcgcgggccggggaggccgccaacuucugcgcccugauccucgcguacugcaacaagacggugggcgagcugggcgacgugcgcgagaccauguccuaccuguuccagcacgccaaccucgacagcugcaagcggguccugaacguggucugcaagaccugcgggcagcagcagaccacccugaagggcguggaggccgugauguacauggggacgcucuccuacgagcaguucaagaagggcguccagauccccugcaccugcgggaagcaggccaccaaguaccuggugcagcaggagagccccuucgugaugauguccgcccccccggcgcaguacgagcugaagcacggcaccuucacgugcgccagcgaguacaccggcaacuaccagugcgggcacuacaagcacaucaccuccaaggagacccucuacugcaucgacggcgcccugcugacgaagagcagcgaguacaaggggcccaucaccgacgucuucuacaaggagaacuccuacaccaccacgaucaagcccgugaccuacaagcucgacggcguggucugcaccgagaucgaccccaagcuggacaacuacuacaagaaggacaacagcuacuucaccgagcagccgaucgaccuggugcccaaccagcccuaccccaacgccuccuucgacaacuucaaguucgugugcgacaacaucaaguucgccgacgaccucaaccagcugacgggguacaagaagccggcgagccgcgagcugaaggucaccuucuuccccgaccucaacggcgacgugguggccaucgacuacaagcacuacacccccuccuucaagaagggcgccaagcugcugcacaagcccaucgucuggcacgugaacaacgccaccaacaaggcgacguacaagccgaacaccuggugcauccggugccucuggagcaccaagcccguggagaccuccaacagcuucgacguccugaaguccgaggacgcccaggggauggacaaccuggccugcgaggaccucaagcccgugagcgaggagguggucgagaaccccacgauccagaaggacgugcuggagugcaacgugaagaccaccgaggucgugggcgacaucauccugaagccggccaacaacucccucaagaucaccgaggagguggggcacacggaccugauggccgcguacgucgacaacagcucccugaccaucaagaagcccaacgagcucagccgcgugcugggccugaagacccucgccacccacgggcuggccgccgugaacuccguccccugggacacgaucgccaacuacgcgaagccguuccugaacaagguggugagcaccaccaccaacaucgucacgcgcugccucaaccgggugugcaccaacuacaugcccuacuucuucacccugcugcuccagcugugcaccuucacccgcuccacgaacagccggaucaaggccuccaugcccaccaccaucgccaagaacaccgugaagagcgucggcaaguucugccuggaggccagcuucaacuaccucaagucccccaacuucagcaagcugaucaacaucaucaucugguuccugcuccuguccgugugccugggcagccucaucuacuccacggccgcgcugggggugcugaugagcaaccucggcaugccguccuacugcaccggguaccgcgagggcuaccugaacagcaccaacgucaccaucgccacguacugcaccggcuccauccccugcagcgugugccuguccgggcucgacagccuggacaccuaccccucccuggagaccauccagaucacgaucagcuccuucaagugggaccucaccgccuucggccugguggccgagugguuccuggccuacauccucuucacccgguucuucuacguccuggggcuggcggccaucaugcagcucuucuucagcuacuucgccgugcacuucaucuccaacagcuggcugauguggcugaucaucaaccuggugcagauggcccccaucuccgcgaugguccgcauguacaucuucuucgccagcuucuacuacguguggaagagcuacgugcacgucguggacggcugcaacuccagcaccugcaugaugugcuacaagcggaaccgcgccacgcggguggagugcaccaccaucgucaacggggugcgccgguccuucuacgucuacgccaacggcggcaagggguucugcaagcuccacaacuggaacugcgugaacugcgacaccuucugcgccggcagcacguucaucuccgacgagguggcgcgcgaccugagccugcaguucaagcggccgaucaaccccaccgaccaguccagcuacaucgucgacuccgugaccgugaagaacgggagcauccaccucuacuucgacaaggccggccagaagaccuacgagcgccacucccugagccacuucgucaaccuggacaaccuccgggccaacaacacgaaggggucccugcccaucaacgugaucguguucgacggcaagagcaagugcgaggaguccagcgccaaguccgccagcgucuacuacucccagcugaugugccagcccauccuccugcuggaccaggcgcucgugagcgacgugggcgacagcgccgaggucgccgugaagauguucgacgccuacgugaacaccuucuccagcaccuucaacgucccgauggagaagcugaagacccugguggccacggcggaggccgagcucgccaagaacgugucccuggacaacguccugagcaccuucaucuccgccgcgcgccagggguucguggacagcgacguggagaccaaggacgucguggagugccucaagcugucccaccagagcgacaucgaggugaccggcgacuccugcaacaacuacaugcugacguacaacaaggucgagaacaugaccccccgggaccucggggccugcaucgacugcagcgcccgccacaucaacgcccagguggccaagucccacaacaucgcgcugaucuggaacgugaaggacuucaugagccuguccgagcagcuccggaagcagauccgcagcgccgccaagaagaacaaccugcccuucaagcugaccugcgccaccacgcgccaggucgugaacguggucaccaccaagaucgcccucaagggcgggugaggacuaguuauaagacugacuagcccgaugggccucccaacgggcccuccuccccuccuugcaccgagauuaauaaaaaaaaaaaaaaaaaaaaaaaaaaaaaaaaaaaaaaaaaaaaaaaaaaaaaaaaaaaaaaaaugcaucccccccccccccccccccccccccccccccaaaggcucuuuucagagccaccagaauu

SEQ ID NO: 21661 - RNA, 6058 nt, Artificial Sequence
  SARS-CoV-2__MT799969.1__non-structural protein 3 (NSP3) mRNA gc
aggagaaagcuuaccauggcccccaccaaggugaccuucggcgacgacacggucaucgaggugcagggguacaagagcgugaacaucaccuucgagcuggacgagcgcaucgacaagguccucaacgagaagugcuccgccuacaccguggagcugggcaccgaggugaacgaguucgcgugcgucguggccgacgccgugaucaagacgcugcagccggucagcgagcuccugaccccccuggggaucgaccucgacgagugguccauggccaccuacuaccuguucgacgagagcggcgaguucaagcuggccucccacauguacugcagcuucuacccccccgacgaggacgaggaggagggggacugcgaggaggaggaguucgagccguccacccaguacgaguacggcacggaggacgacuaccagggcaagccccucgaguucggggcgaccagcgccgcccugcagcccgaggaggagcaggaggaggacuggcuggacgacgacucccagcagaccgugggccagcaggacgggagcgaggacaaccagaccacgaccauccagaccaucguggagguccagccccagcucgagauggagcugaccccgguggugcagacgaucgaggucaacuccuucagcggcuaccugaagcucaccgacaacguguacaucaagaacgccgacaucguggaggaggcgaagaaggucaagcccaccgugguggucaacgccgccaacguguaccugaagcacgggggcggcguggccggggcccugaacaaggcgaccaacaacgccaugcaggucgaguccgacgacuacaucgccacgaacggcccccucaagguggggggcagcugcguccuguccggccacaaccuggccaagcacugccuccacgugguggggcccaacgucaacaagggcgaggacauccagcugcugaagagcgccuacgagaacuucaaccagcacgaggugcuccuggcgccgcugcucuccgccgggaucuucggcgccgacagcauccacucccugcgggugugcgucgacaccgugcgcaccaacguguaccuggccgucuucgacaagaaccucuacgacaagcuggugagcagcuuccuggagaugaaguccgagaagcagguggagcagaagaucgccgagauccccaaggaggaguucaagcccuucaucaccgagagcaagcccuccgucgagcagcggaagcaggacgacaagaagaucaaggcgugcguggaggaggugacgaccacccucgaggagaccaaguuccugacggagaaccugcuccuguacaucgacaucaacgggaaccugcacccggacagcgccacccucgucuccgacaucgacaucaccuuccugaagaaggacgcccccuacaucgugggcgacgugguccaggagggcgugcugaccgccguggucauccccacgaagaaggccgggggcaccaccgagaugcucgcgaaggcccugcgcaaggugcccaccgacaacuacaucacgaccuacccggggcagggccugaacggguacaccguggaggaggccaagaccguccucaagaagugcaagagcgccuucuacauccugcccuccaucaucagcaacgagaagcaggagauccugggcaccguguccuggaaccuccgggagaugcuggcgcacgccgaggagacgcgcaagcugaugcccgugugcgucgagaccaaggccaucgugagcaccauccagcggaaguacaagggcaucaagauccaggaggggguggucgacuacggcgcccgcuucuacuucuacaccuccaagacgaccguggccagccugaucaacacccucaacgaccugaacgagacccuggugacgaugccccucggguacgucacccacggccugaaccuggaggaggcggcccgguacaugcgcucccucaaggugccggccaccgugagcgucuccagccccgacgccgugaccgccuacaacggguaccugacguccagcuccaagacccccgaggagcacuucaucgagaccaucagccuggcgggcagcuacaaggacugguccuacagcggccaguccacccagcucgggaucgaguuccugaagcggggcgacaagaucguguacuacacgagcaaccccaccaccuuccaccuggacggggaggucaucaccuucgacaaccucaagacgcugcugucccuccgcgaggugcggaccaucaagguguucaccaccgucgacaacaucaaccugcacacgcaggugguggacaugagcaugaccuacggccagcaguucggcccgaccuaccuggacggggccgacgucaccaagaucaagccccacaacucccacgagggcaagacguucuacgugcuccccaacgacuacacccugcgcguggaggccuucgaguacuaccacaccaccgacccgagcuuccuggggcgguacauguccgcccucaaccacacgaagaaguggaaguacccccaggucaacggccugaccagcaucaagugggccgacaacaacugcuaccuggcgaccgcccuccugacccugcagcagaucgagcucaaguucaacccccccgcccugcaggacgccuacuaccgcgcgcgggccggggaggccgccaacuucugcgcccugauccucgcguacugcaacaagacggugggcgagcugggcgacgugcgcgagaccauguccuaccuguuccagcacgccaaccucgacagcugcaagcggguccugaacguggucugcaagaccugcgggcagcagcagaccacccugaagggcguggaggccgugauguacauggggacgcucuccuacgagcaguucaagaagggcguccagaucccgugcaccugcgggaagcaggccaccaaguaccuggugcagcaggagagccccuucgugaugauguccgccccccccgcgcaguacgagcugaagcacggcaccuucacgugcgccagcgaguacaccggcaacuaccagugcgggcacuacaagcacaucaccuccaaggagacccucuacugcaucgacggcgcccugcugacgaagagcagcgaguacaaggggccgaucaccgacgucuucuacaaggagaacuccuacaccaccacgaucaagcccgugaccuacaagcucgacggcguggucugcaccgagaucgaccccaagcuggacaacuacuacaagaaggacaacagcuacuucaccgagcagcccaucgaccuggugccgaaccagcccuaccccaacgccuccuucgacaacuucaaguucgugugcgacaacaucaaguucgccgacgaccucaaccagcugacgggguacaagaagcccgcgagccgcgagcugaaggucaccuucuucccggaccucaacggcgacgugguggccaucgacuacaagcacuacacccccuccuucaagaagggcgccaagcugcugcacaagcccaucgucuggcacgugaacaacgccaccaacaaggcgacguacaagcccaacaccuggugcauccggugccucuggagcaccaagccgguggagaccuccaacagcuucgacguccugaaguccgaggacgcccaggggauggacaaccuggccugcgaggaccucaagcccgugagcgaggagguggucgagaaccccacgauccagaaggacgugcuggagugcaacgugaagaccaccgaggucgugggcgacaucauccugaagcccgccaacaacucccucaagaucaccgaggagguggggcacacggaccugauggccgcguacgucgacaacagcucccugaccaucaagaagccgaacgagcucagccgcgugcugggccugaagacccucgccacccacgggcuggccgccgugaacuccguccccugggacacgaucgccaacuacgcgaagcccuuccugaacaagguggugagcaccaccaccaacaucgucacgcgcugccucaaccgggugugcaccaacuacaugccguacuucuucacccugcugcuccagcugugcaccuucacccgcuccacgaacagccggaucaaggccuccaugcccaccaccaucgccaagaacaccgugaagagcgucggcaaguucugccuggaggccagcuucaacuaccucaagucccccaacuucagcaagcugaucaacaucaucaucugguuccugcuccuguccgugugccugggcagccucaucuacuccacggccgcgcugggggugcugaugagcaaccucggcaugcccuccuacugcaccggguaccgcgagggcuaccugaacagcaccaacgucaccaucgccacguacugcaccggcuccaucccgugcagcgugugccuguccgggcucgacagccuggacaccuaccccucccuggagaccauccagaucacgaucagcuccuucaagugggaccucaccgccuucggccugguggccgagugguuccuggccuacauccucuucacccgguucuucuacguccuggggcuggcggccaucaugcagcucuucuucagcuacuucgccgugcacuucaucuccaacagcuggcugauguggcugaucaucaaccuggugcagauggcccccaucuccgcgaugguccgcauguacaucuucuucgccagcuucuacuacguguggaagagcuacgugcacgucguggacggcugcaacuccagcaccugcaugaugugcuacaagcggaaccgcgccacgcggguggagugcaccaccaucgucaacggggugcgccgguccuucuacgucuacgccaacggcggcaagggguucugcaagcuccacaacuggaacugcgugaacugcgacaccuucugcgccggcagcacguucaucuccgacgagguggcgcgcgaccugagccugcaguucaagcggcccaucaacccgaccgaccaguccagcuacaucgucgacuccgugaccgugaagaacgggagcauccaccucuacuucgacaaggccggccagaagaccuacgagcgccacucccugagccacuucgucaaccuggacaaccuccgggccaacaacacgaaggggucccugcccaucaacgugaucguguucgacggcaagagcaagugcgaggaguccagcgccaaguccgccagcgucuacuacucccagcugaugugccagcccauccuccugcuggaccaggcgcucgugagcgacgugggcgacagcgccgaggucgccgugaagauguucgacgccuacgugaacaccuucuccagcaccuucaacguccccauggagaagcugaagacccugguggccacggcggaggccgagcucgccaagaacgugucccuggacaacguccugagcaccuucaucuccgccgcgcgccagggguucguggacagcgacguggagaccaaggacgucguggagugccucaagcugucccaccagagcgacaucgaggugaccggcgacuccugcaacaacuacaugcugacguacaacaaggucgagaacaugaccccgcgggaccucggggccugcaucgacugcagcgcccgccacaucaacgcccagguggccaagucccacaacaucgcgcugaucuggaacgugaaggacuucaugagccuguccgagcagcuccggaagcagauccgcagcgccgccaagaagaacaaccugcccuucaagcugaccugcgccaccacgcgccaggucgugaacguggucaccaccaagaucgcccucaagggcgggugaggacuaguuauaagacugacuagcccgaugggccucccaacgggcccuccuccccuccuugcaccgagauuaauaaaaaaaaaaaaaaaaaaaaaaaaaaaaaaaaaaaaaaaaaaaaaaaaaaaaaaaaaaaaaaaaugcaucccccccccccccccccccccccccccccccaaaggcucuuuucagagccaccagaauu

SEQ ID NO: 21662 - RNA, 6058 nt, Artificial Sequence
  SARS-CoV-2__MT799998.1__non-structural protein 3 (NSP3) mRNA gc
aggagaaagcuuaccauggcccccaccaaggugaccuucggcgacgacacggucaucgaggugcagggguacaagagcgugaacaucaccuucgagcuggacgagcgcaucgacaagguccucaacgagaagugcuccgccuacaccguggagcugggcaccgaggugaacgaguucgcgugcgucguggccgacgccgugaucaagacgcugcagccggucagcgagcuccugaccccccuggggaucgaccucgacgagugguccauggccaccuacuaccuguucgacgagagcggcgaguucaagcuggccucccacauguacugcagcuucuacccccccgacgaggacgaggaggagggggacugcgaggaggaggaguucgagccguccacccaguacgaguacggcacggaggacgacuaccagggcaagccccucgaguucggggcgaccagcgccgcccugcagcccgaggaggagcaggaggaggacuggcuggacgacgacucccagcagaccgugggccagcaggacgggagcgaggacaaccagaccacgaccauccagaccaucguggagguccagccccagcucgagauggagcugaccccgguggugcagacgaucgaggucaacuccuucagcggcuaccugaagcucaccgacaacguguacaucaagaacgccgacaucguggaggaggcgaagaaggucaagcccaccgugguggucaacgccgccaacguguaccugaagcacgggggcggcguggccggggcccugaacaaggcgaccaacaacgccaugcaggucgaguccgacgacuacaucgccacgaacggcccccucaagguggggggcagcugcguccuguccggccacaaccuggccaagcacugccuccacgugguggggcccaacgucaacaagggcgaggacauccagcugcugaagagcgccuacgagaacuucaaccagcacgaggugcuccuggcgccgcugcucuccgccgggaucuucggcgccgaccccauccacagccugcgggugugcgucgacaccgugcgcaccaacguguaccuggccgucuucgacaagaaccucuacgacaagcugguguccagcuuccuggagaugaagagcgagaagcagguggagcagaagaucgccgagauccccaaggaggaggucaagcccuucaucaccgaguccaagccgagcguggagcagcggaagcaggacgacaagaagaucaaggcgugcguggaggaggucacgaccacccucgaggagaccaaguuccugacggagaaccugcuccuguacaucgacaucaacgggaaccugcaccccgacuccgccacccucgugagcgacaucgacaucaccuuccugaagaaggacgcccccuacaucgugggcgacgucgugcaggagggcgugcugaccgccgucgugauccccacgaagaaggccgggggcaccaccgagaugcucgcgaaggcccugcgcaaggugccgaccgacaacuacaucacgaccuaccccgggcagggccugaacggguacaccgucgaggaggccaagaccgugcucaagaagugcaaguccgccuucuacauccugcccagcaucaucuccaacgagaagcaggagauccugggcaccgugagcuggaaccuccgggagaugcuggcgcacgccgaggagacgcgcaagcugaugcccgucugcguggagaccaaggccaucguguccaccauccagcggaaguacaagggcaucaagauccaggagggggucguggacuacggcgcccgcuucuacuucuacaccagcaagacgaccguggccucccugaucaacacccucaacgaccugaacgagacccuggucacgaugccgcucggguacgugacccacggccugaaccuggaggaggcggcccgguacaugcgcagccucaaggugcccgccaccgucuccgugagcucccccgacgccgugaccgccuacaacggguaccugacgagcuccagcaagacccccgaggagcacuucaucgagaccaucucccuggcgggcagcuacaaggacuggagcuacuccggccagagcacccagcucgggaucgaguuccugaagcggggcgacaaguccgucuacuacacgagcaacccgaccaccuuccaccuggacggggaggugaucaccuucgacaaccucaagacgcugcugucccuccgcgaggugcggaccaucaaggucuucaccaccguggacaacaucaaccugcacacgcagguggucgacaugagcaugaccuacggccagcaguucggccccaccuaccuggacggggccgacgugaccaagaucaagccccacaacucccacgagggcaagacguucuacgugcucccgaacgacgacacccugcgcgucgaggccuucgaguacuaccacaccaccgaccccagcuuccuggggcgguacauguccgcccucaaccacacgaagaaguggaaguacccccaggugaacggccugaccagcaucaagugggccgacaacaacugcuaccuggcgaccgcccuccugacccugcagcagaucgagcucaaguucaaccccccggcccugcaggacgccuacuaccgcgcgcgggccggggaggccgccaacuucugcgcccugauccucgcguacugcaacaagacggugggcgagcugggcgacguccgcgagaccauguccuaccuguuccagcacgccaaccucgacagcugcaagcgggugcugaacgucgugugcaagaccugcgggcagcagcagaccacccugaagggcguggaggccgucauguacauggggacgcucuccuacgagcaguucaagaagggcgugcagauccccugcaccugcgggaagcaggccaccaaguaccuggugcagcaggagagccccuucgucaugauguccgcccccccggaccaguacgagcugaagcacggcaccuucacgugcgcgagcgaguacaccggcaacuaccagugcgggcacuacaagcacaucaccuccaaggagacccucuacugcaucgacggcgcccugcugacgaagagcagcgaguacaaggggcccaucaccgacguguucuacaaggagaacuccuacaccaccacgaucaagcccgugaccuacaagcucgacggcgucgugugcaccgagaucgaccccaagcuggacaacuacuacaagaaggacaacagcuacuucaccgagcagccgaucgaccuggugcccaaccagcccuaccccaacgccuccuucgacaacuucaaguucgucugcgacaacaucaaguucgccgacgaccucaaccagcugacgggguacaagaagccggccagccgcgagcugaaggugaccuucuuccccgaccucaacggcgacguggucgcgaucgacuacaagcacuacacccccuccuucaagaagggcgccaagcugcugcacaagcccaucguguggcacgugaacaacgccaccaacaaggccacguacaagccgaacaccuggugcauccggugccucuggagcaccaagcccgucgagaccuccaacagcuucgacgugcugaaguccgaggacgcgcaggggauggacaaccuggccugcgaggaccucaagcccgugagcgaggaggucguggagaaccccacgauccagaaggacgugcuggagugcaacgucaagaccaccgagguggugggcgacaucauccugaagccggccaacaacucccucaagaucaccgaggaggucgggcacacggaccugauggccgccuacguggacaacagcucccugaccaucaagaagcccaacgagcucagccgcgugcugggccugaagacccucgcgacccacgggcuggccgccgucaacuccgugcccugggacacgaucgccaacuacgccaagccguuccugaacaagguggucagcaccaccaccaacaucgugacgcgcugccucaaccgggugugcaccaacuacaugcccuacuucuucacccugcugcuccagcugugcaccuucacccgcuccacgaacagccggaucaaggcguccaugcccaccaccaucgccaagaacaccgucaagagcgugggcaaguucugccuggaggccagcuucaacuaccucaagucccccaacuucagcaagcugaucaacaucaucaucugguuccugcuccuguccgugugccugggcagccucaucuacuccacggccgcccuggggguccugaugagcaaccucggcaugccguccuacugcaccggguaccgcgagggcuaccugaacagcaccaacgugaccaucgcgacguacugcaccggcuccauccccugcagcgugugccuguccgggcucgacagccuggacaccuaccccucccuggagaccauccagaucacgaucagcuccuucaagugggaccucaccgccuucggccuggucgccgagugguuccuggccuacauccucuucacccgguucuucuacgugcuggggcuggccgcgaucaugcagcucuucuucagcuacuucgccgugcacuucaucuccaacagcuggcugauguggcugaucaucaaccugguccagauggcccccaucuccgccauggugcgcauguacaucuucuucgcgagcuucuacuacguguggaagagcuacguccacgugguggacggcugcaacuccagcaccugcaugaugugcuacaagcggaaccgcgccacgcgggucgagugcaccaccaucgugaacgggguccgccgguccuucuacguguacgccaacggcggcaagggguucugcaagcuccacaacuggaacugcgugaacugcgacaccuucugcgccggcagcacguucaucuccgacgaggucgcccgcgaccugagccugcaguucaagcggccgaucaaccccaccgaccaguccagcuacaucguggacuccgugaccgucaagaacgggagcauccaccucuacuucgacaaggcgggccagaagaccuacgagcgccacucccugagccacuucgugaaccuggacaaccuccgggccaacaacacgaaggggucccugcccaucaacgugaucgucuucgacggcaagagcaagugcgaggaguccagcgccaaguccgccagcguguacuacucccagcugaugugccagcccauccuccugcuggaccaggcccucgugagcgacgucggcgacagcgcggagguggccgugaagauguucgacgccuacgucaacaccuucuccagcaccuucaacgugccgauggagaagcugaagacccugguggccacggccgaggcggagcucgccaagaacgucucccuggacaacgugcugagcaccuucaucuccgccgcccgccagggguucguggacagcgacgucgagaccaaggacgugguggagugccucaagcugucccaccagagcgacaucgaggucaccggcgacuccugcaacaacuacaugcugacguacaacaagguggagaacaugaccccccgggaccucggggcgugcaucgacugcagcgcccgccacaucaacgcccagguggccaagucccacaacaucgcccugaucuggaacgucaaggacuucaugagccuguccgagcagcuccggaagcagauccgcagcgcggccaagaagaacaaccugcccuucaagcugaccugcgccaccacgcgccagguggugaacgucgugaccaccaagaucgcccucaagggcgggugaggacuaguuauaagacugacuagcccgaugggccucccaacgggcccuccuccccuccuugcaccgagauuaauaaaaaaaaaaaaaaaaaaaaaaaaaaaaaaaaaaaaaaaaaaaaaaaaaaaaaaaaaaaaaaaaugcaucccccccccccccccccccccccccccccccaaaggcucuuuucagagccaccagaauu

SEQ ID NO: 21663 - RNA, 6058 nt, Artificial Sequence
  SARS-CoV-2__MT800024.1__non-structural protein 3 (NSP3) mRNA gc
aggagaaagcuuaccauggcccccaccaaggugaccuucggcgacgacacggucaucgaggugcagggguacaagagcgugaacaucaccuucgagcuggacgagcgcaucgacaagguccucaacgagaagugcuccgccuacaccguggagcugggcaccgaggugaacgaguucgcgugcgucguggccgacgccgugaucaagacgcugcagccggucagcgagcuccugaccccccuggggaucgaccucgacgagugguccauggccaccuacuaccuguucgacgagagcggcgaguucaagcuggccucccacauguacugcagcuucuacccccccgacgaggacgaggaggagggggacugcgaggaggaggaguucgagccguccacccaguacgaguacggcacggaggacgacuaccagggcaagccccucgaguucggggcgaccagcgccgcccugcagcccgaggaggagcaggaggaggacuggcuggacgacgacucccagcagaccgugggccagcaggacgggagcgaggacaaccagaccacgaccauccagaccaucguggagguccagccccagcucgagauggagcugaccccgguggugcagacgaucgaggucaacuccuucagcggcuaccugaagcucaccgacaacguguacaucaagaacgccgacaucguggaggaggcgaagaaggucaagcccaccgugguggucaacgccgccaacguguaccugaagcacgggggcggcguggccggggcccugaacaaggcgaccaacaacgccaugcaggucgaguccgacgacuacaucgccacgaacggcccccucaagguggggggcagcugcguccuguccggccacaaccuggccaagcacugccuccacgugguggggcccaacgucaacaagggcgaggacauccagcugcugaagagcgccuacgagaacuucaaccagcacgaggugcuccuggcgccgcugcucuccgccgggaucuucggcgccgaccccauccacagccugcgggugugcgucgacaccgugcgcaccaacguguaccuggccgucuucgacaagaaccucuacgacaagcugguguccagcuuccuggagaugaagagcgagaagcagguggagcagaagaucgccgagauccccaaggaggaggucaagcccuucaucaccgaguccaagccgagcguggagcagcggaagcaggacgacaagaagaucaaggcgugcguggaggaggucacgaccacccucgaggagaccaaguuccugacgaagaaccugcuccuguacaucgacaucaacgggaaccugcaccccgacuccgccacccucgugagcgacaucgacaucaccuuccugaagaaggacgcccccuacaucgugggcgacgucgugcaggagggcgugcugaccgccgucgugauccccacgaagaaggccgggggcaccaccgagaugcucgcgaaggcccugcgcaaggugccgaccgacaacuacaucacgaccuaccccgggcagggccugaacggguacaccgucgaggaggccaagaccgugcucaagaagugcaaguccgccuucuacauccugcccagcaucaucuccaacgagaagcaggagauccugggcaccgugagcuggaaccuccgggagaugcuggcgcacgccgaggagacgcgcaagcugaugcccgucugcguggagaccaaggccaucguguccaccauccagcggaaguacaagggcaucaagauccaggagggggucguggacuacggcgcccgcuucuacuucuacaccagcaagacgaccguggccucccugaucaacacccucaacgaccugaacgagacccuggucacgaugccgcucggguacgugacccacggccugaaccuggaggaggcggcccgguacaugcgcagccucaaggugcccgccaccgucuccgugagcucccccgacgccgugaccgccuacaacggguaccugacgagcuccagcaagacccccgaggagcacuucaucgagaccaucucccuggcgggcagcuacaaggacuggagcuacuccggccagagcacccagcucgggaucgaguuccugaagcggggcgacaaguccgucuacuacacgagcaacccgaccaccuuccaccuggacggggaggugaucaccuucgacaaccucaagacgcugcugucccuccgcgaggugcggaccaucaaggucuucaccaccguggacaacaucaaccugcacacgcagguggucgacaugagcaugaccuacggccagcaguucggccccaccuaccuggacggggccgacgugaccaagaucaagccccacaacucccacgagggcaagacguucuacgugcucccgaacgacgacacccugcgcgucgaggccuucgaguacuaccacaccaccgaccccagcuuccuggggcgguacauguccgcccucaaccacacgaagaaguggaaguacccccaggugaacggccugaccagcaucaagugggccgacaacaacugcuaccuggcgaccgcccuccugacccugcagcagaucgagcucaaguucaaccccccggcccugcaggacgccuacuaccgcgcgcgggccggggaggccgccaacuucugcgcccugauccucgcguacugcaacaagacggugggcgagcugggcgacguccgcgagaccauguccuaccuguuccagcacgccaaccucgacagcugcaagcgggugcugaacgucgugugcaagaccugcgggcagcagcagaccacccugaagggcguggaggccgucauguacauggggacgcucuccuacgagcaguucaagaagggcgugcagauccccugcaccugcgggaagcaggccaccaaguaccuggugcagcaggagagccccuucgucaugauguccgcccccccggcgcaguacgagcugaagcacggcaccuucacgugcgccagcgaguacaccggcaacuaccagugcgggcacuacaagcacaucaccuccaaggagacccucuacugcaucgacggcgcccugcugacgaagagcagcgaguacaaggggcccaucaccgacguguucuacaaggagaacuccuacaccaccacgaucaagcccgugaccuacaagcucgacggcgucgugugcaccgagaucgaccccaagcuggacaacuacuacaagaaggacaacagcuacuucaccgagcagccgaucgaccuggugcccaaccagcccuaccccaacgccuccuucgacaacuucaaguucgucugcgacaacaucaaguucgccgacgaccucaaccagcugacgggguacaagaagccggcgagccgcgagcugaaggugaccuucuuccccgaccucaacggcgacguggucgccaucgacuacaagcacuacacccccuccuucaagaagggcgccaagcugcugcacaagcccaucguguggcacgugaacaacgccaccaacaaggcgacguacaagccgaacaccuggugcauccggugccucuggagcaccaagcccgucgagaccuccaacagcuucgacgugcugaaguccgaggacgcccaggggauggacaaccuggccugcgaggaccucaagcccgugagcgaggaggucguggagaaccccacgauccagaaggacgugcuggagugcaacgucaagaccaccgagguggugggcgacaucauccugaagccggccaacaacucccucaagaucaccgaggaggucgggcacacggaccugauggccgcguacguggacaacagcucccugaccaucaagaagcccaacgagcucagccgcgugcugggccugaagacccucgccacccacgggcuggccgccgucaacuccgugcccugggacacgaucgccaacuacgcgaagccguuccugaacaagguggucagcaccaccaccaacaucgugacgcgcugccucaaccgggugugcaccaacuacaugcccuacuucuucacccugcugcuccagcugugcaccuucacccgcuccacgaacagccggaucaaggccuccaugcccaccaccaucgccaagaacaccgucaagagcgugggcaaguucugccuggaggccagcuucaacuaccucaagucccccaacuucagcaagcugaucaacaucaucaucugguuccugcuccuguccgugugccugggcagccucaucuacuccacggccgcgcuggggguccugaugagcaaccucggcaugccguccuacugcaccggguaccgcgagggcuaccugaacagcaccaacgugaccaucgccacguacugcaccggcuccauccccugcagcgugugccuguccgggcucgacagccuggacaccuaccccucccuggagaccauccagaucacgaucagcuccuucaagugggaccucaccgccuucggccuggucgccgagugguuccuggccuacauccucuucacccgguucuucuacgugcuggggcuggcggccaucaugcagcucuucuucagcuacuucgccgugcacuucaucuccaacagcuggcugauguggcugaucaucaaccugguccagauggcccccaucuccgcgauggugcgcauguacaucuucuucgccagcuucuacuacguguggaagagcuacguccacgugguggacggcugcaacuccagcaccugcaugaugugcuacaagcggaaccgcgccacgcgggucgagugcaccaccaucgugaacgggguccgccgguccuucuacguguacgccaacggcggcaagggguucugcaagcuccacaacuggaacugcgugaacugcgacaccuucugcgccggcagcacguucaucuccgacgaggucgcgcgcgaccugagccugcaguucaagcggccgaucaaccccaccgaccaguccagcuacaucguggacuccgugaccgucaagaacgggagcauccaccucuacuucgacaaggccggccagaagaccuacgagcgccacucccugagccacuucgugaaccuggacaaccuccgggccaacaacacgaaggggucccugcccaucaacgugaucgucuucgacggcaagagcaagugcgaggaguccagcgccaaguccgccagcguguacuacucccagcugaugugccagcccauccuccugcuggaccaggcgcucgugagcgacgucggcgacagcgccgagguggccgugaagauguucgacgccuacgucaacaccuucuccagcaccuucaacgugccgauggagaagcugaagacccugguggccacggcggaggccgagcucgccaagaacgucucccuggacaacgugcugagcaccuucaucuccgccgcgcgccagggguucguggacagcgacgucgagaccaaggacgugguggagugccucaagcugucccaccagagcgacaucgaggucaccggcgacuccugcaacaacuacaugcugacguacaacaagguggagaacaugaccccccgggaccucggggccugcaucgacugcagcgcccgccacaucaacgcccagguggccaagucccacaacaucgcgcugaucuggaacgucaaggacuucaugagccuguccgagcagcuccggaagcagauccgcagcgccgccaagaagaacaaccugcccuucaagcugaccugcgccaccacgcgccagguggugaacgucgugaccaccaagaucgcccucaagggcgggugaggacuaguuauaagacugacuagcccgaugggccucccaacgggcccuccuccccuccuugcaccgagauuaauaaaaaaaaaaaaaaaaaaaaaaaaaaaaaaaaaaaaaaaaaaaaaaaaaaaaaaaaaaaaaaaaugcaucccccccccccccccccccccccccccccccaaaggcucuuuucagagccaccagaauu

SEQ ID NO: 21664 - RNA, 6058 nt, Artificial Sequence
  SARS-CoV-2__MT800030.1__non-structural protein 3 (NSP3) mRNA gc
aggagaaagcuuaccauggcccccaccaaggugaccuucggcgacgacacggucaucgaggugcagggguacaagagcgugaacaucaccuucgagcuggacgagcgcaucgacaagguccucaacgagaagugcuccgccuacaccguggagcugggcaccgaggugaacgaguucgcgugcgucguggccgacgccgugaucaagacgcugcagccggucagcgagcuccugaccccccuggggaucgaccucgacgagugguccauggccaccuacuaccuguucgacgagagcggcgaguucaagcuggccucccacauguacugcagcuucuacccccccgacgaggacgaggaggagggggacugcgaggaggaggaguucgagccguccacccaguacgaguacggcacggaggacgacuaccagggcaagccccucgaguucggggcgaccagcgccgcccugcagcccgaggaggagcaggaggaggacuggcuggacgacgacucccagcagaccgugggccagcaggacgggagcgaggacaaccagaccacgaccauccagaccaucguggagguccagccccagcucgagauggagcugaccccgguggugcagacgaucgaggucaacuccuucagcggcuaccugaagcucaccgacaacguguacaucaagaacgccgacaucguggaggaggcgaagaaggucaagcccaccgugguggucaacgccgccaacguguaccugaagcacgggggcggcguggccggggcccugaacaaggcgaccaacaacgccaugcaggucgaguccgacgacuacaucgccacgaacggcccccucaagguggggggcagcugcguccuguccggccacaaccuggccaagcacugccuccacgugguggggcccaacgucaacaagggcgaggacauccagcugcugaagagcgccuacgagaacuucaaccagcacgaggugcuccuggcgccgcugcucuccgccgggaucuucggcgccgaccccaucuacagccugcgggugugcgucgacaccgugcgcaccaacguguaccuggccgucuucgacaagaaccucuacgacaagcugguguccagcuuccuggagaugaagagcgagaagcagguggagcagaagaucgccgagauccccaaggaggaggucaagcccuucaucaccgaguccaagccgagcguggagcagcggaagcaggacgacaagaagaucaaggcgugcguggaggaggucacgaccacccucgaggagaccaaguuccugacggagaaccugcuccuguacaucgacaucaacgggaaccugcaccccgacuccgccacccucgugagcgacaucgacaucaccuuccugaagaaggacgcccccuacaucgugggcgacgucgugcaggagggcgugcugaccgccgucgugauccccacgaagaaggccgggggcaccaccgagaugcucgcgaaggcccugcgcaaggugccgaccgacaacuacaucacgaccuaccccgggcagggccugaacggguacaccgucgaggaggccaagaccgugcucaagaagugcaaguccgccuucuacauccugcccagcaucaucuccaacgagaagcaggagauccugggcaccgugagcuggaaccuccgggagaugcuggcgcacgccgaggagacgcgcaagcugaugcccgucugcguggagaccaaggccaucguguccaccauccagcggaaguacaagggcaucaagauccaggagggggucguggacuacggcgcccgcuucuacuucuacaccagcaagacgaccguggccucccugaucaacacccucaacgaccugaacgagacccuggucacgaugccgcucggguacgugacccacggccugaaccuggaggaggcggcccgguacaugcgcagccucaaggugcccgccaccgucuccgugagcucccccgacgccgugaccgccuacaacggguaccugacgagcuccagcaagacccccgaggagcacuucaucgagaccaucucccuggcgggcagcuacaaggacuggagcuacuccggccagagcacccagcucgggaucgaguuccugaagcggggcgacaaguccgucuacuacacgagcaacccgaccaccuuccaccuggacggggaggugaucaccuucgacaaccucaagacgcugcugucccuccgcgaggugcggaccaucaaggucuucaccaccguggacaacaucaaccugcacacgcagguggucgacaugagcaugaccuacggccagcaguucggccccaccuaccuggacggggccgacgugaccaagaucaagccccacaacucccacgagggcaagacguucuacgugcucccgaacgacgacacccugcgcgucgaggccuucgaguacuaccacaccaccgaccccagcuuccuggggcgguacauguccgcccucaaccacacgaagaaguggaaguacccccaggugaacggccugaccagcaucaagugggccgacaacaacugcuaccuggcgaccgcccuccugacccugcagcagaucgagcucaaguucaaccccccggcccugcaggacgccuacuaccgcgcgcgggccggggaggccgccaacuucugcgcccugauccucgcguacugcaacaagacggugggcgagcugggcgacguccgcgagaccauguccuaccuguuccagcacgccaaccucgacagcugcaagcgggugcugaacgucgugugcaagaccugcgggcagcagcagaccacccugaagggcguggaggccgucauguacauggggacgcucuccuacgagcaguucaagaagggcgugcagauccccugcaccugcgggaagcaggccaccaaguaccuggugcagcaggagagccccuucgucaugauguccgcccccccggcgcaguacgagcugaagcacggcaccuucacgugcgccagcgaguacaccggcaacuaccagugcgggcacuacaagcacaucaccuccaaggagacccucuacugcaucgacggcgcccuguucacgaagagcagcgaguacaaggggcccaucaccgacguguucuacaaggagaacuccuacaccaccacgaucaagcccgugaccuacaagcuggacggcgucgugugcaccgagaucgaccccaagcucgacaacuacuacaagaaggacaacagcuacuucaccgagcagccgaucgaccuggugcccaaccagcccuaccccaacgccuccuucgacaacuucaaguucgucugcgacaacaucaaguucgccgacgaccugaaccagcucacgggguacaagaagccggcgagccgcgagcugaaggugaccuucuuccccgaccugaacggcgacguggucgccaucgacuacaagcacuacacccccuccuucaagaagggcgccaagcuccugcacaagcccaucguguggcacgugaacaacgccaccaacaaggcgacguacaagccgaacaccuggugcauccggugccuguggagcaccaagcccgucgagaccuccaacagcuucgacgugcucaaguccgaggacgcccaggggauggacaaccuggccugcgaggaccugaagcccgugagcgaggaggucguggagaaccccacgauccagaaggacgugcucgagugcaacgucaagaccaccgagguggugggcgacaucauccugaagccggccaacaacucccugaagaucaccgaggaggucgggcacacggaccucauggccgcguacguggacaacagcucccugaccaucaagaagcccaacgagcugagccgcgugcucggccugaagacccuggccacccacgggcucgccgccgucaacuccgugcccugggacacgaucgccaacuacgcgaagccguuccugaacaagguggucagcaccaccaccaacaucgugacgcgcugccugaaccgggugugcaccaacuacaugcccuacuucuucacccuccugcugcagcucugcaccuucacccgcuccacgaacagccggaucaaggccuccaugcccaccaccaucgccaagaacaccgucaagagcgugggcaaguucugccuggaggccagcuucaacuaccugaagucccccaacuucagcaagcucaucaacaucaucaucugguuccugcugcucuccgugugccugggcagccugaucuacuccacggccgcgcucgggguccugaugagcaaccugggcaugccguccuacugcaccggguaccgcgagggcuaccucaacagcaccaacgugaccaucgccacguacugcaccggcuccauccccugcagcgugugccuguccgggcuggacagccucgacaccuaccccucccuggagaccauccagaucacgaucagcuccuucaagugggaccugaccgccuucggccucgucgccgagugguuccuggccuacauccuguucacccgguucuucuacgugcucgggcuggcggccaucaugcagcuguucuucagcuacuucgccgugcacuucaucuccaacagcuggcucauguggcugaucaucaaccugguccagauggcccccaucuccgcgauggugcgcauguacaucuucuucgccagcuucuacuacguguggaagagcuacguccacgugguggacggcugcaacuccagcaccugcaugaugugcuacaagcggaaccgcgccacgcgggucgagugcaccaccaucgugaacgggguccgccgguccuucuacguguacgccaacggcggcaagggguucugcaagcugcacaacuggaacugcgugaacugcgacaccuucugcgccggcagcacguucaucuccgacgaggucgcgcgcgaccucagccugcaguucaagcggccgaucaaccccaccgaccaguccagcuacaucguggacuccgugaccgucaagaacgggagcauccaccuguacuucgacaaggccggccagaagaccuacgagcgccacucccucagccacuucgugaaccuggacaaccugcgggccaacaacacgaaggggucccuccccaucaacgugaucgucuucgacggcaagagcaagugcgaggaguccagcgccaaguccgccagcguguacuacucccagcugaugugccagcccauccugcuccuggaccaggcgcuggugagcgacgucggcgacagcgccgagguggccgugaagauguucgacgccuacgucaacaccuucuccagcaccuucaacgugccgauggagaagcucaagacccugguggccacggcggaggccgagcuggccaagaacgucucccucgacaacgugcugagcaccuucaucuccgccgcgcgccagggguucguggacagcgacgucgagaccaaggacgugguggagugccugaagcucucccaccagagcgacaucgaggucaccggcgacuccugcaacaacuacaugcugacguacaacaagguggagaacaugaccccccgggaccugggggccugcaucgacugcagcgcccgccacaucaacgcccagguggccaagucccacaacaucgcgcucaucuggaacgucaaggacuucaugagccuguccgagcagcugcggaagcagauccgcagcgccgccaagaagaacaaccuccccuucaagcugaccugcgccaccacgcgccagguggugaacgucgugaccaccaagaucgcccugaagggcgggugaggacuaguuauaagacugacuagcccgaugggccucccaacgggcccuccuccccuccuugcaccgagauuaauaaaaaaaaaaaaaaaaaaaaaaaaaaaaaaaaaaaaaaaaaaaaaaaaaaaaaaaaaaaaaaaaugcaucccccccccccccccccccccccccccccccaaaggcucuuuucagagccaccagaauu

SEQ ID NO: 21665 - RNA, 6058 nt, Artificial Sequence
  SARS-CoV-2__MT800047.1__non-structural protein 3 (NSP3) mRNA gc
aggagaaagcuuaccauggcccccaccaaggugaccuucggcgacgacacggucaucgaggugcagggguacaagagcgugaacaucaccuucgagcuggacgagcgcaucgacaagguccucaacgagaagugcuccgccuacaccguggagcugggcaccgaggugaacgaguucgcgugcgucguggccgacgccgugaucaagacgcugcagccggucagcgagcuccugaccccccuggggaucgaccucgacgagugguccauggccaccuacuaccuguucgacgagagcggcgaguucaagcuggccucccacauguacugcagcuucuacccccccgacgaggacgaggaggagggggacugcgaggaggaggaguucgagccguccacccaguacgaguacggcacggaggacgacuaccagggcaagccccucgaguucggggcgaccagcgccgcccugcagcccgaggaggagcaggaggaggacuggcuggacgacgacucccagcagaccgugggccagcaggacgggagcgaggacaaccagaccacgaccauccagaccaucguggagguccagccccagcucgagauggagcugaccccgguggugcagacgaucgaggucaacuccuucagcggcuaccugaagcucaccgacaacguguacaucaagaacgccgacaucguggaggaggcgaagaaggucaagcccaccgugguggucaacgccgccaacguguaccugaagcacgggggcggcguggccggggcccugaacaaggcgaccaacaacgccaugcaggucgaguccgacgacuacaucgccacgaacggcccccucaagguggggggcagcugcguccuguccggccacaaccuggccaagcacugccuccacgugguggggcccaacgucaacaagggcgaggacauccagcugcugaagagcgccuacgagaacuucaaccagcacgaggugcuccuggcgccgcugcucuccgccgggaucuucggcgccgaccccauccacagccugcgggugugcgucgacaccgugcgcaccaacguguaccuggccgucuucgacaagaaccucuacgacaagcugguguccagcuuccuggagaugaagagcgagaagcagguggagcagaagaucgccgagauccccaaggaggaggucaagcccuucaucaccgaguccaagccgagcguggagcagcggaagcaggacgacaagaagaucaaggcgugcguggaggaggucacgaccacccucgaggagaccaaguuccugacggagaaccugcuccuguacaucgacaucaacgggaaccugcaccccgacuccgccacccucgugagcgacaucgacaucaccuuccugaagaaggacgcccccuacaucgugggcgacgucgugcaggagggcgugcugaccgccgucgugauccccacgaagaaggccgggggcaccaccgagaugcucgcgaaggcccugcgcaaggugccgaccgacaacuacaucacgaccuaccccgggcagggccugaacggguacaccgucgaggaggccaagaccgugcucaagaagugcaaguccgccuucuacauccugcccagcaucaucuccaacgagaagcaggagauccugggcaccgugagcuggaaccuccgggagaugcuggcgcacgccgaggagacgcgcaagcugaugcccgucugcguggagaccaaggccaucguguccaccauccagcggaaguacaagggcaucaagauccaggagggggucguggacuacggcgcccgcuucuacuucuacaccagcaagacgaccguggccucccugaucaacacccucaacgaccugaacgagacccuggucacgaugccgcucggguacgugacccacggccugaaccuggaggaggcggcccgguacaugcgcagccucaaggugcccgccaccgucuccgugagcucccccgacgccgugaccgccuacaacggguaccugacgagcuccagcaagacccccgaggagcacuucaucgagaccaucucccuggcgggcagcuacaaggacuggagcuacuccggccagagcacccagcucgggaucgaguuccugaagcggggcgacaaguccgucuacuacacgagcaacccgaccaccuuccaccuggacggggaggugaucaccuucgacaaccucaagacgcugcugucccuccgcgaggugcggaccaucaaggucuucaccaccguggacaacaucaaccugcacacgcagguggucgacaugagcaugaccuacggccagcaguucggccccaccuaccuggacggggccgacgugaccaagaucaagccccacaacucccacgagggcaagacguucuacgugcucccgaacgacgacacccugcgcgucgaggccuucgaguacuaccacaccaccgaccccagcuuccuggggcgguacauguccgcccucaaccacacgaagaaguggaaguacccccaggugaacggccugaccagcaucaagugggccgacaacaacugcuaccuggcgaccgcccuccugacccugcagcagaucgagcucaaguucaaccccccggcccugcaggacgccuacuaccgcgcgcgggccggggaggccgccaacuucugcgcccugauccucgcguacugcaacaagacggugggcgagcugggcgacguccgcgagaccauguccuaccuguuccagcacgccaaccucgacagcugcaagcgggugcugaacgucgugugcaagaccugcgggcagcagcagaccacccugaagggcguggaggccgucauguacauggggacgcucuccuacgagcaguucaagaagggcgugcagauccccugcaccugcgggaagcaggccaccaaguaccuggugcagcaggagagccccuucgucaugauguccgcccccccggcgcaguacgagcugaagcacggcaccuucacgugcgccagcgaguacaccggcaacuaccagugcgggcacuacaagcacaucaccuccaaggagacccucuacugcaucgacggcgcccugcugacgaagagcagcgaguacaaggggcccaucaccgacguguucuacaaggagaacuccuacaccaccacgaucaagcccgugaccuacaagcucgacggcgucgugugcaccgagaucgaccccaagcuggacaacuacuacaagaaggacaacagcuacuucaccgagcagccgaucgaccuggugcccaaccagcccuaccccaacgccuccuucgacaacuucaaguucgucugcgacaacaucaaguucgccgacgaccucaaccagcugacgggguacaagaagccggcgagccgcgagcugaaggugaccuucuuccccgaccucaacggcgacguggucgccaucgacuacaagcacuacacccccuccuucaagaagggcgccaagcugcugcacaagcccaucguguggcacgugaacaacgccaccaacaaggcgacguacaagccgaacaccuggugcauccggugccucuggagcaccaagcccgucgagaccuccaacagcuucgacgugcugaaguccgaggacgcccaggggauggacaaccuggccugcgaggaccucaagcccgugagcgaggaggucguggagaaccccacgauccagaaggacgugcuggagugcaacgucaagaccaccgagguggugggcgacaucauccugaagccggccaacaacucccucaagaucaccgaggaggucgggcacacggaccugauggccgcguacguggacaacagcucccugaccaucaagaagcccaacgagcucagccgcgugcugggccugaagacccucgccacccacgggcuggccgccgucaacuccgugcccugggacacgaucgccaacuacgcgaagccguuccugaacaagguggucagcaccaccaccaacaucgugacgcgcugccucaaccgggugugcaccaacuacaugcccuacuucuucacccugcugcuccagcugugcaccuucacccgcuccacgaacagccggaucaaggccuccaugcccaccaccaucgccaagaacaccgucaagagcgugggcaaguucugccuggaggccagcuucaacuaccucaagucccccaacuucagcaagcugaucaacaucaucaucugguuccugcuccuguccgugugccugggcagccucaucuacuccacggccgcgcuggggguccugaugagcaaccucggcaugccguccuacugcaccggguaccgcgagggcuaccugaacagcaccaacgugaccaucgccacguacugcaccggcuccauccccugcagcgugugccuguccgggcucgacagccuggacaccuaccccucccuggagaccacgcagaucaccaucagcuccuucaagugggaccucaccgccuucggccuggucgccgagugguuccuggccuacauccucuucacccgguucuucuacgugcuggggcuggcggccaucaugcagcucuucuucagcuacuucgccgugcacuucaucuccaacagcuggcugauguggcugaucaucaaccugguccagauggcccccaucuccgcgauggugcgcauguacaucuucuucgccagcuucuacuacguguggaagagcuacguccacgugguggacggcugcaacuccagcacgugcaugaugugcuacaagcggaaccgcgccacccgggucgagugcaccaccaucgugaacgggguccgccgguccuucuacguguacgccaacggcggcaagggguucugcaagcuccacaacuggaacugcgugaacugcgacacguucugcgccggcagcaccuucaucuccgacgaggucgcgcgcgaccugagccugcaguucaagcggccgaucaaccccaccgaccaguccagcuacaucguggacuccgugaccgucaagaacgggagcauccaccucuacuucgacaaggccggccagaagacguacgagcgccacucccugagccacuucgugaaccuggacaaccuccgggccaacaacaccaaggggucccugcccaucaacgugaucgucuucgacggcaagagcaagugcgaggaguccagcgccaaguccgccagcguguacuacucccagcugaugugccagcccauccuccugcuggaccaggcgcucgugagcgacgucggcgacagcgccgagguggccgugaagauguucgacgccuacgucaacaccuucuccagcaccuucaacgugccgauggagaagcugaagacgcugguggccaccgcggaggccgagcucgccaagaacgucucccuggacaacgugcugagcaccuucaucuccgccgcgcgccagggguucguggacagcgacgucgagaccaaggacgugguggagugccucaagcugucccaccagagcgacaucgaggucacgggcgacuccugcaacaacuacaugcugaccuacaacaagguggagaacaugaccccccgggaccucggggccugcaucgacugcagcgcccgccacaucaacgcccagguggccaagucccacaacaucgcgcugaucuggaacgucaaggacuucaugagccuguccgagcagcuccggaagcagauccgcagcgccgccaagaagaacaaccugcccuucaagcugaccugcgccacgacccgccagguggugaacgucgugaccaccaagaucgcccucaagggcgggugaggacuaguuauaagacugacuagcccgaugggccucccaacgggcccuccuccccuccuugcaccgagauuaauaaaaaaaaaaaaaaaaaaaaaaaaaaaaaaaaaaaaaaaaaaaaaaaaaaaaaaaaaaaaaaaaugcaucccccccccccccccccccccccccccccccaaaggcucuuuucagagccaccagaauu

SEQ ID NO: 21666 - RNA, 6058 nt, Artificial Sequence
  SARS-CoV-2__MT800923.1__non-structural protein 3 (NSP3) mRNA gc
aggagaaagcuuaccauggcccccaccaaggugaccuucggcgacgacacggucaucgaggugcagggguacaagagcgugaacaucaccuucgagcuggacgagcgcaucgacaagguccucaacgagaagugcuccgccuacaccguggagcugggcaccgaggugaacgaguucgcgugcgucguggccgacgccgugaucaagacgcugcagccggucagcgagcuccugaccccccuggggaucgaccucgacgagugguccauggccaccuacuaccuguucgacgagagcggcgaguucaagcuggccucccacauguacugcagcuucuacccccccgacgaggacgaggaggagggggacugcgaggaggaggaguucgagccguccacccaguacgaguacggcacggaggacgacuaccagggcaagccccucgaguucggggcgaccagcgccgcccugcagcccgaggaggagcaggaggaggacuggcuggacgacgacucccagcagaccgugggccagcaggacgggagcgaggacaaccagaccacgaccauccagaccaucguggagguccagccccagcucgagauggagcugaccccgguggugcagacgaucgaggucaacuccuucagcggcuaccugaagcucaccgacaacguguacaucaagaacgccgacaucguggaggaggcgaagaaggucaagcccaccgugguggucaacgccgccaacguguaccugaagcacgggggcggcguggccggggcccugaacaaggcgaccaacaacgccaugcaggucgaguccgacgacuacaucgccacgaacggcccccucaagguggggggcagcugcguccuguccggccacaaccuggccaagcacugccuccacgugguggggcccaacgucaacaagggcgaggacauccagcugcugaagagcgccuacgagaacuucaaccagcacgaggugcuccuggcgccgcugcucuccgccgggaucuucggcgccgaccccauccacagccugcgggugugcgucgacaccgugcgcaccaacguguaccuggccgucuucgacaagaaccucuacgacaagcugguguccagcuuccuggagaugaagagcgagaagcagguggagcagaagaucgccgagauccccaaggaggaggucaagcccuucaucaccgaguccaagccgagcguggagcagcggaagcaggacgacaagaagaucaaggcgugcguggaggaggucacgaccacccucgaggagaccaaguuccugacggagaaccugcuccuguacaucgacaucaacgggaaccugcaccccgacuccgccacccucgugagcgacaucgacaucaccuuccugaagaaggacgcccccuacaucgugggcgacgucgugcaggagggcgugcugaccgccgucgugauccccacgaagaaggccgggggcaccaccgagaugcucgcgaaggcccugcgcaaggugccgaccgacaacuacaucacgaccuaccccgggcagggccugaacggguacaccgucgaggaggccaagaccgugcucaagaagugcaaguccgccuucuacauccugcccagcaucaucuccaacgagaagcaggagauccugggcaccgugagcuggaaccuccgggagaugcuggcgcacgccgaggagacgcgcaagcugaugcccgucugcguggagaccaaggccaucguguccaccauccagcggaaguacaagggcaucaagauccaggagggggucguggacuacggcgcccgcuucuacuucuacaccagcaagacgaccguggccucccugaucaacacccucaacgaccugaacgagacccuggucacgaugccgcucggguacgugacccacggccugaaccuggaggaggcggcccgguacaugcgcagccucaaggugcccgccaccgucuccgugagcucccccgacgccgugaccgccuacaacggguaccugacgagcuccagcaagacccccgaggagcacuucaucgagaccaucucccuggcgggcagcuacaaggacuggagcuacuccggccagagcacccagcucgggaucgaguuccugaagcggggcgacaaguccgucuacuacacgagcaacccgaccaccuuccaccuggacggggaggugaucaccuucgacaaccucaagacgcugcugucccuccgcgaggugcggaccaucaaggucuucaccaccguggacaacaucaaccugcacacgcagguggucgacaugagcaugaccuacggccagcaguucggccccaccuaccuggacggggccgacgugaccaagaucaagccccacaacucccacgagggcaagacguucuacgugcucccgaacgacgacacccugcgcgucgaggccuucgaguacuaccacaccaccgaccccagcuuccuggggcgguacauguccgcccucaaccacacgaagaaguggaaguacccccaggugaacggccugaccagcaucaagugggccgacaacaacugcuaccuggcgaccgcccuccugacccugcagcagaucgagcucaaguucaaccccccggcccugcaggacgccuacuaccgcgcgcgggccggggaggccgccaacuucugcgcccugauccucgcguacugcaacaagacggugggcgagcugggcgacguccgcgagaccauguccuaccuguuccagcacgccaaccucgacagcugcaagcgggugcugaacgucgugugcaagaccugcgggcagcagcagaccacccugaagggcguggaggccgucauguacauggggacgcucuccuacgagcaguucaagaagggcgugcagauccccugcaccugcgggaagcaggccaccaaguaccuggugcagcaggagagccccuucgucaugauguccgcccccccggcgcaguacgagcugaagcacggcaccuucacgugcgccagcgaguacaccggcaacuaccagugcgggcacuacaagcacaucaccuccaaggagacccucuacugcaucgacggcgcccugcugacgaagagcagcgaguacaaggggcccaucaccgacguguucuacaaggagaacuccuacaccaccacgaucaagcccgugaccuacaagcucgacggcgucgugugcaccgagaucgaccccaagcuggacaacuacuacaagaaggacaacagcuacuucaccgagcagccgaucgaccuggugcccaaccagcccuaccccaacgccuccuucgacaacuucaaguucgucugcgacaacaucaaguucgccgacgaccucaaccagcugacgggguacaagaagccggcgagccgcgagcugaaggugaccuucuuccccgaccucaacggcgacguggucgccaucgacuacaagcacuacacccccuccuucaagaagggcgccaagcugcugcacaagcccaucguguggcacgugaacaacgccaccaacaaggcgacguacaagccgaacaccuggugcauccggugccucuggagcaccaagcccgucgagaccuccaacagcuucgacgugcugaaguccgaggacgcccaggggauggacaaccuggccugcgaggaccucaagcccgugagcgaggaggucguggagaaccccacgauccagaaggacgugcuggagugcaacgucaagaccaccgagguggugggcgacaucauccugaagccggccaacaacaucaagaucaccgaggaggucgggcacacggaccucauggccgcguacguggacaacuccagccugaccaucaagaagcccaacgagcugucccgcgugcucggccugaagacccuggccacccacgggcucgccgccgucaacagcgugcccugggacacgaucgccaacuacgcgaagccguuccugaacaagguggucuccaccaccaccaacaucgugacgcgcugccugaaccgggugugcaccaacuacaugcccuacuucuucacccuccugcugcagcucugcaccuucacccgcagcacgaacucccggaucaaggccagcaugcccaccaccaucgccaagaacaccgucaaguccgugggcaaguucugccuggaggccagcuucaacuaccugaagagccccaacuucuccaagcucaucaacaucaucaucugguuccugcugcucagcgugugccugggcucccugaucuacagcacggccgcgcucgggguccugauguccaaccugggcaugccgagcuacugcaccggguaccgcgagggcuaccucaacuccaccaacgugaccaucgccacguacugcaccggcagcauccccugcuccgugugccugagcgggcuggacucccucgacaccuaccccagccuggagaccauccagaucacgaucuccagcuucaagugggaccugaccgccuucggccucgucgccgagugguuccuggccuacauccuguucacccgguucuucuacgugcucgggcuggcggccaucaugcagcuguucuucuccuacuucgccgugcacuucaucagcaacuccuggcucauguggcugaucaucaaccugguccagauggcccccaucagcgcgauggugcgcauguacaucuucuucgccuccuucuacuacguguggaagagcuacguccacgugguggacggcugcaacagcuccaccugcaugaugugcuacaagcggaaccgcgccacgcgggucgagugcaccaccaucgugaacgggguccgccggagcuucuacguguacgccaacggcggcaagggguucugcaagcugcacaacuggaacugcgugaacugcgacaccuucugcgccggcuccacguucaucagcgacgaggucgcgcgcgaccucucccugcaguucaagcggccgaucaaccccaccgaccagagcuccuacaucguggacagcgugaccgucaagaacggguccauccaccuguacuucgacaaggccggccagaagaccuacgagcgccacagccucucccacuucgugaaccuggacaaccugcgggccaacaacacgaaggggagccuccccaucaacgugaucgucuucgacggcaaguccaagugcgaggagagcuccgccaagagcgccuccguguacuacagccagcugaugugccagcccauccugcuccuggaccaggcgcugguguccgacgucggcgacagcgccgagguggccgugaagauguucgacgccuacgucaacaccuucagcuccaccuucaacgugccgauggagaagcucaagacccugguggccacggcggaggccgagcuggccaagaacgucagccucgacaacgugcuguccaccuucaucagcgccgcgcgccagggguucguggacuccgacgucgagaccaaggacgugguggagugccugaagcucagccaccaguccgacaucgaggucaccggcgacagcugcaacaacuacaugcugacguacaacaagguggagaacaugaccccccgggaccugggggccugcaucgacugcuccgcccgccacaucaacgcccagguggccaagagccacaacaucgcgcucaucuggaacgucaaggacuucaugucccugagcgagcagcugcggaagcagauccgcuccgccgccaagaagaacaaccuccccuucaagcugaccugcgccaccacgcgccagguggugaacgucgugaccaccaagaucgcccugaagggcgggaagugaggacuaguuauaagacugacuagcccgaugggccucccaacgggcccuccuccccuccuugcaccgagauuaauaaaaaaaaaaaaaaaaaaaaaaaaaaaaaaaaaaaaaaaaaaaaaaaaaaaaaaaaaaaaaaaaugcaucccccccccccccccccccccccccccccccaaaggcucuuuucagagccaccagaauu

SEQ ID NO: 21667 - RNA, 6058 nt, Artificial Sequence
  SARS-CoV-2__MT797764.1__non-structural protein 3 (NSP3) mRNA gc
aggagaaagcuuaccauggcccccaccaaggugaccuucggcgacgacacggucaucgaggugcagggguacaagagcgugaacaucaccuucgagcuggacgagcgcaucgacaagguccucaacgagaagugcuccgccuacaccguggagcugggcaccgaggugaacgaguucgcgugcgucguggccgacgccgugaucaagacgcugcagccggucagcgagcuccugaccccccuggggaucgaccucgacgagugguccauggccaccuacuaccuguucgacgagagcggcgaguucaagcuggccucccacauguacugcagcuucuacccccccgacgaggacgaggaggagggggacugcgaggaggaggaguucgagccguccacccaguacgaguacggcacggaggacgacuaccagggcaagccccucgaguucggggcgaccagcgccgcccugcagcccgaggaggagcaggaggaggacuggcuggacgacgacucccagcagaccgugggccagcaggacgggagcgaggacaaccagaccacgaccauccagaccaucguggagguccagccccagcucgagauggagcugaccccgguggugcagacgaucgaggucaacuccuucagcggcuaccugaagcucaccgacaacguguacaucaagaacgccgacaucguggaggaggcgaagaaggucaagcccaccgugguggucaacgccgccaacguguaccugaagcacgggggcggcguggccggggcccugaacaaggcgaccaacaacgccaugcaggucgaguccgacgacuacaucgccacgaacggcccccucaagguggggggcagcugcguccuguccggccacaaccuggccaagcacugccuccacgugguggggcccaacgucaacaagggcgaggacauccagcugcugaagagcgccuacgagaacuucaaccagcacgaggugcuccuggcgccgcugcucuccgccgggaucuucggcgccgaccccauccacagccugcgggugugcgucgacaccgugcgcaccaacguguaccuggccgucuucgacaagaaccucuacgacaagcugguguccagcuuccuggagaugaagagcgagaagcagguggagcagaagaucgccgagauccccaaggaggaggucaagcccuucaucaccgaguccaagccgagcguggagcagcggaagcaggacgacaagaagaucaaggcgugcguggaggaggucacgaccacccucgaggagaccaaguuccugacggagaaccugcuccuguacaucgacaucaacgggaaccugcaccccgacuccgccacccucgugagcgacaucgacaucaccuuccugaagaaggacgcccccuacaucgugggcgacgucgugcaggagggcgugcugaccgccgucgugauccccacgaagaaggccgggggcaccaccgagaugcucgcgaaggcccugcgcaaggugccgaccgacaacuacaucacgaccuaccccgggcagggccugaacggguacaccgucgaggaggccaagaccgugcucaagaagugcaaguccgccuucuacauccugcccagcaucaucuccaacgagaagcaggagauccugggcaccgugagcuggaaccuccgggagaugcuggcgcacgccgaggagacgcgcaagcugaugcccgucugcguggagaccaaggccaucguguccaccauccagcggaaguacaagggcaucaagauccaggagggggucguggacuacggcgcccgcuucuacuucuacaccagcaagacgaccguggccucccugaucaacacccucaacgaccugaacgagacccuggucacgaugccgcucggguacgugacccacggccugaaccuggaggaggcggcccgguacaugcgcagccucaaggugcccgccaccgucuccgugagcucccccgacgccgugaccgccuacaacggguaccugacgagcuccagcaagacccccgaggagcacuucaucgagaccaucucccuggcgggcagcuacaaggacuggagcuacuccggccagagcacccagcucgggaucgaguuccugaagcggggcgacaaguccgucuacuacacgagcaacccgaccaccuuccaccuggacggggaggugaucaccuucgacaaccucaagacgcugcugucccuccgcgaggugcggaccaucaaggucuucaccaccguggacaacaucaaccugcacacgcagguggucgacaugagcaugaccuacggccagcaguucggccccaccuaccuggacggggccgacgugaccaagaucaagccccacaacucccacgagggcaagacguucuacgugcucccgaacgacgacacccugcgcgucgaggccuucgaguacuaccacaccaccgaccccagcuuccuggggcgguacauguccgcccucaaccacacgaagaaguggaaguacccccaggugaacggccugaccagcaucaagugggccgacaacaacugcuaccuggcgaccgcccuccugacccugcagcagaucgagcucaaguucaaccccccggcccugcaggacgccuacuaccgcgcgcgggccggggaggccgccaacuucugcgcccugauccucgcguacugcaacaagacggugggcgagcugggcgacguccgcgagaccauguccuaccuguuccagcacgccaaccucgacagcugcaagcgggugcugaacgucgugugcaagaccugcgggcagcagcagaccacccugaagggcguggaggccgucauguacauggggacgcucuccuacgagcaguucaagaagggcgugcagauccccugcaccugcgggaagcaggccaccaaguaccuggugcagcaggagagccccuucgucaugauguccgcccccccggcgcaguacgagcugaagcacggcaccuucacgugcgccagcgaguacaccggcaacuaccagugcgggcacuacaagcacaucaccuccaaggagacccucuacugcaucgacggcgcccugcugacgaagagcagcgaguacaaggggcccaucaccgacguguucuacaaggagaacuccuacaccaccacgaucaagcccgugaccuacaagcucgacggcgucgugugcaccgagaucgaccccaagcuggacgacuacuacaagaaggacaacagcuacuucaccgagcagccgaucgaccuggugcccaaccagcccuaccccaacgccuccuucgacaacuucaaguucgucugcgacaacaucaaguucgccgacgaccucaaccagcugacgggguacaagaagccggcgagccgcgagcugaaggugaccuucuuccccgaccucaacggcgacguggucgccaucgacuacaagcacuacacccccuccuucaagaagggcgccaagcugcugcacaagcccaucguguggcacgugaacaacgccaccaacaaggcgacguacaagccgaacaccuggugcauccggugccucuggagcaccaagcccgucgagaccuccaacagcuucgacgugcugaaguccgaggacgcccaggggauggacaaccuggccugcgaggaccucaagcccgugagcgaggaggucguggagaaccccacgauccagaaggacgugcuggagugcaacgucaagaccaccgagguggugggcgacaucauccugaagccggccaacaacucccucaagaucaccgaggaggucgggcacacggaccugauggccgcguacguggacaacagcucccugaccaucaagaagcccaacgagcucagccgcgugcugggccugaagacccucgccacccacgggcuggccgccgucaacuccgugcccugggacacgaucgccaacuacgcgaagccguuccugaacaagguggucagcaccaccaccaacaucgugacgcgcugccucaaccgggugugcaccaacuacaugcccuacuucuucacccugcugcuccagcugugcaccuucacccgcuccacgaacagccggaucaaggccuccaugcccaccaccaucgccaagaacaccgucaagagcgugggcaaguucugccuggaggccagcuucaacuaccucaagucccccaacuucagcaagcugaucaacaucaucaucugguuccugcuccuguccgugugccugggcagccucaucuacuccacggccgcgcuggggguccugaugagcaaccucggcaugccguccuacugcaccggguaccgcgagggcuaccugaacagcaccaacgugaccaucgccacguacugcaccggcuccauccccugcagcgugugccuguccgggcucgacagccuggacaccuaccccucccuggagaccauccagaucacgaucagcuccuucaagugggaccucaccgccuucggccuggucgccgagugguuccuggccuacauccucuucacccgguucuucuacgugcuggggcuggcggccaucaugcagcucuucuucagcuacuucgccgugcacuucaucuccaacagcuggcugauguggcugaucaucaaccugguccagauggcccccaucuccgcgauggugcgcauguacaucuucuucgccagcuucuacuacguguggaagagcuacguccacgugguggacggcugcaacuccagcaccugcaugaugugcuacaagcggaaccgcgccacgcgggucgagugcaccaccaucgugaacgggguccgccgguccuucuacguguacgccaacggcggcaagggguucugcaagcuccacaacuggaacugcgugaacugcgacaccuucugcgccggcagcacguucaucuccgacgaggucgcgcgcgaccugagccugcaguucaagcggccgaucaaccccaccgaccaguccagcuacaucguggacuccgugaccgucaagaacgggagcauccaccucuacuucgacaaggccggccagaagaccuacgagcgccacucccugagccacuucgugaaccuggacaaccuccgggccaacaacacgaaggggucccugcccaucaacgugaucgucuucgacggcaagagcaagugcgaggaguccagcgccaaguccgccagcguguacuacucccagcugaugugccagcccauccuccugcuggaccaggcgcucgugagcgacgucggcgacagcgccgagguggccgugaagauguucgacgccuacgucaacaccuucuccagcaccuucaacgugccgauggagaagcugaagacccugguggccacggcggaggccgagcucgccaagaacgucucccuggacaacgugcugagcaccuucaucuccgccgcgcgccagggguucguggacagcgacgucgagaccaaggacgugguggagugccucaagcugucccaccagagcgacaucgaggucaccggcgacuccugcaacaacuacaugcugacguacaacaagguggagaacaugaccccccgggaccucggggccugcaucgacugcagcgcccgccacaucaacgcccagguggccaagucccacaacaucgcgcugaucuggaacgucaaggacuucaugagccuguccgagcagcuccggaagcagauccgcagcgccgccaagaagaacaaccugcccuucaagcugaccugcgccaccacgcgccagguggugaacgucgugaccaccaagaucgcccucaagggcgggugaggacuaguuauaagacugacuagcccgaugggccucccaacgggcccuccuccccuccuugcaccgagauuaauaaaaaaaaaaaaaaaaaaaaaaaaaaaaaaaaaaaaaaaaaaaaaaaaaaaaaaaaaaaaaaaaugcaucccccccccccccccccccccccccccccccaaaggcucuuuucagagccaccagaauu

SEQ ID NO: 21668 - RNA, 6058 nt, Artificial Sequence
  SARS-CoV-2__MT797765.1__non-structural protein 3 (NSP3) mRNA gc
aggagaaagcuuaccauggcccccaccaaggugaccuucggcgacgacacggucaucgaggugcagggguacaagagcgugaacaucaccuucgagcuggacgagcgcaucgacaagguccucaacgagaagugcuccgccuacaccguggagcugggcaccgaggugaacgaguucgcgugcgucguggccgacgccgugaucaagacgcugcagccggucagcgagcuccugaccccccuggggaucgaccucgacgagugguccauggccaccuacuaccuguucgacgagagcggcgaguucaagcuggccucccacauguacugcagcuucuacccccccgacgaggacgaggaggagggggacugcgaggaggaggaguucgagccguccacccaguacgaguacggcacggaggacgacuaccagggcaagccccucgaguucggggcgaccagcgccgcccugcagcuggaggaggagcaggaggaggacuggcucgacgacgacucccagcagaccgugggccagcaggacgggagcgaggacaaccagaccacgaccauccagaccaucguggagguccagccccagcuggagauggagcugacccccguggugcagacgaucgaggucaacuccuucagcggcuaccucaagcugaccgacaacguguacaucaagaacgccgacaucguggaggaggcgaagaaggucaagccgaccgugguggucaacgccgccaacguguaccugaagcacgggggcggcguggccggggcccucaacaaggcgaccaacaacgccaugcaggucgaguccgacgacuacaucgccacgaacggcccccugaagguggggggcagcugcguccuguccggccacaaccucgccaagcacugccugcacgugguggggcccaacgucaacaagggcgaggacauccagcugcucaagagcgccuacgagaacuucaaccagcacgaggugcugcuggcgccccuccuguccgccgggaucuucggcgccgacccgauccacagccugcgggugugcgucgacaccgugcgcaccaacguguaccucgccgucuucgacaagaaccuguacgacaagcugguguccagcuuccucgagaugaagagcgagaagcagguggagcagaagaucgccgagauccccaaggaggaggucaagcccuucaucaccgaguccaagcccagcguggagcagcggaagcaggacgacaagaagaucaaggcgugcguggaggaggucacgaccacccuggaggagaccaaguuccugacggagaaccuccugcuguacaucgacaucaacgggaaccuccacccggacuccgccacccuggugagcgacaucgacaucaccuuccugaagaaggacgcccccuacaucgugggcgacgucgugcaggagggcgugcucaccgccgucgugauccccacgaagaaggccgggggcaccaccgagaugcuggcgaaggcccugcgcaaggugcccaccgacaacuacaucacgaccuacccggggcagggccucaacggguacaccgucgaggaggccaagaccgugcugaagaagugcaaguccgccuucuacauccugcccagcaucaucuccaacgagaagcaggagauccucggcaccgugagcuggaaccugcgggagaugcuggcgcacgccgaggagacgcgcaagcugaugcccgucugcguggagaccaaggccaucguguccaccauccagcggaaguacaagggcaucaagauccaggagggggucguggacuacggcgcccgcuucuacuucuacaccagcaagacgaccguggccucccucaucaacacccugaacgaccugaacgagacccucgucacgaugccccugggguacgugacccacggccugaaccucgaggaggcggcccgguacaugcgcagccugaaggugccggccaccgucuccgugagcucccccgacgccgugaccgccuacaacggguaccugacgagcuccagcaagacccccgaggagcacuucaucgagaccaucucccucgcgggcagcuacaaggacuggagcuacuccggccagagcacccagcuggggaucgaguuccugaagcggggcgacaaguccgucuacuacacgagcaaccccaccaccuuccaccucgacggggaggugaucaccuucgacaaccugaagacgcugcucucccugcgcgaggugcggaccaucaaggucuucaccaccguggacaacaucaaccugcacacgcagguggucgacaugagcaugaccuacggccagcaguucggcccgaccuaccucgacggggccgacgugaccaagaucaagccccacaacucccacgagggcaagacguucuacgugcugcccaacgacgacacccugcgcgucgaggccuucgaguacuaccacaccaccgacccgagcuuccucgggcgguacauguccgcccugaaccacacgaagaaguggaaguacccccaggugaacggccugaccagcaucaagugggccgacaacaacugcuaccucgcgaccgcccugcugacccuccagcagaucgagcugaaguucaacccccccgcccugcaggacgccuacuaccgcgcgcgggccggggaggccgccaacuucugcgcccucauccuggcguacugcaacaagacggugggcgagcugggcgacguccgcgagaccauguccuaccucuuccagcacgccaaccuggacagcugcaagcgggugcugaacgucgugugcaagaccugcgggcagcagcagaccacccucaagggcguggaggccgucauguacauggggacgcuguccuacgagcaguucaagaagggcgugcagaucccgugcaccugcgggaagcaggccaccaaguaccuggugcagcaggagagccccuucgucaugauguccgccccccccgcgcaguacgagcucaagcacggcaccuucacgugcgccagcgaguacaccggcaacuaccagugcgggcacuacaagcacaucaccuccaaggagacccuguacugcaucgacggcgcccugcucacgaagagcagcgaguacaaggggccgaucaccgacguguucuacaaggagaacuccuacaccaccacgaucaagcccgugaccuacaagcuggacggcgucgugugcaccgagaucgaccccaagcuggacaacuacuacaagaaggacaacagcuacuucaccgagcagcccaucgaccucgugccgaaccagcccuaccccaacgccuccuucgacaacuucaaguucgucugcgacaacaucaaguucgccgacgaccugaaccagcugacgggguacaagaagcccgcgagccgcgagcucaaggugaccuucuucccggaccugaacggcgacguggucgccaucgacuacaagcacuacacccccuccuucaagaagggcgccaagcugcuccacaagcccaucguguggcacgugaacaacgccaccaacaaggcgacguacaagcccaacaccuggugcauccggugccuguggagcaccaagccggucgagaccuccaacagcuucgacgugcugaaguccgaggacgcccaggggauggacaaccucgccugcgaggaccugaagcccgugagcgaggaggucguggagaaccccacgauccagaaggacgugcuggagugcaacgucaagaccaccgagguggugggcgacaucauccucaagcccgccaacaacucccugaagaucaucgaggaggucgggcacaccgaccugauggccgcguacguggacaacagcucccucacgaucaagaagccgaacgagcugagccgcgugcugggccucaagacccuggccacccacgggcuggccgccgucaacuccgugcccugggacaccaucgccaacuacgcgaagcccuuccucaacaagguggucagcacgaccaccaacaucgugacccgcugccugaaccgggugugcacgaacuacaugccguacuucuucacccugcuccugcagcugugcaccuucacccgcuccaccaacagccggaucaaggccuccaugcccacgaccaucgccaagaacaccgucaagagcgugggcaaguucugccucgaggccagcuucaacuaccugaagucccccaacuucagcaagcugaucaacaucaucaucugguuccuccugcuguccgugugccucggcagccugaucuacuccaccgccgcgcuggggguccucaugagcaaccugggcaugcccuccuacugcacgggguaccgcgagggcuaccugaacagcaccaacgugaccaucgccaccuacugcacgggcuccaucccgugcagcgugugccucuccgggcuggacagccuggacaccuaccccucccucgagaccauccagaucaccaucagcuccuucaagugggaccugacggccuucggccuggucgccgagugguuccucgccuacauccuguucacccgguucuucuacgugcuggggcucgcggccaucaugcagcuguucuucagcuacuucgccgugcacuucaucuccaacagcuggcugauguggcugaucaucaaccucguccagauggcccccaucuccgcgauggugcgcauguacaucuucuucgccagcuucuacuacguguggaagagcuacguccacgugguggacggcugcaacuccagcaccugcaugaugugcuacaagcggaaccgcgccacccgggucgagugcacgaccaucgugaacgggguccgccgguccuucuacguguacgccaacggcggcaagggguucugcaagcugcacaacuggaacugcgugaacugcgacaccuucugcgccggcagcaccuucaucuccgacgaggucgcgcgcgaccugagccuccaguucaagcggcccaucaacccgacggaccaguccagcuacaucguggacuccgugaccgucaagaacgggagcauccaccuguacuucgacaaggccggccagaagaccuacgagcgccacucccugagccacuucgugaaccucgacaaccugcgggccaacaacaccaaggggucccugcccaucaacgugaucgucuucgacggcaagagcaagugcgaggaguccagcgccaaguccgccagcguguacuacucccagcucaugugccagcccauccugcugcucgaccaggcgcuggugagcgacgucggcgacagcgccgagguggccgugaagauguucgacgccuacgucaacacguucuccagcaccuucaacgugcccauggagaagcugaagacccucguggccaccgcggaggccgagcuggccaagaacgucucccuggacaacgugcucagcacguucaucuccgccgcgcgccagggguucguggacagcgacgucgagaccaaggacgugguggagugccugaagcugucccaccagagcgacaucgaggucaccggcgacuccugcaacaacuacaugcucaccuacaacaagguggagaacaugacgccgcgggaccugggggccugcaucgacugcagcgcccgccacaucaacgcccagguggccaagucccacaacaucgcgcugaucuggaacgucaaggacuucaugagccucuccgagcagcugcggaagcagauccgcagcgccgccaagaagaacaaccugcccuucaagcucaccugcgccaccacccgccagguggugaacgucgugacgaccaagaucgcccugaagggcgggugaggacuaguuauaagacugacuagcccgaugggccucccaacgggcccuccuccccuccuugcaccgagauuaauaaaaaaaaaaaaaaaaaaaaaaaaaaaaaaaaaaaaaaaaaaaaaaaaaaaaaaaaaaaaaaaaugcaucccccccccccccccccccccccccccccccaaaggcucuuuucagagccaccagaauu

SEQ ID NO: 21669 - RNA, 6058 nt, Artificial Sequence
  SARS-CoV-2__MT791880.1__non-structural protein 3 (NSP3) mRNA gc
aggagaaagcuuaccauggcccccaccaaggugaccuucggcgacgacacggucaucgaggugcagggguacaagagcgugaacaucaccuucgagcuggacgagcgcaucgacaagguccucaacgagaagugcuccgccuacaccguggagcugggcaccgaggugaacgaguucgcgugcgucguggccgacgccgugaucaagacgcugcagccggucagcgagcuccugaccccccuggggaucgaccucgacgagugguccauggccaccuacuaccuguucgacgagagcggcgaguucaagcuggccucccacauguacugcagcuucuacccccccgacgaggacgaggaggagggggacugcgaggaggaggaguucgagccguccacccaguacgaguacggcacggaggacgacuaccagggcaagccccucgaguucggggcgaccagcgccgcccugcagcccgaggaggagcaggaggaggacuggcuggacgacgacucccagcagaccgugggccagcaggacgggagcgaggacaaccagaccacgaccauccagaccaucguggagguccagccccagcucgagauggagcugaccccgguggugcagacgaucgaggucaacuccuucagcggcuaccugaagcucaccgacaacguguacaucaagaacgccgacaucguggaggaggcgaagaaggucaagcccaccgugguggucaacgccgccaacguguaccugaagcacgggggcggcguggccggggcccugaacaaggcgaccaacaacgccaugcaggucgaguccgacgacuacaucgccacgaacggcccccucaagguggggggcagcugcguccuguccggccacaaccuggccaagcacugccuccacgugguggggcccaacgucaacaagggcgaggacauccagcugcugaagagcgccuacgagaacuucaaccagcacgaggugcuccuggcgccgcugcucuccgccgggaucuucggcgccgaccccauccacagccugcgggugugcgucgacaccgugcgcaccaacguguaccuggccgucuucgacaagaaccucuacgacaagcugguguccagcuuccuggagaugaagagcgagaagcagguggagcagaagaucgccgagauccccaaggaggaggucaagcccuucaucaccgaguccaagccgagcguggagcagcggaagcaggacgacaagaagaucaaggcgugcguggaggaggucacgaccacccucgaggagaccaaguuccugacggagaaccugcuccuguacaucgacaucaacgggaaccugcaccccgacuccgccacccucgugagcgacaucgacaucaccuuccugaagaaggacgcccccuacaucgugggcgacgucgugcaggagggcgugcugaccgccgucgugauccccacgaagaaggccgggggcaccaccgagaugcucgcgaaggcccugcgcaaggugccgaccgacaacuacaucacgaccuaccccgggcagggccugaacggguacaccgucgaggaggccaagaccgugcucaagaagugcaaguccgccuucuacauccugcccagcaucaucuccaacgagaagcaggagauccugggcaccgugagcuggaaccuccgggagaugcuggcgcacgccgaggagacgcgcaagcugaugcccgucugcguggagaccaaggccaucguguccaccauccagcggaaguacaagggcaucaagauccaggagggggucguggacuacggcgcccgcuucuacuucuacaccagcaagacgaccguggccucccugaucaacacccucaacgaccugaacgagacccuggucacgaugccgcucggguacgugacccacggccugaaccuggaggaggcggcccgguacaugcgcagccucaaggugcccgccaccgucuccgugagcucccccgacgccgugaccgccuacaacggguaccugacgagcuccagcaagacccccgaggagcacuucaucgagaccaucucccuggcgggcagcuacaaggacuggagcuacuccggccagagcacccagcucgggaucgaguuccugaagcggggcgacaaguccgucuacuacacgagcaacccgaccaccuuccaccuggacggggaggugaucaccuucgacaaccucaagacgcugcugucccuccgcgaggugcggaccaucaaggucuucaccaccguggacaacaucaaccugcacacgcagguggucgacaugagcaugaccuacggccagcaguucggccccaccuaccuggacggggccgacgugaccaagaucaagccccacaacucccacgagggcaagacguucuacgugcucccgaacgacgacacccugcgcgucgaggccuucgaguacuaccacaccaccgaccccagcuuccuggggcgguacauguccgcccucaaccacacgaagaaguggaaguacccccaggugaacggccugaccagcaucaagugggccgacaacaacugcuaccuggcgaccgcccuccugacccugcagcagaucgagcucaaguucaaccccccggcccugcaggacgccuacuaccgcgcgcgggccggggaggccgccaacuucugcgcccugauccucgcguacugcaacaagacggugggcgagcugggcgacguccgcgagaccauguccuaccuguuccagcacgccaaccucgacagcugcaagcgggugcugaacgucgugugcaagaccugcgggcagcagcagaccacccugaagggcguggaggccgucauguacauggggacgcucuccuacgagcaguucaagaagggcgugcagauccccugcaccugcgggaagcaggccaccaaguaccuggugcagcaggagagccccuucgucaugauguccgcccccccggcgcaguacgagcugaagcacggcaccuucacgugcgccagcgaguacaccggcaacuaccagugcgggcacuacaagcacaucaccuccaaggagacccucuacugcaucgacggcgcccugcugacgaagagcagcgaguacaaggggcccaucaccgacguguucuacaaggagaacuccuacaccaccacgaucaagcccgugaccuacaagcucgacggcgucgugugcaccgagaucgaccccaagcuggacaacuacuacaagaaggacaacagcuacuucaccgagcagccgaucgaccuggugcccaaccagcccuaccccaacgccuccuucgacaacuucaaguucgucugcgacaacaucaaguucgccgacgaccucaaccagcugacgggguacaagaagccggcgagccgcgagcugaaggugaccuucuuccccgaccucaacggcgacguggucgccaucgacuacaagcacuacacccccuccuucaagaagggcgccaagcugcugcacaagcccaucguguggcacgugaacaacgccaccaacaaggcgacguacaagccgaacaccuggugcauccggugccucuggagcaccaagcccgucgagaccuccaacagcuucgacgugcugaaguccgaggacgcccaggggauggacaaccuggccugcgaggaccucaagcccgugagcgaggaggucguggagaaccccacgauccagaaggacgugcuggagugcaacgucaagaccaccgagguggugggcgacaucauccugaagccggccaacaacucccucaagaucaccgaggaggucgggcacacggaccugauggccgcguacguggacaacagcucccugaccaucaagaagcccaacgagcucagccgcgugcugggccugaagacccucgccacccacgggcuggccgccgucaacuccgugcccugggacacgaucgccaacuacgcgaagccguuccugaacaagguggucagcaccaccaccaacaucgugacgcgcugccucaaccgggugugcaccaacuacaugcccuacuucuucacccugcugcuccagcugugcaccuucacccgcuccacgaacagccggaucaaggccuccaugcccaccaccaucgccaagaacaccgucaagagcgugggcaaguucugccuggaggccagcuucaacuaccucaagucccccaacuucagcaagcugaucaacaucaucaucugguuccugcuccuguccgugugccugggcagccucaucuacuccacggccgcgcuggggguccugaugagcaaccucggcaugccguccuacugcaccggguaccgcgagggcuaccugaacagcaccaacgugaccaucgccacguacugcaccggcuccauccccugcagcgugugccuguccgggcucgacagccuggacaccuaccccucccuggagaccauccagaucacgaucagcuccuucaagugggaccucaccgccuucggccuggucgccgagugguuccuggccuacauccucuucacccgguucuucuacgugcuggggcuggcggccaucaugcagcucuucuucagcuacuucgccgugcacuucaucuccaacagcuggcugauguggcugaucaucaaccugguccagauggcccccaucuccgcgauggugcgcauguacaucuucuucgccagcuucuacuacguguggaagagcuacguccacgugguggacggcugcaacuccagcaccugcaugaugugcuacaagcggaaccgcgccacgcgggucgagugcaccaccaucgugaacgggguccgccgguccuucuacguguacgccaacggcggcaagggguucugcaagcuccacaacuggaacugcgugaacugcgacaccuucuacgccggcagcacguucaucuccgacgaggucgcgcgcgaccugagccugcaguucaagcggccgaucaaccccaccgaccaguccagcuacaucguggacuccgugaccgucaagaacgggagcauccaccucuacuucgacaaggccggccagaagaccuacgagcgccacucccugagccacuucgugaaccuggacaaccuccgggccaacaacacgaaggggucccugcccaucaacgugaucgucuucgacggcaagagcaagugcgaggaguccagcgccaaguccgccagcguguacuacucccagcugaugugccagcccauccuccugcuggaccaggcgcucgugagcgacgucggcgacagcgccgagguggccgugaagauguucgacgccuacgucaacaccuucuccagcaccuucaacgugccgauggagaagcugaagacccugguggccacggcggaggccgagcucgccaagaacgucucccuggacaacgugcugagcaccuucaucuccgccgcgcgccagggguucguggacagcgacgucgagaccaaggacgugguggagugccucaagcugucccaccagagcgacaucgaggucaccggcgacuccugcaacaacuacaugcugacguacaacaagguggagaacaugaccccccgggaccucggggccugcaucgacugcagcgcccgccacaucaacgcccagguggccaagucccacaacaucgcgcugaucuggaacgucaaggacuucaugagccuguccgagcagcuccggaagcagauccgcagcgccgccaagaagaacaaccugcccuucaagcugaccugcgccaccacgcgccagguggugaacgucgugaccaccaagaucgcccucaagggcgggugaggacuaguuauaagacugacuagcccgaugggccucccaacgggcccuccuccccuccuugcaccgagauuaauaaaaaaaaaaaaaaaaaaaaaaaaaaaaaaaaaaaaaaaaaaaaaaaaaaaaaaaaaaaaaaaaugcaucccccccccccccccccccccccccccccccaaaggcucuuuucagagccaccagaauu

SEQ ID NO: 21670 - RNA, 6058 nt, Artificial Sequence
  SARS-CoV-2__MT791915.1__non-structural protein 3 (NSP3) mRNA gc
aggagaaagcuuaccauggcccccaccaaggugaccuucggcgacgacacggucaucgaggugcagggguacaagagcgugaacaucaccuucgagcuggacgagcgcaucgacaagguccucaacgagaagugcuccgccuacaccguggagcugggcaccgaggugaacgaguucgcgugcgucguggccgacgccgugaucaagacgcugcagccggucagcgagcuccugaccccccuggggaucgaccucgacgagugguccauggccaccuacuaccuguucgacgagagcggcgaguucaagcuggccucccacauguacugcagcuucuacccccccgacgaggacgaggaggagggggacugcgaggaggaggaguucgagccguccacccaguacgaguaccggacggaggacgacuaccagggcaagccccucgaguucggcgcgaccagcgccgcccugcagcccgaggaggagcaggaggaggacuggcuggacgacgacucccagcagaccguggggcagcaggacggcagcgaggacaaccagaccacgaccauccagaccaucguggagguccagccccagcucgagauggagcugaccccgguggugcagacgaucgaggucaacuccuucagcggguaccugaagcucaccgacaacguguacaucaagaacgccgacaucguggaggaggcgaagaaggucaagcccaccgugguggucaacgccgccaacguguaccugaagcacggcgggggcguggccggcgcccugaacaaggcgaccaacaacgccaugcaggucgaguccgacgacuacaucgccacgaacgggccccucaaggugggcgggagcugcguccuguccggccacaaccuggccaagcacugccuccacguggugggccccaacgucaacaagggggaggacauccagcugcugaagagcgccuacgagaacuucaaccagcacgaggugcuccuggcgccgcugcucuccgccggcaucuucggggccgaccccauccacagccugcgcgugugcgucgacaccgugcggaccaacguguaccuggccgucuucgacaagaaccucuacgacaagcugguguccagcuuccuggagaugaagagcgagaagcagguggagcagaagaucgccgagauccccaaggaggaggucaagcccuucaucaccgaguccaagccgagcguggagcagcgcaagcaggacgacaagaagaucaaggcgugcguggaggaggucacgaccacccucgaggagaccaaguuccugacggagaaccugcuccuguacaucgacaucaacggcaaccugcaccccgacuccgccacccucgugagcgacaucgacaucaccuuccugaagaaggacgcccccuacaucgugggggacgucgugcaggagggcgugcugaccgccgucgugauccccacgaagaaggccggcgggaccaccgagaugcucgcgaaggcccugcggaaggugccgaccgacaacuacaucacgaccuaccccggccaggggcugaacggcuacaccgucgaggaggccaagaccgugcucaagaagugcaaguccgccuucuacauccugcccagcaucaucuccaacgagaagcaggagauccuggggaccgugagcuggaaccuccgcgagaugcuggcgcacgccgaggagacgcggaagcugaugcccgucugcguggagaccaaggccaucguguccaccauccagcgcaaguacaagggcaucaagauccaggagggcgucguggacuacggggcccgguucuacuucuacaccagcaagacgaccguggccucccugaucaacacccucaacgaccugaacgagacccuggucacgaugccgcucggcuacgugacccacgggcugaaccuggaggaggcggcccgcuacaugcggagccucaaggugcccgccaccgucuccgugagcucccccgacgccgugaccgccuacaacggcuaccugacgagcuccagcaagacccccgaggagcacuucaucgagaccaucucccuggcggggagcuacaaggacuggagcuacuccggccagagcacccagcucggcaucgaguuccugaagcgcggggacaaguccgucuacuacacgagcaacccgaccaccuuccaccuggacggcgaggugaucaccuucgacaaccucaagacgcugcugucccuccgggaggugcgcaccaucaaggucuucaccaccguggacaacaucaaccugcacacgcagguggucgacaugagcaugaccuacgggcagcaguucggccccaccuaccuggacggcgccgacgugaccaagaucaagccccacaacucccacgaggggaagacguucuacgugcucccgaacgacgacacccugcgggucgaggccuucgaguacuaccacaccaccgaccccagcuuccugggccgcuacauguccgcccucaaccacacgaagaaguggaaguacccccaggugaacgggcugaccagcaucaagugggccgacaacaacugcuaccuggcgaccgcccuccugacccugcagcagaucgagcucaaguucaaccccccggcccugcaggacgccuacuaccgggcgcgcgccggcgaggccgccaacuucugcgcccugauccucgcguacugcaacaagacggugggggagcugggcgacguccgggagaccauguccuaccuguuccagcacgccaaccucgacagcugcaagcgcgugcugaacgucgugugcaagaccugcggccagcagcagaccacccugaaggggguggaggccgucauguacaugggcacgcucuccuacgagcaguucaagaagggggugcagauccccugcaccugcggcaagcaggccaccaaguaccuggugcagcaggagagccccuucgucaugauguccgcccccccggcgcaguacgagcugaagcacgggaccuucacgugcgccagcgaguacaccggcaacuaccagugcggccacuacaagcacaucaccuccaaggagacccucuacugcaucgacggggcccugcugacgaagagcagcgaguacaagggccccaucaccgacguguucuacaaggagaacuccuacaccaccacgaucaagcccgugaccuacaagcucgacggggucgugugcaccgagaucgaccccaagcuggacaacuacuacaagaaggacaacagcuacuucaccgagcagccgaucgaccuggugcccaaccagcccuaccccaacgccuccuucgacaacuucaaguucgucugcgacaacaucaaguucgccgacgaccucaaccagcugacgggcuacaagaagccggcgagccgggagcugaaggugaccuucuuccccgaccucaacggggacguggucgccaucgacuacaagcacuacacccccuccuucaagaagggcgccaagcugcugcacaagcccaucguguggcacgugaacaacgccaccaacaaggcgacguacaagccgaacaccuggugcauccgcugccucuggagcaccaagcccgucgagaccuccaacagcuucgacgugcugaaguccgaggacgcccagggcauggacaaccuggccugcgaggaccucaagcccgugagcgaggaggucguggagaaccccacgauccagaaggacgugcuggagugcaacgucaagaccaccgagguggugggggacaucauccugaagccggccaacaacucccucaagaucaccgaggaggucggccacacggaccugauggccgcguacguggacaacagcucccugaccaucaagaagcccaacgagcucagccgcgugcuggggcugaagacccucgccacccacggccuggccgccgucaacuccgugcccugggacacgaucgccaacuacgcgaagccguuccugaacaagguggucagcaccaccaccaacaucgugacgcggugccucaaccgcgugugcaccaacuacaugcccuacuucuucacccugcugcuccagcugugcaccuucacccgguccacgaacagccgcaucaaggccuccaugcccaccaccaucgccaagaacaccgucaagagcguggggaaguucugccuggaggccagcuucaacuaccucaagucccccaacuucagcaagcugaucaacaucaucaucugguuccugcuccuguccgugugccugggcagccucaucuacuccacggccgcgcugggcguccugaugagcaaccucgggaugccguccuacugcaccggcuaccgggagggguaccugaacagcaccaacgugaccaucgccacguacugcaccggcuccauccccugcagcgugugccuguccggccucgacagccuggacaccuaccccucccuggagaccauccagaucacgaucagcuccuucaagugggaccucaccgccuucgggcuggucgccgagugguuccuggccuacauccucuucacccgcuucuucuacgugcugggccuggcggccaucaugcagcucuucuucagcuacuucgccgugcacuucaucuccaacagcuggcugauguggcugaucaucaaccugguccagauggcccccaucuccgcgauggugcggauguacaucuucuucgccagcuucuacuacguguggaagagcuacguccacgugguggacgggugcaacuccagcaccugcaugaugugcuacaagcgcaaccgggccacgcgcgucgagugcaccaccaucgugaacggcguccggcgcuccuucuacguguacgccaacgggggcaagggcuucugcaagcuccacaacuggaacugcgugaacugcgacaccuucugcgccgggagcacguucaucuccgacgaggucgcgcgggaccugagccugcaguucaagcgcccgaucaaccccaccgaccaguccagcuacaucguggacuccgugaccgucaagaacggcagcauccaccucuacuucgacaaggccgggcagaagaccuacgagcggcacucccugagccacuucgugaaccuggacaaccuccgcgccaacaacacgaagggcucccugcccaucaacgugaucgucuucgacgggaagagcaagugcgaggaguccagcgccaaguccgccagcguguacuacucccagcugaugugccagcccauccuccugcuggaccaggcgcucgugagcgacgucggcgacagcgccgagguggccgugaagauguucgacgccuacgucaacaccuucuccagcaccuucaacgugccgauggagaagcugaagacccugguggccacggcggaggccgagcucgccaagaacgucucccuggacaacgugcugagcaccuucaucuccgccgcgcggcagggcuucguggacagcgacgucgagaccaaggacgugguggagugccucaagcugucccaccagagcgacaucgaggucaccggggacuccugcaacaacuacaugcugacguacaacaagguggagaacaugaccccccgcgaccucggcgccugcaucgacugcagcgcccggcacaucaacgcccagguggccaagucccacaacaucgcgcugaucuggaacgucaaggacuucaugagccuguccgagcagcuccgcaagcagauccgcagcgccgccaagaagaacaaccugcccuucaagcugaccugcgccaccacgcggcagguggugaacgucgugaccaccaagaucgcccucaaggggggcugaggacuaguuauaagacugacuagcccgaugggccucccaacgggcccuccuccccuccuugcaccgagauuaauaaaaaaaaaaaaaaaaaaaaaaaaaaaaaaaaaaaaaaaaaaaaaaaaaaaaaaaaaaaaaaaaugcaucccccccccccccccccccccccccccccccaaaggcucuuuucagagccaccagaauu

SEQ ID NO: 21671 - RNA, 6058 nt, Artificial Sequence
  SARS-CoV-2__MT791940.1__non-structural protein 3 (NSP3) mRNA gc
aggagaaagcuuaccauggcccccaccaaggugaccuucggcgacgacacggucaucgaggugcagggguacaagagcgugaacaucaccuucgagcuggacgagcgcaucgacaagguccucaacgagaagugcuccgccuacaccguggagcugggcaccgaggugaacgaguucgcgugcgucguggccgacgccgugaucaagacgcugcagccggucagcgagcuccugaccccccuggggaucgaccucgacgagugguccauggccaccuacuaccuguucgacgagagcggcgaguucaagcuggccucccacauguacugcagcuucuacccccccgacgaggacgaggaggagggggacugcgaggaggaggaguucgagccguccacccaguacgaguacggcacggaggacgacuaccagggcaagccccucgaguucggggcgaccagcgccgcccugcagcccgaggaggagcaggaggaggacuggcuggacgacgacucccagcagaccgugggccagcaggacgggagcgaggacaaccagaccacgaccauccagaccaucguggagguccagccccagcucgagauggagcugaccccgguggugcagacgaucgaggucaacuccuucagcggcuaccugaagcucaccgacaacguguacaucaagaacgccgacaucguggaggaggcgaagaaggucaagcccaccgugguggucaacgccgccaacguguaccugaagcacgggggcggcguggccggggcccugaacaaggcgaccaacaacgccaugcaggucgaguccgacgacuacaucgccacgaacggcccccucaagguggggggcagcugcguccuguccggccacaaccuggccaagcacugccuccacgugguggggcccaacgucaacaagggcgaggacauccagcugcugaagagcgccuacgagaacuucaaccagcacgaggugcuccuggcgccgcugcucuccgccgggaucuucggcgccgaccccauccacagccugcgggugugcgucgacaccgugcgcaccaacguguaccuggccgucuucgacaagaaccucuacgacaagcugguguccagcuuccuggagaugaagagcgagaagcagguggagcagaagaucgccgagauccccaaggaggaggucaagcccuucaucaccgaguccaagccgagcguggagcagcggaagcaggacgacaagaagaucaaggcgugcguggaggaggucacgaccacccucgaggagaccaaguuccugacggagaaccugcuccuguacaucgacaucaacgggaaccugcaccccgacuccgccacccucgugagcgacaucgacaucaccuuccugaagaaggacgcccccuacaucgugggcgacgucgugcaggagggcgugcugaccgccgucgugauccccacgaagaaggccgggggcaccaccgagaugcucgcgaaggcccugcgcaaggugccgaccgacaacuacaucacgaccuaccccgggcagggccugaacggguacaccgucgaggaggccaagaccgugcucaagaagugcaaguccgccuucuacauccugcccagcaucaucuccaacgagaagcaggagauccugggcaccgugagcuggaacuggcgggagaugcucgcgcacgccgaggagacgcgcaagcugaugcccgucugcguggagaccaaggccaucguguccaccauccagcggaaguacaagggcaucaagauccaggagggggucguggacuacggcgcccgcuucuacuucuacaccagcaagacgaccguggccucccugaucaacacccugaacgaccucaacgagacccuggucacgaugccgcugggguacgugacccacggccucaaccuggaggaggcggcccgguacaugcgcagccugaaggugcccgccaccgucuccgugagcucccccgacgccgugaccgccuacaacggguaccucacgagcuccagcaagacccccgaggagcacuucaucgagaccaucucccuggcgggcagcuacaaggacuggagcuacuccggccagagcacccagcuggggaucgaguuccucaagcggggcgacaaguccgucuacuacacgagcaacccgaccaccuuccaccuggacggggaggugaucaccuucgacaaccugaagacgcuccugucccugcgcgaggugcggaccaucaaggucuucaccaccguggacaacaucaaccuccacacgcagguggucgacaugagcaugaccuacggccagcaguucggccccaccuaccuggacggggccgacgugaccaagaucaagccccacaacucccacgagggcaagacguucuacgugcugccgaacgacgacacccuccgcgucgaggccuucgaguacuaccacaccaccgaccccagcuuccuggggcgguacauguccgcccugaaccacacgaagaaguggaaguacccccaggugaacggccucaccagcaucaagugggccgacaacaacugcuaccuggcgaccgcccugcucacccugcagcagaucgagcugaaguucaaccccccggcccuccaggacgccuacuaccgcgcgcgggccggggaggccgccaacuucugcgcccugauccuggcguacugcaacaagacggugggcgagcucggcgacguccgcgagaccauguccuaccuguuccagcacgccaaccuggacagcugcaagcgggugcucaacgucgugugcaagaccugcgggcagcagcagaccacccugaagggcguggaggccgucauguacauggggacgcuguccuacgagcaguucaagaagggcgugcagauccccugcaccugcgggaagcaggccaccaaguaccucgugcagcaggagagccccuucgucaugauguccgcccccccggcgcaguacgagcugaagcacggcaccuucacgugcgccagcgaguacaccggcaacuaccagugcgggcacuacaagcacaucaccuccaaggagacccuguacugcaucgacggcgcccuccugacgaagagcagcgaguacaaggggcccaucaccgacguguucuacaaggagaacuccuacaccaccacgaucaagcccgugaccuacaagcuggacggcgucgugugcaccgagaucgaccccaagcucgacaacuacuacaagaaggacaacagcuacuucaccgagcagccgaucgaccuggugcccaaccagcccuaccccaacgccuccuucgacaacuucaaguucgucugcgacaacaucaaguucgccgacgaccugaaccagcucacgggguacaagaagccggcgagccgcgagcugaaggugaccuucuuccccgaccugaacggcgacguggucgccaucgacuacaagcacuacacccccuccuucaagaagggcgccaagcuccugcacaagcccaucguguggcacgugaacaacgccaccaacaaggcgacguacaagccgaacaccuggugcauccggugccuguggagcaccaagcccgucgagaccuccaacagcuucgacgugcucaaguccgaggacgcccaggggauggacaaccuggccugcgaggaccugaagcccgugagcgaggaggucguggagaaccccacgauccagaaggacgugcucgagugcaacgucaagaccaccgagguggugggcgacaucauccugaagccggccaacaacucccugaagaucaccgaggaggucgggcacacggaccucauggccgcguacguggacaacagcucccugaccaucaagaagcccaacgagcugagccgcgugcucggccugaagacccuggccacccacgggcucgccgccgucaacuccgugcccugggacacgaucgccaacuacgcgaagccguuccugaacaagguggucagcaccaccaccaacaucgugacgcgcugccugaaccgggugugcaccaacuacaugcccuacuucuucacccuccugcugcagcucugcaccuucacccgcuccacgaacagccggaucaaggccuccaugcccaccaccaucgccaagaacaccgucaagagcgugggcaaguucugccuggaggccagcuucaacuaccugaagucccccaacuucagcaagcucaucaacaucaucaucugguuccugcugcucuccgugugccugggcagccugaucuacuccacggccgcgcucgggguccugaugagcaaccugggcaugccguccuacugcaccggguaccgcgagggcuaccucaacagcaccaacgugaccaucgccacguacugcaccggcuccauccccugcagcgugugccuguccgggcuggacagccucgacaccuaccccucccuggagaccauccagaucacgaucagcuccuucaagugggaccugaccgccuucggccucgucgccgagugguuccuggccuacauccuguucacccgguucuucuacgugcucgggcuggcggccaucaugcagcuguucuucagcuacuucgccgugcacuucaucuccaacagcuggcucauguggcugaucaucaaccugguccagauggcccccaucuccgcgauggugcgcauguacaucuucuucgccagcuucuacuacguguggaagagcuacguccacgugguggacggcugcaacuccagcaccugcaugaugugcuacaagcggaaccgcgccacgcgggucgagugcaccaccaucgugaacgggguccgccgguccuucuacguguacgccaacggcggcaagggguucugcaagcugcacaacuggaacugcgugaacugcgacaccuucugcgccggcagcacguucaucuccgacgaggucgcgcgcgaccucagccugcaguucaagcggccgaucaaccccaccgaccaguccagcuacaucguggacuccgugaccgucaagaacgggagcauccaccuguacuucgacaaggccggccagaagaccuacgagcgccacucccucagccacuucgugaaccuggacaaccugcgggccaacaacacgaaggggucccuccccaucaacgugaucgucuucgacggcaagagcaagugcgaggaguccagcgccaaguccgccagcguguacuacucccagcugaugugccagcccauccugcuccuggaccaggcgcuggugagcgacgucggcgacagcgccgagguggccgugaagauguucgacgccuacgucaacaccuucuccagcaccuucaacgugccgauggagaagcucaagacccugguggccacggcggaggccgagcuggccaagaacgucucccucgacaacgugcugagcaccuucaucuccgccgcgcgccagggguucguggacagcgacgucgagaccaaggacgugguggagugccugaagcucucccaccagagcgacaucgaggucaccggcgacuccugcaacaacuacaugcugacguacaacaagguggagaacaugaccccccgggaccugggggccugcaucgacugcagcgcccgccacaucaacgcccagguggccaagucccacaacaucgcgcucaucuggaacgucaaggacuucaugagccuguccgagcagcugcggaagcagauccgcagcgccgccaagaagaacaaccuccccuucaagcugaccugcgccaccacgcgccagguggugaacgucgugaccaccaagaucgcccugaagggcgggugaggacuaguuauaagacugacuagcccgaugggccucccaacgggcccuccuccccuccuugcaccgagauuaauaaaaaaaaaaaaaaaaaaaaaaaaaaaaaaaaaaaaaaaaaaaaaaaaaaaaaaaaaaaaaaaaugcaucccccccccccccccccccccccccccccccaaaggcucuuuucagagccaccagaauu
